United States Patent Application Publication US 2014/0057251 A1 - sequence listing, part 123

SEQ ID NO: 225263 - DNA, 5170 bp, Cannabis indica
ggattttgccaatttaggttaaattaacatcttacgtgggttttaggcaaggttgtttcgaagatagataatttgaaagactagggactagggagtggaagttttgattgatgtgtttccatatacatggaattttgtggtttactgaagtggacctttgttcctttatgcttataggttcaactggaacccacaacctcctgggctttagtccgcagaaacttgtctggaccgtcaaaatatacaggaatgttacaagcaacgaaggacattttcagagaagaaggattaccggtacatacataactaacagtatgacattgactgctgttttgttcttgctttcctttctgactttgataatgtttgtattttttatttatcttatggttgctctcttaaacttttttcttgatgtttttaagtacagcattggccttttttctatttattcaaagtaattagtggtctttctttacagggtttctggcgtggaaatgttccagccttgcttatggttatgccatatactgccatacaatttactgtattgcacaaattgaaaacatttgcttctggttcttctaaaacaggtattttgagtactgactagcttctaagaatcagaatcctatggagttattatgctataatattaaggattgtttattgttatagttgttacagtgatcttttttggtgcgttgatttttttttttttgtctagtgtgtagttctatttagttataacctctcaattagaatataatttacttagtcccaagtgtatttttggatagagattctactgtattaataattccactacaatgaatgttcaaagtgtcagtacattcatatacatgtagcagtttatttagaggaaggttgtgaaataaatattgtttgatgttcaggttctgttttcctccatatcagttcagttccagatgcattccaatatttttacttactttcatgtttctcattgttgatttctttttctgcagaggatcacattaatctgagtccatacctttcttatgtcagtggagcattagcagggtgtgcagctactgttgggtcatatccattcgatcttttacggacaatattagcttctcaaggagaacctaaggtatgaatctgaagacttgctttcacttttcctacctgtaaatctagaagtttttaacaaatatggaccaaattcaggtgtatcccaccatgagatctgcatttctggatatagttaatgcccgtggcatccgaggtttgtatgctggattatcaccaacattggttgagattgttccttatgccggtttgcaatttggtacctatgacacatttaagcggtggacagtggtgagttttagtcttgtattgtggcgatgttactgttttctgtgaatttcattttttacttcataccatcttttaaaagctgaaatttttcagaattagaaacctgagtataatgattcttcattttgcagaaacttgtttgataagtatctagttttggtatgaacagagataagatatggatagagtaattatattaaactagatgaatttgaattcatgatggattatgataatatagttgacttagcttggatggtataaatagattacctgagaaatgaatttcctgtcatggatatgtttctgcctatttaaggtaactaaggtaactttagagctgatgctttactgcttttcaatgtaggcctggaaccggcaacaattatccaagataaactcaattggtacggatgatagtattacaagctttcagctctttctctgtggattagcagctgggacatgtgcaaaacttgtttgtcatccacttgatgtcgttaagaaaagattccaggtagatactttgcactttgtattgatttataaatattcttgtttcgggttgccaggcctatatgattcgcgttaaacctcttgtattttattgctataaggtctttcacatgtaaaaagaagccaactagatcaggttttttcctccaaaagctttggatgaaatttactttctaatgatcttggacacacttactaattgatgccttaaaaaacctcgacattagatcccaggttctaacctggtcccacttctttccaaacccccccaccactagaccccatttatacatatatgtcgtaagtagccttagaccatctaccaatcttaaaaatctgctaaattgacaaagaaattgaaagagtaaatgatgaacatttctattatttactcttcaaggacattaaacacaaagatggaggctaagattgtaatggaacttagaaactaaatatttgttaacttatgatgatccagttcttcgttgtatattgttttgaatttgattttatttgcagattgagggattacaaaggcacccgcgatatggggctcgggtagagcatcttgcttacagaaatatgttggacgccttgcaaagaatcatgaaggcagaaggttgggctggtctgtacaaggggataatcccatcaactgtaaaagctgcaccagctggtgcagtaacatttgtggcttatgaatttgcatcagattggttggagtcaatctggacgtaaatctaacttttgtctttctcattctcacccatttttcattactcgattcttttgtccttggagaccttaaaaagctctcataatcaatcgaaggtctaaacaattattttttgtttgatttagtaaaattactataggccattatatttgtacttgtaggtatggcaaaagtaaagaaagtgaatacgtagagttcgtattaaatttttgtagctgaatttaaaattgtgaatggattttaataatctaaagctcttgagctggttaacacagctatatttcattccagtaccagtattattatccatattcttttactgttgaaatttgctatgcttctgagtaatattgtactaaattcagtattgtaatatgaggtcatttcacaaaaaagttagtcaatgatcaacaatgctagattctaaattaagatcttggtcaacagaagtttgattaatgacttgaataactgatataataactcagaacaaaagaatttctacatgtttaacaaaatagaagacagatatccgttgtatagtatttctctataatcaatttgaataagatatcaaagaaattttggtaagaaaagaaaaaatccagcgccttacaagccatctttattatgaaatctgttagtttagcagaagagtgagacaaagcgagcaagtaatcaaaatttgttcccgtctttcttcttctcctcttctggaggcagtgatatgaactgcaagatcttatgaacttccgcaacatcaacacgaaatttttcggcaatttgttgtgcgttcattggaccgttttgatcagcagccttaccttcatgcagaagaacaatgtggcgaagctgagcaacatttaaggttccagaaggagtctgagcatcttcaatagagctgtaatctggtttcgtgtttcgtagttttggcagcggtctcttatactgttctaccacaaatgcctgaaatgtacagcctgttacttagcaacgcaaacaacacctctgggaaatagaaccaaaattattctattacttaaaacttttaaatttaatcatgaaaacaaagactaaaacagccagagaggttttagcaacgtgcaaagtacaaatataaattatataatgaaccattatccaatagagatgactataacaagctaagatctccaaaaaacacataatcacctaacaattgaattctaaagtataacaatgaacaagtcaaattcaattttgaggagaagaggtcataattaagaggaactagtcttgtagacatgacaaaaaactatatcagtacatgagtacaagtgtgttagaaacaacttggaagcaaaccaagaatgttttttagttgattaatgaaagtaagtatgtatgagaactaagaaaacaattgcataaccctccaagctaccaaaaagactaaatatgatcatttaagatgcttttttaacaattaaggaaaaattagtttgaacttacctcacccatttccagttttcccccaggcttagttttgattctacccaccatctgaccaagcatggcatcgaatttcgggtctcgttcttcaagtacattatcaacatttcttcccaaatttacatcttctaaaacaaggaaaaacaccaccaccattgaacataaacaacttagtattcagaacatcaaagatctcaccaaactaaaattttcaacgagagcaaaataaaagtgaggatttttcatcttctaagtgtttatgttgattatcaagcagtagctagcaagctctacctctagctcttcctgggaatcggtgtaatcatgaaacgactatacaaatatcatattggttgtgtcgtttgataccattcctgtgttctaattctaatgcttgaaaacttttgtcctgcttaagaaccataccacatttgttttctttttttccatctaataatgattacccatttcttaaaattcaaaattcaataaagttttagttccagagagagaaagatataaagacagaaaattttcaccagaatcgggtgcagccccaagctgggcggttttggggatctcttcgttgatggtggttgtaacagtgggaggctttctatcaacaacgttcttgggagtggaccaagacgacgtcgcatcagtggtcgaagttgtacggaatcttccagatgctcgacgaaatgcctgacccatcttcctactggccctgttgagattgtctacgaaagtaacgaatcccccaatttcatttatgacagtaattatagattggtatgtatcagcaaaaccctcagaattagggtttagaagaagaagaaaacgagcgtgaagtagaagtaatacacgcgcctgttcaggcttagaagtttagaagaacgaagggaaggaatcactcgacatggtttggaaatgagaaattgagtgccacgtcttcctgaaagaaaaaaataacataggccacgtggctggtgacatagtgggccacgttactctccaacgtgtcactctccatgtattttttattatattttttagttt

SEQ ID NO: 225264 - DNA, 4058 bp, Cannabis indica
aatgataaaaataggaccatgagttcaattttactattttttttttaatataatcaacttgaagacaatttctaacacgaacatatacaaaaaatattaccagttttgtcataacatcttttgattggattattattaagttttattttaataaaaaatcagttcatggtcctatttgtactattttacaaaatacaagatccattttatcatttaacaaaatagaaagtctaattggtaacttttacaaaatacagaattcaaaatagtatttactctactctatatatctcaaaattctttcttttgcttattgattatgataataaagttgacttgtgtggttgagctttccttttcttcttctacaaccactttttcctagagtaccaggccatgaaggtgtagggtatgtcaaatctacgtatcttaaaatatttatatatatagtaaaatttctaattgaggttattcttaaatagagtattcttatataaaggttctactagatacataaaaatgatctattttcaccaattacttgacgtgatacaatgcagagtagtggagagcattggggagggagtaacaagtgtgaaacaaggagatttagtagttccaacatatgtgtctgagtgtagtgagtgtgaaaattgcttgtctgacaagacaaacatgtgcctcaaatatccattgaacattagtggcttaatgcccaacaacacttcaagaatctctgtcaatggccaaatgttgtaccatggtttttcttgctctacttggtcagaatacactgttgtggatgccaactttgtccttaagcttgatccagctcccctcaacttgcaccatgccagcttcctctcttgtggcttctcaactggttttggtgccccttggaaggaggctgcgattgaagaggggtcgtctgtagctgtcattggccttggcgcagttggcttaggggtggtagaaggctcgagaatgcgaggagcgactaagatcattggcattgataagaaccaaagaaggaaggagaaaggagaggcctttggagttactgacttcataaatcctctttttcattcagacaagtctgtttcggaacttatcaaggactcaactggtgggatgggtgtggattattgcttcgagtgcaccggcctcccacaattgattaatgaggcacttgaagccacaaaaattggaaaaggcaaagccattgtaatcggtgtatcaaatgcaccaaccctgcaaatcaacaatttcgctctactaaccggaagaaccttgaaaggttccattttcggagggctcaaagccaaaacagaccttcctattgtatttgagaaatggagaaataaggtaaacaagaaagcctatataaattttccatgtcatacaatgcataagcattcatcacaaaagatcacataatttttttggcttctttcctttttgcaggaattccagctagatgagcttttaactcatgaagttccaatggctgatattaccaaagcatttcagttgttgaagcatgaagactgtgtcaaggtcctattgaagatctagtttgtcttggacaaaaaacctaagaacaaataaagagactttttttttaatttggtctagtcaatatttcttgttgatttgtggatttttatgtattgacttgggagagaaagtaagaatgaacactaaaataaacccatatcaccaaatgcatcactatgagaactataatctatatgaaattgaaacccaaaagtcaaaaacaatgtcatcatggttaggttcaactatacttgacaatgagaccaagttcatttctgcaattgaaaaaacaaccaccaagcaaaattaaggccggaccacttaaccacacatcgatacatgtgatcttcaaccgttcagattctgctgtccaaccatagctacttgacccccaaagcagaccgaaacctatctcatatggtagcctcaacttcgggatcggtttcaacaggcacttggggagagttgtttccacctctgagacgggaagacacattgtcaatggccgagttgagctgactgatcttttcatttaaagtctgcctggttctctgatttcaagcaaaaaggaaacggagtaaggaaatttgcatattcaactagccagaaaagagaacaaaaaacctttgccattagcttacttctaagccttcatcgtaatatattggtttcctggcctttcgaaatccatattcatcttcattaagaagagatcttctaatctataaccaaccaccaaaaagaaaatgtaaacaacaaagtctctgtgtgtgtgtaatatcacccatcaactttaaaacaaaacaacataagccatacatttcgaatgaaagaagcaatgcctaagccaaccttcagcacacaatgcatagagatattcgatacagaatgaatttttcacaaaatgaaattcaacttgaaaatggagttgtaaagttgaatcataagctagtaagagagatgtattgataccaaaacaagaaggcataacacatagtgaccaaccaaaaccaaaatttcacatgaaagttaagcacaagaaagatatgacaatccatctccctatcattgaatgaatgatgagtgtgaattccaactatgatcatgtgagactgactagcagtgggagggaaacagaatcaaaagtgtataaagatatataaaagggagaatatccaaagttttgtactttgttaattcaaatttaatcatcaaaaagttcaatttcatgcaggagaaaataagtttggagattgaaacaaccccttttcaagagataaagctataaatcccatttccaatttgtgtaaataaagaataaaaaagatcaatagagaatattattatgggtaaatattattttaagctctgtgctttgcaaaagttactgaatggactttttgttttgtgattttccacagttgaatcatgtgaggctgatcaacagtggaagtaaaactgaagcaaaagtctatagagaatatcccaagttttggactttcctaatttaaacataataatctaaaagttcaatttcatgcagtaggaaataagtttggagattgaaacaacccttttcaagagataaagctataaatcccatatccaatttgagtaaataaagaaaaaaaaaacatcaacagagaataacaataacatatttggtttcctggcctttcgaaatccatattcatcttcattaagaagagatcttctaatctataaccaaccaccaaaatgaaaatgtaaaccccaatctgtgtgtttgtagtatcacccaacaactttgaaacaaaacaaaacataaaaaaaccgtgcatttgtctaagccaaccttcagcacacactgcatagatatttgatacaaaatgaattcaccaagaaaagaatagatacaaattgaattgtacaaaccagaaagttcacagaaaagagcagagctgaaaataatctagtaacagagatgttaagaaaaaacacataaaaaacatttgggagagatgcttagaaagaacaagaaagatttgactatccatctccctattattgaatgatgagtgtgaggaaaactgaagcaaaagtctatagagaatatcccaagttttgtactttgctaattcaaacttaatcatctaaaacttctatttcatgcaagagaaaaataaaccacaatctgcgtgtgtaagccatgcatttcaaataaaagaaacaacacatttaatacaaaatgaatgtttcacacaaaagaaaatctagtggatttgatgaaaacttcaacttgaaaatggagtcgtgaaagttgtatcatcatgaatagatgcaaagtaaattatacaaaccagaaaagagaagagctgagcctgataataagctagtaagagagatgtattgataccaaaacaacaaaaacacataacacatagtgaccaaccaaaaccaacatttcagagggattttaagcacaagaaagatttgagtatccatctccctatcattgaatg

SEQ ID NO: 225265 - DNA, 4865 bp, Cannabis indica
aattaaaaaatattttgacaactaaattgccaaaaaaggacctaacagttgttttttggaaaaattacataaactactatttttgttgaaaaatttacacttctacattcaatttttttacggtattctataaagacacaaaaagcatcaagaaaatcacatatcatcgtgacataagaacaaaggatatcaaactttgctagggcttaggcgttcctcagcttatgctggtgccatggctgggcgcgaaagacttaggaagggtgcgatcaaaaaatctaacaatggagggatttgggagaatggtgtgaagaagaaaggtccttcctcagaggatccaattatcaaaaactaaatctcttgcggagctgactgggataactgtgattgattttttcaattttgaggaagaagatgcagattaatgcggcacagagcgacgtgctcgaggaggttggtgaacagagaaaaagttcttcgatgcttacaaatctcacaccaatggagaaatcgactgtctcaaagactatttcttcttagattggagttatgcgtgcggctaaggatcgattgactagaggtaaggctctaactaaccttgttcctatactacacattgaatctgatgtcaaattgaaagaggggaataaggatatagttattaggatataatagaggaggcttcttattggaattcaggattggtctgttatgttcttggggctaacccacctatttagaccatggaaggatttttccatagaatctggaaaaataaagggattgacaaagtttctttattagcccatgggattttcttagtttgttttctctcagtagtggattaggataatgtcatagcagggggatacctcttttttaacaagaagcctttagttatgaaaccttggaatgctcatgagaaattttgcaaggaaaatctgtgctgattaccagtttggatagaagtctctcatcttgacattaagtattggggagaaacacctctaaagaagattctttggtagattgataggcttgttaaataggaccaagcctcacaaaattgagataggcttgtctatgctcgagtcatgcttgaagtcagtattagttaagagcttctaaagcaaatagcttttgagaatgaagtgggagacacggttcatctagggatccactaggagtggaaacctacaatttatataggttgtaaaaggcttgggcacacacagtagcattgcaagaaggtaccaaaaagggcaccaatgggttcctaagaaatctgatgaaacaaagaattctaagattgaacaagaaaactaagagaaagtggaaagtaatatgtcaaactttggtctggttgaccaaattcaaagagtttagaggagaaaaaataagaaagaaattgagcttggagatccagaacctagcatgagcataagtaattcatttcaagctttgaatgataaggacactcaggctagacaggtactttgtgagatggggattataggtgagggagggggagtttctcccacacttaagggacataattttttgttagaatgtttaagggatagacagttcctagaaacatagagaggtgataatagtacatatttgagaagaaaattagaattgcgtgtctcttggaatctaaggttaaagctcataatctgggggatttatacctgagtctttttaggggatggtatttttctacaaattcttcttaccatcctaatagtaggattctctttgcttggaacctgatgtcttttgatcttgatatttgggattgttttagtcagcatatgcacattgtggtgaaacctaaacatgctttagtttttgaagctaccttcattaatgctcataatgaggtgaatgatagagatgtcattttggaaaatttgaagatgatggcctgtactcaacaaaatctgtgaattcttattggttatttcaatagtgtgggactcccaaaagagagaattcaagcaggaaaaaatactaaagattgcaagtagctaaaaacctttttggagaatacttcactttgtgacatcaaatattcagattgttttttcacttgaaataataagcaagagggcttgagtagagtgtatgccaacttggattctgttttggggaatcaaaagtggattgatacttttcctactattgaagccaatttttaacctaaatttgatttcgatcacatcccatctattcttactgttcatctgattcttaatgtgggtctaaagctatttcattactttgatatgctaatatcagattacaagattgtcagatagctgttcaaaaggttcctagtaatttgagtcttattaaagctaaagtggaagctcataaagcctttaatcaagcattcgttgatcatttatcatttttacaacaaaagccaaactagactggagtgttggtggtgattgtaatactaaaatctttcaaacaacttgaagtttcaaagaatgtagaacaatgtttatgccgtcaataatgaacatgggtttctatgtataacattaaagatgttaataatgctgagtattatcaacatttattggggttcaaattaagtggaaaaaaagaattttggccagagtgatttgagaaggctcagttctccaacctgaacatattcaatttctttctaggccctatactaaggaagtgatcaaagatgccttgttttccattcttgatgctaaagctcctggtccggacaacttcactagagatttctttaagaaaacttaggaaattgtgggtaaagacatcattaatgttgtgctttccacttttaattatgggaagattctcaaggagatcaatgccacaactctcacacttattcccaagataatctatctgaatagtgttaatgattttagacccattgcttactgcaatgtggtctatagaactatcactaaagtttatgtgctagaatgagaaatgttctttctaacattgttaaggaaactttgttcatggaaggtatattggtcataacatcctcatttgtcaagacttgattaaatattatggtaggaacttcaattctcattcgtatgattaaaatagaacttaagaaagctaatgatacagtggattagaaatttattcatgaaatgctgggagtttacattttctcgatttgttcatcaagataataatggcgtgtgttctactcctaagttctctctactcattaatggtttctttttcattaaaagtgggcttcatcaaggtgaccccatctatcccctattatttgtcatcgacatggaatgctacatttctaggttgatgtctaaagttactaaaaaggaaggatttagttatcatatgaggtgtaggagtatacaactaaatcacttgtgcttccctgattatgtgttgctcttttctaaaggggatgtttaatctgttatgctctcactaaggacctttaaacggttctttgaaacttcaagtttgtaagccaatcctagtaaggacaataatgtattgtttaggtatgttttctttagatactcaattcattctggatagctcaggttttttttctaagttctctacggcgcaaacctatttatgcaaagcaaatttctaagtctgattgtgatgctatttttgagaaaattgtagctagatttagactttgtagtttaaggcatatttcgtatgttggaagatgcatctttattaattctgccttgttgtccatacataattattggactcaactcatgattttgccaatgtatatccttggtagaattaataatattcgtagaacctttttgtgtgtttcagactcactttatcttggacaaattgattggaaaagagtttgtcagcctagaaataatggtgaacttgactttagagacatattgaaatgtggaatatgggagcaattagtaaatatgtttgggacatttccatcaaaagagataatctttgggtttattaggtccacttaatttacattaaagagcaagatttgtggagttataatgctccacaaagttccagttggtactggaggaaaatagttatgatgaaaaacaatatcaagagcaaaatggaggttgtcaatttcaagagaatgaaatttaacatacattctatttgttcgaaagtctgaccgagtgataatcttagaaagaaataatttaatttcatatggaatagatagggcaacccaaaacaccgtttcattacttggttggcttgctggaaaaggctctaagccagagagctcttatttaattttagctttattgtcacagtcgcttgtttgttttgtgaggtagaaattgaacaaccaaacatttttttttttttttcaattatagttacaacaagcaaattcactctgaattaagtacctaggttggtatgaatcttcatcaaaataagtttgaatatagtgtgaattaggtgaaaaggtgtaagcagtccaagcttagaagagagatttataatggtttattaaataccttgatttatcatatttgggaagctcaaaataacattctttggaatgcccatgcatatattattcattttcttgtaaatagaattaaaagataagtttgtatgaggttttctcattttaaaagagagaaagctagtatagaggatattgattggttagatagtttgggtacaacatattaattgtacttagattggtctttgttgtaaagttattctgtgacaataatatattcttacttaaaaaaaaaacaagaaaaccacatgaaagtaatagaaaaataacatcaaaacaacataaaaaaataatacacaaataataaaaa

SEQ ID NO: 225266 - DNA, 6639 bp, Cannabis indica
tatgaaatacttttacagaaataacattctattagctttttaaaattatttatacattgttttcttaaccctaattatctctgacaaaaaaaaaaaaaaacatcttcttcacgatttgaaaattcgaaaattcgacttcaacctttgctgacttcgacttcgaattcaacttacttcaacttcaatttcgatgctttgactttgacttcgaagcacctcattcatcatgccttcaccttcgagttcggctacatttagtggctcgttcattgaagggtaaagatttggttgagccacttcgaccttgccatcattcttaattatcagcatttaactatgtatctttttctttgcctttatctctgataagtaacaaactgtacttacattcagtttagttagttatgtgctagagttagtttgttgttaatttttaccacatgtattatgttttaacagagttagttagttgtttcaactattttcaacatcttcttcttgtatctcttctctttatataaataaaggctcaacttaagaactggttcaaacttttgcagttctttgagattcaattcaagaaattggtcctgatagaaattgtatagataagcttctctcacatggtatcaggaagtcattgactcgcgttgatcatggatcctagacacccagaacacaccacaactattccaacaccatcaaatactctgctcgctacacaagcaccaccaaatgctccatatgctccaatgcattaatggaatctatttcaaaactctctaaactcttctctcacagttcgtcttgattgaacaaactatcttgtgtggaaatctcaagtgattcctactgtcatcgatcatggacttgatgatatcctgctcactggcattgcaccaattcagcgacttgtcatcggagaaatcaaccttgaattcaccacctagaaaaggaaagatcaattgctccctagtgggctccgtcgtcaatgacaaagagtgttcttggatctcttgttcatcacaattcatcttatgatatttggcgcgctcttgctcaacgattttccagtcagtacaaagcctgtcttcttcaaatcaaatctcacctttcaaccatttaaaagggtaatctctcaatttctgattactatgtgttaacgctaattttttgttaaccaataaatgagcataaacttaagaaatatattttcaaaaggataatagttataataataataataataaataatataaacaagaaggtttttttgtaattttgatgttaatttttcatagtccacgagtccatcttattatcgcaatttgataagtttacagagtataaataatattaatattttgtatgttctcttcgctttcagaatatggccctcccctagtctggaaattcttcccctatttgtatatgtttatgggtggcaattatttcccctaatcttatctttataattattcatgaaatatggacaatccctacgtttcatatttacaacacattaataaaagaaataactgctataatttccttttatctttatccgaaacagttgtgctaactaaattttgttgtaatgtggtattgcatcttactctatgcttcacagtatacactgtaaaggaaatgagttttacaagctttctttgaccttcttctcgcgttagccacttacaatgaagcctttatataatttttataaaaatttataataagcttctcaaactatatcttttgtgctcgttaggttaaaaagcctttacactgcctcgtctatctcatatatcatcttgtctcgcttgttcttttctctgtatttctcgagatgaactttttctattagttatttatctcactggtcttactaaataatagttgaatagttggtatttatgactcgtccttaattgattaaggagagacttaaatatgtctgcattatgtattttttgagacgagtttcaacatatttatttcttaaatattcgagctggttcatcttcctgcccttttacatgtgtcatgaccatatttgttgctcgaaaaatgggtataacaatttccccctaaaaagtactttttgagagccaaaatgactttttaataacaaagggtacggtcatatttttcgcctaatttgtactgaatgcactttattttggaagtttctcttatttcgagaaaacaacatttcaggattaaaaacactaacctttcttttctattgttctcatccatctgattatgcatcattacgatcaaatggcctcagaaattctcatataaggttgatgcttcccttcattccaccatttctgtttcattgagctcaaaaaatttgaaattctcaaccctgtctccctcacaattgcatgccctctctttctcttaccttgttttcccgaatcaggcccaccatttttttctcaacctggactctgttatatacaagacccctgtatagaaaatttccagtgaggaattcttcacgacttccattcattcaaataccccctaagtttcttattctgatcctttggttgtttctttcttatgcattgttcaatgttcttttgcattatttatttatttatattgggttatttttgtgtgggctttagcaatttaggattgacaattagggttttgtgatttatgtatcctaagtttttatgtccttgcatttttagaattttgaggcacttttcttttaaataagataatgtcttttttgaacatgagtttgaatacctagaatttatgaaacttgataatttccaatttcaagccattgatttaaaacctcagactcacaaaccccaatctattcttaaaataaatgatgaaaagattagagcacataaccttagagtgaatcaagaggaagcatcgactcgatgtaggcgatatatcaatgagacaattgagcatagacgatactatttgcgagaagcttcttggccttaattacctagtttagtaaaaatccccttggcgaggccattatttttatttcaagtcactgttgtttttccaccaggtgatcttatctttaacatcatgcctcccaaagattgtgtccaagatgcctcaaaatctaggtgttaagtttgaggttggtcatcatggggatttgtgggattttctttgacattttctctaggaagggtttcctcattcctcctggttctcaactctctaggccttccccaaggccaccttatggatgtgtttggttgagtgggaggcgtatcaccatgtaccgctcttgcaggcgtagcctcacgctccaattcagtattttttcgattcgattttgccaatctctgccgaagttatctattttccaattccaccaagggtacgtatctcgtcgaatcatatgtatcctggctacgccttgcatggatctcgtcctcagttcttttgaaacaacattcaacatttcttctcccagagtgtgggttctcagccatgttctttccctgagatccctggggttctttcccaagaccctgagttatttctctctgttgatcattttcatcttaaggagtattttccatggtggttttgaaaagacctgaatgttatttaggggagatgtgtcttctacattctttttttttttcaaaaaaaaagaaggctctcaatgaaagtaccaaattgttaacgccaatttttgttaaccaataaatgagcctaaacttaataaatatatttttaggaggataacagttataacaataataaataataaataataaataagaaggtttttttttacgtggttttaaaggtaaatcttcatagtccacaagtccatcttattatcgagatttgatgagtttacagagtacaactcatataatattttgtatattctcttcgcttttagaatttgtctctcccttagtctgggaattcttcccctatttataggtatttgggggtggcagttcttctccgtgcttttatcgttacaactgttcataaaatatggataatccccacatttcatatttacaacacatggataaaataaataacttatataaattgcttttgtctttatccaaaacagttgtgctgactaatttttgttgtgatgcgatattacatcttgctttatgcctcgcaatatacactgtaaaagaaatgagtttgacgagctttctttgaccttcttctcgtgttagccgcttacaatgaagcctttatataatttttataagaatttataataagcttttcaaattgtatcttttgtgctcattgggttaaaaagtcattacactgcctcgtctatctcatatatcatcttgtcttgcttattctttactctgtatttcctaagaactttttttgttagttatttatctcattggtcttactaaataacagttggtatttatgactcgtccttaattgattaaggagagacttaaatatgtctgcattctgtattctccaaggcaagttgttcaacatatttatttcttcaatacccgagctagttcatcttcttgcccttttacatgtgtcgtgatcatatttgttgcttgaaatatagttacaacactatgataaggtaaagatgttagctgactctctttttacttttggtcttctaatggatgtatcatgcataaacggaatggattgggccctgaatatgaccttgttgttgttcatgtgactagtcttgttgataatctgtctttcgaatctattcaatcgttattgctaactcatgaaagcaggatttaacagcattacaacgttaatgatctttcttcaatgatttctaccagtcttagtattaacacatcaagaactcgtcttgatgcctctaatcgcttctatggatacaaaatagaggctcttatggatacaacaatcaacctcctgatagattttcaagaagtagccctccctcaattcctagattactatgtcaagtttgccataaacctggtcacactgcttcagtgtgttattataggtttgataaaaactttgtcataaaaaaaacattctaagttaatcttcttggtggttgagcttcatattctcataaaatttttggaatgggaaaactagtcggaaataactcgatcatagtcatctataatttgaccattatcaataaaagtagtaatttagttttgatcattttctccatactagcataaaaatatctggaattttcataaccaattaattttctagttttctgaatataactcgcataccatcgactagcagtaatgtatttcatcttagcttctctttcagccaattggagactaaaaatgaaaggattagtagccaaattagattgagaagaaatgaaattgtctttagccgtttgataatccaagggaatgttcccaagctcttttcaggaaatatttaagtctattcaacttaccaatgatacactttaatcccttaccagagatcagactacactaattctaaagcatcaaagatttgtaaagagtaatccatccaataaatttaaaaaaatgatgccaaccttccctatttccaacttctttacaagaaaataacagtggtcttcaacatctcattgcattatcacctctgtggaaggaaacaaatcgaataaacttttatccttgaacactctatccatcttggaatagatacgaacactaggattgtatttatttgaccaaataaaattagaatcagaacactttagagcatctacttggcctaaagcgagccaattttgagcatttgagatgtcagtatacataatagccctgttgcccactctatcatcatagttgaacatgacattaaagcccccaacaatcaattagggacgtttctcagcccaagaccatccaaatgatcccaaagaatcctcctttcagaaatggtattcaaaccataaacaatagttatcaaaaaaccagaatgaagcaagaaactttaactttacaatgaacacattgagtatccttaaagaacatctcaacttggacaaactttttctttcaaagcaaaagaattcacccctaaattattacactagtatagtattcccatttaaggaaattattattcatcataccagccattttatcacctctgactttggtttttaataaggcaccaaaactaatcttatttgatctacaaagatctaaaatagacctttgtttactgacattgttcatacccctaacattgcaacacaaaatggtgcatcactccaccatgattaatagaatgaaccgcatatgtgtaacaccctaatgctaaggcacgctacagtgctttttcgattacggtgctatctttgctgatcaaagaattttctcaaaaaacgtgtcaaattaaaacttttataataaatattaaactttatagttcatatagtcatttacaaacaccgggatcccgtttctaaacttttatacaaaatgtaccaaaatacataaccaggtcgcacaacgactacaaaatactaaaccccagatgtcccgagaccgaacactccaggtcgcgtcgccacgacatgtacaacctcatctcagccaggctcactcctgttcagctttcgcctttcctttacctaca

SEQ ID NO: 225267 - DNA, 2889 bp, Cannabis indica
ttaacaaaaatcttcgttaacacaagcgttgaactcgttcgtgctcacagaggtagactctcccacagtcgacaacctgtgccacattagacccagaatgctacgcatttgggcttcagtggcatatagctctagcatgacgcacaacatgaagcatttttctttgtaatcctttcccaaatggacgcattgggtacctatgtgggaggcagtgtcgtagctataccctttcccttggatttagcaactaccccgaatggagcagcctcaatagcaacctcctctgtaggagcagcagttggattttcttcaatttccaccacttcaagatgaaactgttggttcaaatccatcactggagaaatgaagagaaaacaaaggccaagtaattagatacccaatatccaaatgaaaaaatgggcatcggggaaggcctctcgtaaaattgcttagagaggtccccgctggacccatcactccctgaagcatgtctttgccagatgtctcaaactaatggatgagaacccagggaaaaatttacaagaacgaaatctaaagttaatttccaaaaattaaggccattcagagtcctaacaactctaaataggcatgaagaatgtcaaacggcctggtagtcatttaaaagttcatcaagcctggtgaaaaccctaattctagaagcctaaaaatatgcaaatgtctacggagtttagacgaccataccttagctatccaaacagtatcagcactcccatggcataaaaatttccacataatgccatcctggaaacatagttctatgggcaacatttcaccactggaacatactaggtttccgagacctagcttaaactaagcatttctatcctagatacaaaatagtaaatattcaacaaagagttgggatacttacttagaatataagtgggtaatgaaagattgtcgtggaaatttgcccaagagtgttgaacctagtcaatcacgtgattgtagctaccatgcgtcgaagttctcgtcagtttggggatggatcagttcaaggtctaacgactctggtttggaaagcaggctgaatgaaggtttaaaaaatactgaatcaactttttgcattcactactaaggatgattgtaagtttgaagattttatagaaaatgggattctaatttggtatttaaaggcgaagaaattggaaagtctgagatggtgaaaaaaaaaggaaaaataggttttgtgaacctatttatacttcagttaaaatccttacaattgaaaatggatggtccaaatcctttctccaaaagcacgatttgatccaatggatgggaagttgaaaagatgacatttaaaacttgatcatggcatttattatttatcattgcccaccttgtgtattgtacgcatttaagaggagtcatttgaatcgatccgccatcattacaattttttttttcaagagatgcacccctacacgagcatattttcaatgaatgcattaaagatgttgtatgcgtgctacacccgtggtaactttggtttttggtcctttaattgatgacatctcaagggtacatctgtgatcccaacaatcaccatatttcgaagacttatctccaagagaagaaagaagactgcaagctcccagatctcgaagagtcctggaagcatggggggtaaatattatccatgttattgagcatgtggcacgtggcatatgaaggaagagataagctcataatctcatcaattaaaatcccccaataaaggcttagtcacagagaagattcacaaaaaccgaaaaataattcaagactaatagataagtagaagcctaccttgccttatcctagcttcccgaacaaggaagacatattatctctcgcgaatcaagagtgatctaaactcagagtctacccaactgatacccggaaggatactcgaatggcctattgaggacaccgtccactcgagagtgtcgcgaacgtctacctttggtgaaatttggatctccaacgacggttatgctttttttgacacaaaattagatcttgtccattgtgtctaggcgtggtagtgcgcatgcatcatccaccattttgctagacgtttatttcaaacctctacttttaaaagttaaacctttaagcaacatgtgccctttacttttaaaggttaaaccttttagtgacacttgtccactacgtacaatggtccccaattgtccaagttgttgtacacacgacccaattgtttccaaggggccaatagtcaagtcttttttgcatgaaattgaccctgtagagaatggtgaatagaattatgtgtgtatttcatagaatagtacatatttatatacaaagctaggagactaaatgggaaactaccaataaaaaaatagaaaactactaaatacaggttaccctaattcttttacaactaatatacagctaatactctaacactccccctcaagctggagcatagatgttaatcatgcccagcttgttacaaagataatcaacccgcaccccattcaaagcctttgtaaaaatatctcctagttgttctccggtcttcacatatcctgtggagatcagaccttgttgaattttctcacgaacaaaatgacaatcaatctcaatgtgcttagttcgctcgtggaatacgggatttgaggcaatatgaagagcaacttgattatcacaccacaattttgctggaatagaagtcttaaacccgaattcagtcaaaagctaataaatccatattacctcacacacagactgtgacatagctctatgttgctccaaaattcgcccaaactacgtgaaccagtcaagaggggacacgtggatcagataacttggaaagatttgctaagtctttttatg

SEQ ID NO: 225268 - DNA, 6909 bp, Cannabis indica
tatgttctgttctcatttcttctaagttatactatgtcagagttgtgaatactgaagcaaaagaaattttactttttgactttgttttaatgctttagtgagagggagctacggccgcttgttcctgatgattatcaagtcaagataatccctcaagaagagtaatgattttcgttttcttttgtcttgtcaagctaataatatatcaaagatcttattgttttcgtcgcaatgacaagttttcacgtttgtccagtcccattcttggtgtttggcgaggagggtcacttctagcgtctagtcctgattttgaaggaatgtgtgtaaccaaggctgagtatgaggagctcggatctgctcgatgccgtcggagattcttccattgattacttgtgaacgaagtggtactattacttgtggacagagagctactacctgaacatgccatctcggaccttctcacagataggacacaattaaagtttgagagggaatttcattatttcagtctcctgagattgaagaagttcaaaagaacaagtacaactgatgccatctcacagagaaaacattgtagaactgagaccaaatatcagggaggaaaatgtgccatgtttatggttctaccttgttatgttcatataaagatagacagaaattttagttgattaggttactttactatgataaagtacagtttagagattggcaacaaaagaaacaacggtatcatgtttggtcccaagtacatggtagttcatctggggagaatgtgcatcccatggaaagaaaagaatagattattaacaattcaattgagatggaataatgctgatattgtaaatttcaattggtccacacgttttgtgatatgtcaaaagaagccgatgggaaaaaatattattgtgattctgatcagtcaacctgtgaaactatgaataaacaaatcactctttcctacactcaaaatatatgttgataatatttcttgtgacaaaacttgatgtattagcttgtataacactgcttacagcacagcctttgacgacctacttttatcagcagctgttttgcaaacaagcagatacaatactaagattatgctttatagcacattttgcatctctttttcaatattagttgtcgaaaaaacactctttagtcttctcaaccatcccttatatgcatttctctcgtgcccatgaggcaaacagtaaagccttttagtgtagaaaaagctccttcaaatgctgttttgatttgagcaagaggttgcgaaattccattgtgaaagcacgataacacacacgagtgaccaaaccaagcccatctcctctatgctcaatctgagaacggctgtgagtccatgcatagatgcactaattttctttgatattgtccataatattcacaaactgcaataacatcttcattctctgggtccaaaccaggcaacttaagcagtttctcattggtagaagaactagttccatcatccaagtccaaactggagatgatttctgagtgaatttcacggcaagcaaggacaaacatggcagctgtgtctggttgttgtgcttcacgaagagctgccaatgcctctggcagtgctccagccgcaacatacaaaatcagagccctgcatgggaccatgatcggctcagaacatgttgaaagaagaatctagcgtgaaaacaaaattgtaaaatagtgatacctccacaagttgtgttctacatgaaggacatggtcagcccatctttgcaataccctacaagtacataacgggtaaagatgaaacaaatgttcatgataatcgaggtggtataatataaatactaaaagcgtaatggaaggaaattgttttgaatttgaccaaaacaacaaaataccttgcataatcagatccccttagatgagtagcagctaaagtcgcagcatcagtccagcaaccagcatcttgaagctgcacatgagatgatgttataactagtcgcacaaaatcagtgttcacagttccaggaagagaagcactcaaacaattatttaaccatcaatttaagtttttaaagccagcatccagatctatatgaagtagccaaatactaagaaaggaattccagatcagaaatggcacgccctaattacagaaacttcatatcatctaacaaccattaaagcattatagaacagcatatacaacgaaaatcttacaaaagattttatttgggcgacaaactgagtatataatagatcgcaaaagatacatgaagaataaaaatagatataaaaatatgcacctattgatactagtcatgtagcaaatgatatctatggactacatgtgtcctccagaaaatgcagtaagataaatagcgcagtgtcaaagtttatacaacgtgaagatatatattataatattttattcatattttttttccttcataaatgatactgtttgcctctttttttagaatatgtcatactttttaagaaaatgtcttactcgatgtatattatataattttcaaaaataatttacatatgggaaaaaaaatgtatttaatgcaaaatatatatatatatgttggcaattgccacatcattaatttttaaccatcaatgggttaaaataatttaatatataaatatatatatgaacataacagagctgacctgagaacaagcttcttgataccttccaacagcacagagaagatgagtgccagacagtgacctgtcagtctggaccatgttggctgcaacaacctaaattggagaccataaggattctatacaaatttgaatagatacaaacacaagcaactcacctttactgcaagttcaagaagagagcctgacacagcagaagaaagagcaactgcacggagagcgttcacataaaagtatttgctctcaggattagttgaaagcaataagctaactgcagattctaaattcccaacggacacaagcctagagcattaagccatacaacataaataatattaaagaaatatcagaaaatgcagtatctagcaagctcaccaaaacaaccacttaagattaaatgaaaaaaaccgatagcatcaacaagcaattaatcaacaacaaataaaaaaagaaactcgatccacttactcgtgtacgcgattttgaacagcctcttcttgttcaaatttcaaaagccatcaagctgaggctagcttgactctgccaatgacgaaatcataagtgtagacaatgtaacctcattcaaatggaggaaaaattacccagaataacaagcctaaaagcatttgacattactaataattatgagatttaccaatggatccttcttttttgtcccggcatggattttcctttcgatgatatcctactcacaatagatgtatcatcaagctcatgattggacattgatgctggagccttttggggaggtgatttactaacttcctcgtcaaatggttgagagcacgcgacagctacttcagaggattcaccaaaaacagcagcagcaaatgcaaatctcataacacaacctctattgaccattttagcgtataattttgccctctcgtcatcaagaatgcagccttgaaaaggaaaaattcataacgggcaatagacaaaaatggatcaaacactcaatctgagcagaaaattttgcatgaaacaccataaacaagaaagtactgaccttctttccgataagattctaatattttaagtagcaactctggcacgacagggtcaccaataggtggtaaatcaatcaagtacttccatttgggtatatgatagcccacacatgacgaacatcttcatatgccgggtatatgatagcgagaggaaatttattcttcttcttctctttctctcatcaacagtccaaaatcgaaattaaatccaatacatcgaacagaactccaattcaattcaattcactactattagcccctttcgattcaaaagaagcttcgatttcttcgtcgtcgtcttcttcacctctgcttattaggaaaggagaagaagtgaggggaacctgagtggagactgtcaattcgatttgcaaaatctgctatttttggtcaattatcttttccattttagttctattaatgtgcattgcacgaagtgagaatttgaatacttacttcatgcacgaagagtaataaaagtcgagacaaagattttgcgagagaactaaaaacattcaagccaactgaaagtcgcaccgagagggttgctgatgttcaaaaacctccgactgttgagtcacaccacgaggggtgctgcatgattgggctcgccttctcgctcgaactggatcgaaagccgatctaaatgggtgtcacgagtaatagggttccattggggaaagtgagacgcaagggagagaggggaaagtgaaaggaagctttggttcgtcgagctgttggttttccgagacttcttcatcacaaagctcaccttagagtcgttcagattgggattgggagagtgaaatggaagaattgattagtttttttaattttttttaacatttttttaataagatttaataggttaacaacattagaagagataccggtttaaaaaaaaaaaaaacggaattgtcgttataaaaaggtatgtattaaaaattggtttggaaagttatttcaacttatgagagtgagtagtctttatggttgaagccccaaagaaacaattaacatatgacgagaagttaaaatcaaattaatccatcttaaagtttacttagcaaatacaaacaatgaagaagagtataaaatatgatctttcatccttaggaaaaaaaaaattatatataagttaaatgagagtgtaacatcattatgcatttattttgtagatctatatggacaaagaatagcaattttcaaaggtcaccaatagttcattttgagacgatgaagaggaaaggcaaataagtcaatcatccaaaattccatccatgccctccaaactttccactagcgttacaaatctctttctcgtcgtccagaccatctgtcgtgtggtcttatttctcttcaggaaaaactggaaaaatgtcggaaaataaattgactcctaaaggagtcacaaaatacaatctgattacatatgcaatacctttcaaagatgatcacatattgcccttgtgaagtcagtagttgatgactttccacctaaatcggcagttcggaattttccctcagcaattgtgttgagaatggcatcttgaattcgatctgctttatcatggagttccaaatgacggagcatagagacagaacttaacagcaaagcagttgggttcgctagattctggataatttccatgtggaagaatgtttagaagcaagtaaaaaccaaatgggtgctacaacaaaatatcattatagaacatcgatggcacagtaacaatgaatcatatgtctagtaacacacgtctcgcttgaaccttcttcacccatttgagaagaataaggatttttcggtaaaaaacacatcactctctacaacttattcatgttttggctaatgcacttaaatcaaagaatagctgaaaataggtccaataaaagattaccacagtttccaaagttttcagctcatgttctaggaaaacaactgtgataaaattttcagaatcagaatgagcctaatggttgttgaatctatgtctacgagtttcagaaaataaagcatatgttactagcattcttaataatgagtacaagtgaaactgagttaacaagaaatatatgcaaatgcatttagtgcagctacgtgtaaggataaattcaagtagattaacctttccagcaatatcaggtgctgaaccatgcacagcttcagctagggcaatacctccctcaccaatattgcagctgctcaaaaacgaattatgtcagataattaaatcagtagtgtcaaagatgatgaaaagtaggtagttagttacctgggagttaagcccagtccgccaatcaaacccgcacagaggtcactaataatatcaccataaagatttggcatcaccaacacatcaaagagagcaggattcttcacaagctgcagaagaagacaaagttatgtatctttccaattaagttccgtgacaagccttaaacgctttcacaggttgatgatttcaatgcacaccgtacatattgttcgtaccatcatgcagcaattgtcaatgacaacttcctcatatcgaatctctggatacttctctgccacttcacggcaacactacaagtgaaaataaaccaatttcagatttctgtacaagaatatatggagcaacagacaataaatcgaccccttgataaaaagagaaaaagagaaagcaaaccttgagaaaaagaccatcagttttctgcataatatttgctttgtgaattgcagataccctctctctcccatgcgccttagcataatgaaaagcatactcagctaccctaagactcgcctgacgcgtaatgatcttaagactttcaacaacccctctcacaaccttgaaacagcataaacaaattactcagtttgatacaaacgtattcattatagtaaatcacaagcaaagcaaaaattctatgaagaataacttaaagagtatttgtaagtcaaagtgtatttaaaaagtgtgtttagatgctaactggtaattgcatttaaaatatatcatcctcatgttcggcaaaacagaaagtacaatattgaaaattaatagtatctagtcataattacacaacgtatttgataagcctcctatacattttggatataataggaaacataaactaggataaagggcttttatttttatctagttggcttttattttaaagggttgttgtcttatttttagtacttcctagctaacac

SEQ ID NO: 225269 - DNA, 2469 bp, Cannabis indica
agatttttcagttcaatcctagataatttagtaaaatctttgtgtatccaattcaaggttagctctcaagttcatctcgttatgatttcttcagtttcaagttaggtttttgcaagattttctatcgtttagttgctgtgtgattgattgtgtttggattatgtttttctgaagttgtttaaggttattagagctggtttgggtctgatttgaggcttgtcgtagagtttgagaaaagtttaaactttaaactcaaacttttctctcacatggtgaattttgtttcagtggatgttaataggttttgttgcatgaattctacttgttgtggactatttaggaggcatgtaaggtttggttaaatttggggttgttttgaaatatttaggaggatttttggtccacaggaaaccccacagaactggccttccggttctagaaccaatttacaggttggggcattttaggacaccctagattttccatttttatgatatttaggtattgccatgttatccatcgattgagaaacttttagttttgatttgaatccccagtgatttagcatgtcactcatctgttttacaaatattatgatttaggggcctgtaaactgtcgagcagcagttccacttaggattaccggcacacctgaattcggaaacgatgtaagattagtataatgatatgcatatgtgtttacatgtttagcgtacatgttcgttaagcctaatagattacatcaatagaggtatcaattcatgtaaagttgtattggatactgatatatgtatgttaggctcagatactaatcgacgctatcacattggtacggctagagtatgactagagtaccgtgtataggttgatagtattgtcgtacgaacatttgaggcttagtaccgcctagggtgcagggattagggttacactttggtgtatgggcgcctaattgtaattgaggttatttttaagaatatgattatgcttttcttactgaatttttcgactcacaaatattgtttgcatatgtaggtaaaggccaaactaaggctgagcagccatgagagcgagaggatgaagattgtacatgttggggcggttagacctggagagtacgatctttaggacaactagattttgtatagtcgttaggcgacaactcttgtattaagtattttgaatcagttgtaaatattttaaactcaagatccctgatatataaaagtttgtttattttaataatattgagtaatctaataaaagttttgatgaatcacgatttttaataaacctgttgattagcaatggactgcagaattaatttaaaatcacgataacatacataaactagtagggtgttacacctttcatggccatctctgatcctgatggatcgctcaacaggtatacttggctacgtggaggagccttcctcttcttcttcttcttgctcgaagccttctatccgggcacagcttcttctgctacctcctcagcctttggtacaaaattagtcgaaaaaagattatacttggcaaagttggcaactgtggctaggagagagatgttccgttcatcaaaagagagttgtagaatttttttgagccctcttcctgagccctcttcctgagttccaaggtgaacaaagggcgatagtaggacgaaatctgctagaaactagtataattagtgtccacccccttgaaaaagtaatactcatttacgaaacctcctatctttgtcacctcggtgttcgtggtgctcattaaccatgactcttcgatctatgaaacgtaaaagtgccctgaattattctgcttaggacttgactttagatcgaacaaccagttggtgtcatggggggacgactcaccctatccttgtgaggcatagaatacgaatagggcagacagatactgaggtcgttggaagtaaactaggttctggctgatgttgtaataattggctatcctcttgaagtattggagcaaaggtagcattgcagcctgtttggtgtgagctcccgaccaagcacaataaccctctctagggtcggtagccagtttttcgggggagggaaggaagcattcaacattgcccaagagaccacgcttaaacaaattggtcattttcttcatggttaccatggatggtggagaaattcatcaatctcttggtggacctctccttctcaaaggatgctcctcggtatactctttaacaatgtaatcctggccagcctccaagacatcacctgcttcagacactggctctccttcatcattgtaggcaccgaatagaagcatccaagctagcccttcttcctcatcgccttcggcatcggaagaaatagcatgatggatctcgccctggtcctccacttcttggacttcaatgtccccaacagtatattcctcatcagtggcaggatgagtctgttttgccctagctagagtggcaaggcaa

SEQ ID NO: 225270 - DNA, 3120 bp, Cannabis indica
gtaacacactgcttgaatgtaattttcagcgtgttaaatttttccaaatttatttaaattttgcaggatgtcttaaataagtataatttacatgagcatgaaaaaaaattgactaaaaaattatttcggatactaaaacaaatagagatgtatcggtgtatcccttttaagagagtgcattaaagaattttctttaattatatatttttttaaaattttaatttaaaaaaaaaaaagccaagaaaccacaacgtggcaaaaaaaaaaacttgataactaataaataaataaattaagaaaaaaatatattagatataaattaatacatatgaaattaataaaaattaaaaaaaaaaaagagaattaaagagaaaaaaaagactttagaacatttttaaaccgccgtatcatcgccttatagttgtcctttaaatagataaatagatactatttccaattgagattaaaacaatatattttacatttaatcgtactaaatcaaatttccctttgaatattataattatcaaataaaataaaaataaaataaaataaaatgatgcgctggtggttataagaagatatcctcgactactaattctaaataaatccagttggattggagtcctttccattttttttttctttgtttattggtctgcttcttcaagtttacctgccatggcaaacccttacagatcaaagtactttctcttctcttttctactattgttattcaacaatctctctcaacaaaccatttcacttatccttaattttcttcttcctgtgcagacaaggccttagcgcgaggccggtaggtactgccgacgaaattcagctaaggattgatcccttgcacggagacctagatgaacaaatcactggtctccattcccaagttagacgtcttaaaactgtatggtttcgatcccttcccttttttaattttatgtgaacaatttttcttgtttgggaaaattggctgtgaaaatcccagccatgggtttttctcgaattttaataattgatgctgaatgctgatatgtaaaaggggaagacgacaagttaatatggtcataattttcatttgttctttgtgtttgtgatgatttaggtgaaaacagtacaaatatagattgcaattactaagacataggtagacataaaaacaaaagtctgctttgttcaatgtacgcatcattgttttcaatctactatctagtatacaataacttttttgcattcaaattattagaagatcgcatgtaactttctttttactcgaaggcaaattctttctgtaagaaatttgtcatagaaattagtatttcataaaaagctgtcgtaactcgtaatcaaatgggggaaacatggatacattcacatagagttttgtttctcaagtcttgaccctgtaaaaagtcttatgtctttttctcctcttataataatgtaatgagctgtttaataaattcatccagtgggaaatttggctattgcaccacactatttggagtgatgcaatgcaaaatgaggcttcatttacatacgcctgatctctatttcttttaccggggagacaattattagaggctaagggaacagaattctgttatggtggtgtcatagagagaataccagcttcaaccaatggaaatataactcgcttagtacttacaattaaacttctaattatcatatttccgtataggtgaaattgtgtaaattcccaatgctttattgctgctacaagagaacatagtaattaggtctgtactagatttcgttttcctaatatgtatatatatatatgtgtgtgtgtgtgtatctataagaaatcctcctgactttctatacgcactcaaatttgaaaacatgttcttttatcaccttttaactaaattattgctcctttcctgtattgaaattgaataacccgcagaagcttctagggaagctaacaactgaagctagttacagttgttatatgtttgtagtgtaatccaataataacctgataatctcctcgtgttgcacccctaaattttaaaataacaacctgataatctaggtgaatgttgttatatgtaacttattgtaaagaagcaatttaagttccatgaagtttactctatcattaagctaagattcatttgaaaagttttttccttttttggcaccctttctcgtatgtttgatttccattatacttacctcaagaaattttgctagtaactttcactgccccagaaagaaattttgatccacctgttcacttgacagttgacaattgttctgcattcattggaacattccctacctgattttagccacttttgaatcaattgatattattaggtgctttctacatacttgaaatccttcattgtctatcttatgatcaaacttctgaaatatatgaatcacattatttagggagcatttgcctaagcttgaacttatctttcccacttgaatttactatctatttgagttctatttttagtttcgtggctggactagaagtttgactgagctatattctccagactagtagagcactgacttctatttcactccttgaagtccttattattgagacgaaacctctaattcattcatatctgccctatcactaaaaaaaaaacaacatatgcgctgatgttgtttgttctttttttttttgtgtgtgtgtgtgtgtaagggatgtagtttgtctttaatttatagagaattgggggtatatccttgtgattgtgaagaacaaaagtaaaaattgggggtatatccttgtgattgtgaaaaacaaaagtaaaaattgggggtatatccttgtgattgtgaaaaacagaagtaaaaattggggaggatctgattccctttttaacactatactgattgtcttaatccccatttcttaattaatccaacaattttgaaggcatggctttttttgtgcttaacatgcagcaaaatatatgtctgccattatgattttagtagaaatagtttttctgatattcatagaaatagtaaactggtcattcagtaatcacctttaaaactagagcagtgctgttttgtggttctattaagctaaatggtttcataaggcat

SEQ ID NO: 225271 - DNA, 1662 bp, Cannabis indica
tttatttattttcttaaataaaaaattataaatattaatttttttaatatataattattttaaatctaaaagtaaaaattttacttgttaataatttattatagcaagttatgaaaaaaatgtaactataatcattatatttttaatttttaataaaactattaaatattcactcatatatttattctgtatagtagtgtgcgcacaaattcagaccacaaatttaaatatgagatgtttatagaaagactgttaaatttgcatgtgccttccacctaattttgtaattaattaatattacatatctgaaaattatcgaaaattaaatcacttgatatatgtaattaatcatctttaactattattagtaaaacagtggtactgctcatctctgccactttaattatatactcgatttgaataataataatattaaaatgctccttatttctttatatttttctttttggaatatacatttaagaagcatcttctatatgtgctgctcttaaaccatggcacatgttcattgcttttcatctctctttttttttcgagcttagctcccattacacacagtaatatagtttggaatctattattaatttgaaagagctactatatactttgactaagagtctaagattaactaatttaaatatatatgtatttttatatgaaaagctatagaataattaaatgtcaacttttgacaatatggaccatattagcttcatgctaaaaatttataaaattcatgttccccattatatgattgcttatgggaaaagcatactatactaccaatatatgtgaatttaaatagaaaattaaggattaatttaactattcaataatatgattgaagctataaaacgaagtacaatcattgactaagggaggagttggaaaattattaaagaaatattaataaatagatagagtagttattattttctttttacatgtgagaatgtatataaaaatatatatgattttattttggaagggagggctacagtccccaagtttataaatagctccaatccaattattttatattggtaaatggaacttattaaaaccatttctgaaggttgtcctatttttgtgtacatctttaaataatttagtgttgaatctattaattttggtaaaacaacttcaataattcatactaaatgttgatggtaagaattcgtcaactaatcttgtagctggaaattgttaagtaacttagaaatgagaagatgatgacgattaagatgatttaagtgaagatgaaaatgaagatggagtgatttttggaggtttttctctttattgcttttaaagtctgggttatattaaataattttccaatcccttctcacatctgagaaaggagtatttatagactctaatggtctaaagtacaaagtggtcccaaggggacaaagtctcgctttcatgctgcatgccgcagttgcaggaggtggccttacacctcgtacccttgtctgatgtatggtgtcaggtggtctgtggttgcaagagtgcgctccccagttgtaggagtgtggtccccgattgcaggttgcatgagggtgattgcagcgtatccttggtcaggtcctcagaccttgcaggtctattgtcactgctactcgtacctccttgctt

SEQ ID NO: 225272 - DNA, 2587 bp, Cannabis indica
aaaaaaaaactttctgcatagatttttgctcactaatagcgcaatgtaacgttgtaagatacgaacactagatcaaacattcagaaacaattgttcaagaaaaaaaaacatttagaaacatcgacgacagtcagagaacggcgaaccattgccaaatacaattcaaaacttaaacattccaagttttcaaatctccccgaatgaataattgattaattagcagacaaataaagttcacagatttataaatatatataattttgttttttttagaaaccatatagaagtacaaaagagaatgtagtaggagttgcatcagtccagcaaaagataaatggttgaagatgcattcagcggccctttgcataaaaattgtgttatcatagtaactatgtcgcttgagcattgtgccaccccttcgtgcatggaggaatggtgatgaactcatcgaattccttgacatgaatgtcacagcacttccactgtacaaaaattacaagatgttattactattatacatgtatataaaatgttagactaagtattttcttttctttttttttttttctttttgtttatgcatatagattatatacgcacccctctcactcggtcgtggaaaatagcaggccctggatggtaactgcatgcagtttcatgattatctttctctttgaaagtttgaccacatcctttgtttttgcagatttggggttcgtttatatcaataaccttctttgcaggagcaggaatagtctgagcatctgtattgatttttgccacggaatctgtgcctgtattttcaggttttggtttaacgtatttagcctgtgaacctgaaaaaaagaatgcaaaggacattgtgttaatgaaagttaagaggaagataaataaataaaaagcaacagaattgggaaagccatgatgaggaagtgagattcaaaattaaagaagttctttaggtagcggaagagcgaggagacctagagataactggaaagtcaattggactcaaaaagaataggctcattaaatcgaacatacagcttgaatgaatctttagatttgattcatgtgaaacatcaaacaaaccagaatgacactagaacaaattttgaaacattgaaacttagacaatgtctacttttcattccagatccaattcatactcaacattcaagtacaacattcagtagtaagaaagtatgaacagtgttcaaatactcaaagaacaaatcatataaacgagattaccatgatctgagcagaaaaacccttgccggcatctagagcaggattctttggctgatgcattgattgctggtgacgaagtagaaggtgaaatagaaatatttggtttacgcactggctttgttagcacaggtttctcagttgtgtgtttacctgttttacatcttcatcaacaaattatacagctttaggaaaacagacagtgaaatctatacaagtaaactatataagagtacttctcactcccacacacaaagaaagtaaaatgtacacaatgaaacccaaaaaagactttcctgaattaggtttctattttaaaaacgctagcttttaagcagttcataaactagattcgtaataaaactattcttaccttcatccacagtcaaaatccaatgcagggaggtcataaaaaaaatctaaaagtaactgagaataaagttgggtcttaaataaagggaacaattctgtttaaaccagtacagataggcaaacctcaattctttgtagtgcaaatgaaaatctattgttatactcctttcttcttttcatttcatgtgattacagcagtacataattatatgaaaaattgttgggtagtcattgtttttaatcactatgtataaagtttttttcccaatgatttagaaggctgaaataaagatcttaccaacttattgcacgtgtgctgtacaacatactaatttgaatcatgatattagcatcataaactatttacaaaatttgtaggacttcctgtcagtacatttatatgtagacaagtagaaaaaaagataaacaaaattgcattttatttaaatactaagaatatagtgattaaaagcaatcccttactatagtggtagtatataaatatgtatatacatataatcatttcacagtactgcagcatttatataacaattacaacccagcccatgataactaacccaattacagttacaaacttatgtttatcttcccgttgataaaaaagaaaacattaatgcttacccaggaatttctaaaaataaagaaaaatcatgacttctcttcttgcagcaactccactctttcattccgtcatgaaataaaggctggaaattaataaaacaaataagcaaaagaaattagtgattaaaaaaaaaaccagaaatataattcgaaaagatgtaaacatcggcgtaagacttactccctaaataaattgttgatgcccaggccaagcaagtgtgtagaaatcccatcatgcaaaaggccataataacatatgataactttaattaaaaaaaaaaaaaaaacaaaaaaagaaagaagaagaagaagaagaagcaat

SEQ ID NO: 225273 - DNA, 3074 bp, Cannabis indica
taaaagaaaaattcagaatccctaatttcctatcgactttcaaagaatcaaaatcctaaaaaaaaaccccaagaactcgttatcacgacgagtcgaccgtcgacgctgcggcgaccaatccttgatcggacctcgtctccggctctgcgaagtttcttcagctaaataatcagtatccaccattagcagctattacaagcttcatcgagtgaagcgtacaagacacaccttctttctaaactcgtgtatccctcacttgagtccaatccaatatctcttctcattcggtgtaggtatttttctttcaatatccctttcattttcatcagcccaaattattttctatttttttttttgtttaaaagcttagttttctcatctgagattgagactaggaaacgacattgaaaaataaatttgagttttgagcatagcatgaaacgagtgtcattactcaggctttgtaaaagaacctgtttggttgccgagaatgttatataaatcttgattatagccctctgtcactcccatacagtcacaaccggagcttccattaccgttgagccatttccgtcgaacccttcaaaggttgaggcctgtcttttttttctagggagatagcctcacgaaacttgggaatttcgacctcgaattggtactcttcatggccctagctcgtaatttggttcattaccattaagtattcaaatctttactttcctttcacttaatgttacccgtttttttttcttttgctgagtacttaattttactattcgattttcataaatagagtttatagtcatgattatttcaaggctattaaagttatggttattgatatttacggttgaaccttgggctttttttccttgactaggattatcgaatgggatttcttagataattattgtgattttcatgtacttgtaggcttgttaagctttttaatcgttcttcagccaaaaaatggaaaaacctttctaatcgtttgtttagtccttattatgtgatgtttgaaacaattctgggtagtttttgggcttgaatttcgtcatgtataatgggatgtctgtgttaattttgtttatagtaaattagtggccattctactttgtgttcggctcacaattgaaatggtgaaaaaaccgacccttttgctccttttttatttctcccttcagataaaaagtaaatggcagagttgagcttgggtatacttattgatattgttgacgaagcatggatgggagacactcttcctgatgatggtatatatgcttcttttgtttcgtaatgaattaattcatttttgctcttcccgttgcattataaaatttgtgttttgttgttgcagatcttccattaccaccagtattggttgtccgaactgatgacactgaggattcaagtatgaatttttattcagtaatgcttgtttagtttcataccatactaagaactgtgtccttaatttactagcacgggtgacctgtagttctttttatgtcaagattatttaaacatgtgatggtttgacaatatgataaatttaagtagaaaattttctgctcccttttgtttgttgactgaggaaggtgaaaagttgagagtagaacatgttttgatcatttataatattatttttcgtggctgattttgttatgccttttatttgtcaattcagctttgtgtttctttatgtaattttagatgggttgttgctgtagtcttactcctgctaatatctctatttgattaatggaaaaaaaagaagaaaagagtgaagaataaaatgctctcgttcttatttctttttggttttttctatcttacagatcaggaagctcgacaagtttctggggatacttggcatgactttgcattgggcaatcagtgaacttttttttggggtcgatctggtagtaagttgcaaatatttggtgcttctttcaatgcaattgaacctgtatttgtctgttctttgaatatgagtacccctcaaatatgatcatttggaagaatatattgctatatttcaaacaggtctgtttttatgactatattttggaggatatttcttgatgaaagaaaccttgttctgtgttgtcttttctaagtggtttactataggctcgatcaatagctgcatgggaaaaaatgcaatatattaagaactctaaagctaaaatgactttagacgaagatgtgtaataggggtatttgttaaaatctagctactgattagcacttaagattagtccttaatcaggaatgaaaagtttatacttcgtttggtacatcctattgtattgtatagtattatattaaattgtattttatgctatatttttatataagactatgtatggtaggagtattcttaaaatattcaatccaatcaaattcgcttaatgcggatattcgtacttgtgcggattggattgaaaaatttaaaatctacacttgtgcaaattaaatgttgattaagatgtaaaagtaacctatctaatttaatttatacatatttatatatacttcaaagaaattacatttacaattaatatttcaatgtaagaaatagttatttaaaaatataatacaaatcatgatataaatatattttaaaactatgtatattttatttttatttataaaaaaattataaatattaataaaataacaataatttattattatttttttgagatgataatttattatattttgttgttagttttgtgaagaaaaaaaaatatattttttagtaaaatattaaatgatgcaattttgaaaagtaacaaattcaaaataaacgatataacgtgtacttttatgtagattggatttgatctaaaatatgaaatttatatttaatgcgaattggatgtattacaagcaaagtaatatgtgaatttgaattattatgattgttttaatacaaaattggtttggagaacacttagtgtaggtaatttttaaaataggaccaattttcagaaactcccaaaatagtcttgtcaaaaattccaatccctttctctctcttccactcaaactctctctcgatccct

SEQ ID NO: 225274 - DNA, 3860 bp, Cannabis indica
tttttgatgttttaaatttcgacgtggaattttattgaagaatgatgaattttgaggtgtggaggttgcgacttggacggaatgtaatgaaatagaaaatcatcgattgaaatcttgaactatgtaatgttttggtttcggacatgatttgtggagctgtaattgttgtattacttatttttaagtgtaatctatagagttgaattgcgttgtgctaattagggggaaatgagaaacaagaaagtcactatgattgttcttggatgttttaaatttagctgtgaaactttgaggtatggagtttgcgagttggaaggagtgtcatgaaatggaatattaaattgattgaagtcttgaactatctaatctaatgtataggattcggatttgatttatggagctgtaatttttattttgattacttgttttcgaatgtaatcaatagagttgaattgcgttgtgcgaattaggtgggaatgtgaaacaatagagtcaataatattcaattttgttgtgaattgattgaattgaatcaatgtgaatgagtaaagaatgttagacccagctgtagaatgtgtggtagttatagtgcttattgggagttatctattggaacagtgcaattctgggcttctatggcaaagtgttctgaagctgtggtgattttgtttagcaataagcaataatagttcaaaaagatttttatggcgaggaatttacaacatttccgctggttattagatttacgccagatatggacctaagcatgattgtgatagtgaattactattattatattctttaaaactttaaataatttgatggaagattggtaagttaatccatgtagggtatgaaatgatagcgatttaattattattttttttgactaaagatagcaatttaatttgattgttaataagttaatataatttttttttgctaattatttgttaatgcagcaagagaagtcgaaaatttggtaataattggctcaggtcctgctggatacactgctgcgatatatgctgcacgtgctaatttgaagcctgtagtttttgagggatatcaagtaggtggtgttcctgggggacaattaatgactaccactgaagtggagaactttcctggttttcctgatggaataactggtccagatctaatggacaggtatgatataatagtactacagagtcaaactacagtcttcattttttgctttaatgcatatgaaagtatgaagcagaaacttggattagaaaactaattaaaatcttggcattgtgaataatctaggatgcgacggcaagctgaacgctggggtgcagaattgtttcaagaagatgttgaattgattgatgtgaaaaatagtccttttacaatccaaagtagtgagcgtaaggtatgttgtccttcccaaaagagatcttactatcttcccagatgatcacctatacctatgctctttaattgtgttcagttataaataatttctcaatctttgtccctactcataggtttgtttgaaaaaaaatctaatttttgttgcttgtacttttaaagatttattttttgcatttatatgtcaggttaagtgccatagtataatatacgccacaggagcgactgcaagaaggctaggcttacctcgtgaagatgaattttggagtaggggaatcagtgcatgcgcaatttgtgatggggcatcaccattgtttaaaggccaagtacttgctgtggttggagggggtgatacagctacagaggaagccttatacttaaccaagtatgctcgtcatgttcatttacttgtacgtaaggatcagctaagggcttctaaagcaatgcaagacaggtgagctattgatgagctgtttaatattgatgtctggaagtttttatagcatatctgtagtacttgtaagattggtaaacatatatcattaatttagatgcatgtcaatttttgatttcccagcaattccacttataaagtatatttaaagcttttcattcatccaacagggtataccttaaactcctaaacaagtctacttggaataaagacgattgaactttggattatattcatgcatatgatgcattaattagcaatatattgacttttttctgcttaacttaccattcttctgatagcgattcaatttatttttatctcatttattggatatggaaatttcaactttttccaaactagtacaaggtttacaactcctgattgaaacgtatagaaaatgtgtgaaccatctttataatgccaatgttttgaagttggctccaccagatcttgcaggtcctataattgggtattcttattctattttgattgcggtttagggtatttgcaattttttaggctgtgactgaagtttgttttgtggtggttcttttctgtttaacattattgattggctttcataatggtgtaaattatgtactaatgaaaattttgcatttgagttttcaactacctgaatgtttttttaacaggttaattatcacgaatgtttcagagtgttcaacaatccaaatatcactgtgcacttcaatacagagactgtggatgttgttagcaacatgaaggaccagatgtctggcgttttaattcgtaaaagtgatactggggaagaatcagtgctcgaggcaaagggattattttacggtataggtcattcaccaaatagccagctcttggaaggccaagttgatctggacaaatctggctatgttatagttgaggagggctctgctaaaacttccgttgacggtgtatttgcagctggtgatgtacaggtaatcgtatctaaaagtaattttactaaacatgttcaacagagattgttacctttggtggatacccacgtaataattttcttcatatacctatataggatcacgaatggaggcaagctgtaactgctgctggctctggatgcatcgctgctttatccgttgagagatatcttgttggcgaaggactcctaattgaatttcatcaggtagttaatctattatacaaaaccctcctgggcacaccgtttactcgtataaactatttcaatagagtttttcacttacattaatgtttctttttacagccacacactgaagaggtcaagaaggagctcacaccaagagatgttaaagagggctttgacattactcttacaaagcataggggacaggtttgtattctttgacaaagacgccacgtggatataaactttcagttatattcagtatttgttacatcttggtccaaaactcaattatctcattcttttttcctttttcttttttgattttttgttttaattttttctttttcagtatgctctacgtaaattgtaccatgaaagtccaagactcatattggtactatacacatcaccaacttgtggtccatgtaggactttgaagccaattctcagtaaggtatgtgatttaaaacaatttataggtcgtagtacttaaaatactcaaaaaaattaaaaaaaaaaaagattcattactgaaccaaattgcatatgcaaaattgaattacctttaaattgcttagggactggcttttattatatccattgccaattcgccattgttgcggtgacagttgaaaaaagatgaaccttttggtaaatttttacactgcaggtaatagatgattacgatcagaatgtacattttgttgaaattgatattgaggaagatcaagaaatagctgaagcagctggaatcatgggtacaccttgtgttcagttcttcaaaaacaaagagatgctcaggttagactatatacagtagaacttctatttaagaatactctattcaagaataacctc

SEQ ID NO: 225275 - DNA, 3108 bp, Cannabis indica
ttagaaagttcatatttagggtgctaataaacatacttgtgagtagatctaagatcctggtaaaataatttccaacagaagtatccattcctattctgggctagaatggattttagctctagtaataatttacctcgaaaggtgaaggttgcgaccaacctatcctagcatacaatacgaaaaagtgatgacaagtacttgatactctttggtgtaatctgagttggacacagcttgaagaagttggctatgtctctaaaaatacgggtacagaggaagcactgcaccttgcttcacatggggaccagaccacactatccaatttggctgcgaatggtgagccaagtagtctcgggcaggcctaatgcatcagacctagccaacaagtccactattgatgatgtcgtcaagcttggcatttgatagtgtagaacaatgagatactcatttatctccttcccgcatttgaagaatccatggctcaacagcctcatcctcaatatggttaatctcaatcttcgagggttgacccctgctattcagaggcactctagcgtccccgtaagagctagagggttgccctggatcacatcacactctttagggcacctccgagcagccctaggctctgcttcaggctaagcatgatcaacttctagcacttcttcctcttgatcggccataggctccttagcccggctagcctcaagtttttcagcttcctcaacttgatgaactctcccccttgccataagttcggtaacgtggggatcagtcagaggtgccttgcgataagtttgcttcgccctctccaggttttaatgttgcttagcgtactggacaatagtcacagcaaccgctgctgtaggaagatctctaggcgcaaaagatgtccgtccaacaaacaatgtgtcaggcacaccctgtcggacaatgtacgtccaagacttaagcatgaactatctccacccttgatttcgttcctagatgaatctcccatagatctcaccacctattcttagaataatggtgatggtgaacttcaagtttcagagaaccactgctcgactcaaagtcactcaaagagctacccgacgagctctaaaaggaagaactagttgagtgatagtattcatacaaaagaaagagtaagtccccgtcgatcctgttgtcacctcccaaaaactcatgcgggttcatctatgtagaaagacaaagggaggtgaacaactggagatcacaaataagacaaggatgtaaacatgggataatagaccaatacttgtgagtaataacaaactagcccatgaaatgtcaagccatgaaccgaccaacttctggaaagttcaccaagaaccagccaggacagatccagcccttaaagggccagatagagttcctggaaatgaactaagtatcggccaagggtcttaagatgagaccaagaaccgaccaaggtctctaacaaacccgaagcaccggccaggttcctaaatgaatcaaaaattgtattttctaaaaatcaaagctctgttcttcgtgttcttcgaacctcaaagatcaaagtgtcaaaataaagctcaagattcgatatttttcatcaaggagttatacattatgcatccgaaagctattgaatggattataatgcataaaaactatcctaatacatgagattcaagaagttcataaaagtctaaactcaacaatggaagaagcctaaagaatgaaaaagagagagaaagcttcaaacttacccactaaaaagatgcaaggaggctcgatctagtccgcatgacaagtgtgggtgttagaaactcaaaaatccacgaagaactcaagctcacaagatttaggctctaagtagtctttgagagaaattttgttattcaaaagtgaaaagtaaagaatgaaaagaagaatgaggcttatatatagtttttggaaattttcctccaaaaaagttaatggggagttaatgccacaaaaataggcatgcatgggaaagtgaaggccaagagttgcaatatggaaaaatgtacagccgtcacacgacttcccacattgatcgatgtaaaattaatgtcattaagtcacgtaagttgaagagtctaatgcctggtcatgcatacctacacagcaaacggagttgcaataccagacatagtgtaaagtccctatccgactagatgtgtggacaggaacttagggggcaaatgtaatcccaaattttgtccacctaacgtggctcctccacgtggtaaaaagcagaaaatacgttgaagacatgtcaacactaacctgccagaattagtgtcgtgcaacctctcaacctttgagattccatggctacacggtggacacaagcaaagacaatgtacaaacctaccaacaaggtcctggtcggaactatagttggccgacaaagagtgacaacttccaaggaacaagcaaacttcaacagggctggcaggccaagtgtgcagaaacacaccagctcttgtgtttttctcacaagccttccaactcgcctttaacattcccatgacttcaaaacagttcaaactacccacaaacatagggactctccatcaacaaataacaaccctactctttagggattaataattatttacttcgtatttcaaatatacgttgtaacttccctattttctaaggatatctctatgtacagcttgtaagccctattgttatataaagggcaagatgcaagtacgctcagaagcactatagcaataagtcctcattctttttttcatacttctcacttacaaaacacattctcattgtaatactgaagagagtctagctagaaatgacaaggtttcagtctgtaatttgtttggtattatctcaaaagtaaatacaactaagttttgatatggcatgtttacttaaagggaatgtgaatgaatgatatggtattgattcccatacaattgtttactaaattttggaaatggggaaactagtgggacccacataaattagggagaaaataaagggaaaggttctccccctatttttatagggaatgccttcccctttctttacttaatttattttaattataattttattaattaa

SEQ ID NO: 225276 - DNA, 6173 bp, Cannabis indica
aaagttccagcttcataatttaaacctgtaaactaatcctcaaaagcaagaaagaatacctagatcagctaaccacacatccaaaaatcaaaaacttaacttgatctagtaagagcaaccagcttatgaacataacttatcgacaatgaaagttccagcttcataatttaaacctgtaaactaatcctcaaaagcaagaaagaatacctagatcagctaaccacacatccaaaaatcgaaaacttaacttgatctagtaagagcaaccagcttatgaacataacttatcaacaattaaagttccagcttcataatataaacctgtaaactaatcctcaaaagcaagaaagaatacatagtatcagcttatacttctcttatccttctcttacttattttttgacttcacattaagtttataactaactacataaaggaaagtgaatgcacaacatttgaaaaactcaagttctttcttcttcttttttttttgtgtaattcaaaatgaaagcaaacctctgaagtagtgtccccatttgtgtgtttaagttgagcatctttatctacagctgctcttctacgtgcagcatttcttgtttggggtcctcttccctcctcttgagaaggtttcaaaactgctttaccctttcctttcgatgagcttgcactcttttcttgtggtggttcctttctagacccgtcacctatattgacagatgttctagagcgagtagtacgacgagtagtggaaacaggagtagaagtagatggagatgaagcaccagctcctaagggtgtagttccagattctgagttcccaccagatgctgaaggcttctgaccagattcacctcgttgaactcgaggccacaaaaactcttctacagcagctaagcttgccaatggatcaatcaacacaacatttgatgaataatcacgtaaggatttgtctccttgggaccgacaaagacgcaacttaaatggctgagacaatgcactaagcccagaggatagtcgtgcacttccagtggatgatcttgatgaatggctcagcacaacaggaaaacgttccaatgaagacaaagcattctgaagcttctgaattaaaacagtcataggagcagaactcccttcaatactaaaaggaagagcaacagcaacaaatgccttgaatcttctcagtgcttgctggcgaagctttggtaggttagcttctgaaacccgctccttagagaagtatccacaagaaaaatagttgagcaaggctgcaacagcaccactaccaatgaactcaaaagtggacacaccatcccctttgcttagttctgctagcatctcagaaattaccccaatcaagaattcttctttatttacagaacaatctgccaagcgagacccagaagctttggattttccctttgctttagtcttttggtcatcaacaccggaattcaacttcaagcaaagattctttaaaagcaaaagatcatcagtcactccaacctcaacatttccagaatctgactggaaatatttatctttaaaagctttggcacacgcacttactgccattcgaatattagtatttacggttggtatctccactgaacttgggggtgaaccaactactaaagaattcttagtatcctccaccgaattaccatcaagattagagttaccaccacgtcttctgtatcgcctagagcgtgatgatcccgtcacagaatcgttgtccttctctgcagaagatgcttgagcagtgactgtgttggggctaccagctacaataagttgatccaccgcatgaaccacaccttccctgacaaacatcttggagaaagttccaggaagtttttccataagaatctcagcaatttgaagtgcaggaactaatacatgtggatccttccatgccaaaacaccagctaagaagctacaagatcagaaagtaataaagcagcagtaagtgtgtgtacagcaacatagacatggacttgaatcatgcaacaataactagattgaggaataccttgatacgtttgtcacacttaacaaggactgaatcatctctgcaggactgaagtacatcaatttcccaataacagaaagacacttgtggcgaacaggaccatttacactagaaccataaatctgtttgacaagtgaaccaaatttaacgaaacaagaaagcaaaactagcaactggaagtgtagaaatactacataatatacgaaaacaagaaaatgacgccaaataaaagcaaacctgcactagaacaggaagaagatcaattccaaattgtcgaagaagctcaggctgatcattcaataatttctcacgagctgaaacttcactattgtttccatttaaatcttcttgtttcccagaactgccagcagaagacttctttgcaacaggtgccttcatgaatatgttgaagctagatgggagagaaattgttccttggggcagtgggggaagaagctcatttgccaagctaactatctcaaaaatcttccacaaaaacaaatgccagaagcatagaattttataaataagtactgacaaaataaaatttacaagtagctaaaatcatcaagaagcacagaaaggaatctccttattcataaacaacctaattgaaagcccatggagttaatatatatgcatataaatacctgctctggtggcctacttaaagcaggtgaaactgaagagttagcagaaatgccagaaccggatagtatatctttaagaataccactgatccccaagagaagtagtgttttagaacccaatggggacccacttgcacacgtggagagaagtcgaattaatccctgcattcaagggaatcaaaaataattgaaacctgaacatataaccaacaataattgaaagcataatatgaaaattaccgtatatgtaggtgtgctaagagaagattgtccacctccagaactgctggttgatatgagggaggcggcttgtgtcacaagtccatgattacataactcatctagtttatcaggagaggttgcaaatgcttcagcaatccgagtcaaacagacagaagcatgctccaacacctaaaaacgtcatatgcccacttaatgagagaaaagaaaacaatttcccgcaatgtagacaaaaagtagaaaatttacatttgaatcatgatattgaagtaggtttgtcaacagtggtacagcttccattacaaaatcggccgcatcagagggaagtttcttgcacatgtttgcagcagtagataaggccacacgctggaaatcagcaggtattcaataaggctctgagaatataataatgtcctcatttgaaaacattgtattcctatcagtaagagaaattgttaaaaaaatggattacctgaactcctgtagagaagaaatccagatatgaaagcactgccatgagagcaccagcgcgcaaacaggcagttgggtgctcctgggaaatttttttcagagcttgcagagactgtttcaagcaataaataaatgaacatcagaatgcaaaacttaagaagtgggattagctccagcacttcttttgaaaatatatatctaacaattttaaaaatacaagactacttgaagctactcactatgaagtaacacctaacatctcagtgagctaagaaaaattatacaacgaacctgttcagctaaatccatatactctatcgttagtaatcttgcacaaaagcacgagactgcaccataatggactaccgcagcacaagatgagggcagcacgtcacacagatgagtgagagccctggcagcaagaagcataatatcgggattgctttcgtgattaagcagtcccacgagaaccggaacaaatgaatccaccgaaaatgtgctgagcgattcctcagtcccaatagaaagcatttcacatagttgcgtcaaagcctccacttgctttccttcttccccatcagctcgcaacccagatagaatcttcttaagccgaccactctggtgcgatgaagatgctgatcccatggccgatgaaggtagtagatcatcaagcccagctccgatcttccgaagaagcccttgaagtgcactacttgcagaaaaggtcaaattttggtgcaaattattcataccaccttcactatcattatcatcgtcgtccccattacctccactctccatattcaaccccaaatttctttccacttccctctctctttctcgttctctttctctttctctctctctatccctaaccctaacctcatgttctttctcctttcctttatctgaaccatccttgtccgaattcttggagcgacgatcacggccacgcgaaccagatgattcattggtggaatccatgggagcagaagagggcaataactcgttgagagtcctagaggaacgagaacgggttgacacaacggcagaagcgatagcggtggcagcgttcgaggtcgaagaggcagtaacacgggcacgcttgctagaacgggtagcgggaccagaagacgaagatgaaggggcagctgaggaggcctccgcccgcttccggctccgagtttccatacaagaaccccaaccccctcaatttgttaactcgctcgccaagagcggcgatcaaaccgtccaagatccgattatcacttgcatctttctcaaaccgaatccaaactccaacaacccacacaagaaaagacacaatcttagtgagaaccagctagccaaacttgaaaccccagattcttcactccgctaaaatcaaattgaaatcccaacaaaagaattgacagaaattccaaaaccaaaagagctatacagagtcgaaatggagaataagaaagggacgggttcaattgaaaccctaaaaagtggcgaaagaataaaggtagaagaggagaaatttatataaatttctttttaattgtttattttatttcttattagttaattaatctcgactaaaaggaaaatgaaaaagtttagtgatattgaagagaataaaaagacgtagccatggcggtgagttactcaatagtccttcctagagggacaagtgtaacgaaattaagggctttactaagtacactagggcttcaaatgaaaacattacttttgctaccaaggatttaaaataatttgagtacttagatagaataatagaacagagaatatgattttatggaaatttataactaaaatattatttagttgaacaaaataattttaataaatttttataaatattaatatattaaattgtggtattaaaattgaaggatatttgatatgattgtctagaagcttataagtatgtgttaacacagatttttgttaactatcttaaagcttaaatcgtgatagatttgtacagaaaataatagcagtaaggaaaaaataaagaacacaaaactttttacgtggttttgcagttaaaattatgtgtagtccacgagtctatcttattagatatttctgatacaattttagggttttttctcttaaggataatctgtccatttttcaatgtaacctgctcctatttatagttacataggagagcagttaatgacaaattagactgatatcttacaacaataatcccccgaaattatgggatttgactacatcccacgtaaaataaatgtggttactttgaaaatcacacagttgtgattggtccacttttaccgagtcaatgcatacgtgtattaaatacgttgtaaagcgtatcgttctggaacatctcgttgggaacatagcaacaataaccctgatagcgagctagaccttttcccatgtctttccgaagttgataatgtaagtctcgtcgtttatgctattgaagacataacgctccatctgacaatcgtagttcttggtgacaaggcgaacttcagccgtcaacaacaatttaatatcagcttctgtctgagagagctgactcgacggagcagtggatctcattgaaagatgtttggagctgattagtgaaggtaccataagtgtacttccctatagcgagatggatgcctcactattcgttatttagattcgttcgactgttatgcttagtttgtataatgtatattatacggtaagtgtgacagtcagtagtcctgtgatccgtaagggaaaataccgggtaagttgtgcaatcc

SEQ ID NO: 225277 - DNA, 4206 bp, Cannabis indica
aaattattaagtttatgtcgcttacaaatctaaactttgatacttattggaaagcattcacaaggtaggtccattatccatatattttatgtttgactatgttgattattagtaaaatccagtcaaagggtgtgatatacatgataatatattgtaataagtaagtgcaaggcaagaattaccatatcgacatcgcatccacggaaacttgtgcgttcttgagatacccagcaaacacaataagcaccataaaataccacagctccaaactgcccaagtattccaaaaaatcagaattacaaatagttatatttattttgtgtataatattgaaaaaataaataaacatgttgtttttcttttaaaccatcacattttcgcctcatttctttattcaattgcatttcatttatcctaaattccaagagtatattaccttaaacattaaatattaattttaaaatttcatattagacatgtaatctaaaaaagaacaatttacagaaatgaatgaaatgcaacaaatgaaataatttagcaggaaaaaatggcataatagaatttgactaaccaaagcattacggcagaagcgaatgaaagtttaacaaaaccccaaagattgtgaaaagccttccatgaaaaaccagaccaagcttcaccacaagtcccactaaggatgtaaatgaactgagccaccactatgaaccaccacgacgtgttcataaccacggcggctcccaccaaaccccacccgagcttcagcataaaaagccagctgaaaaacgtgtggagaaccagagcaatcgccgcaattgccgacatagccagtattttgctctgcgactgtaagaatttggtaatcggaaagttcaacgcgtaggcgaagatctccggaagcacatacagacaataaagaccagtcgccttcgaaatctccggcgtttgtcctatcagtaacaaaatcggctctgcaaatatgtagaacagactcaatatcaaacctgttacgaataagacgatccatgatctctgcatatagatccccaacatattcagctgaccggccccaaatgcttgcccgcatagcgtttccaatgcgctacccattccgagcttaatcaattcaatcaatactcaaattcaaattcaaaatcaattttatgttaattttttttatctatacataaataaattcgcgtaccaatactccaaaagtgaagccggagatgacgaaattctggacagaaacggcggcaagttcaagggtgccgagttggccggaaaatatttgagtgatagctccaagggagtattgacaaacagaggtgaaaatggcgggaccggcgatgtaccatagcttcttcgtttcgatagtaaattctttgaagaaactaggaacgtcattaatgggctggatgtcgtcaacgtcggcggtgaatgaggaagtgaaagaagcagaggtaggtctacttccatggcctccgccgcctaagctatggagaagaggattcctgttatcctccattaatgacttctgaaagaatagtctgttttcagaatcgccaaaacagtatttataataattcatatttaatgcaatatttgtacttaaaattatataaggtattaaaataataataatattttaatataaattaaaattgaaaataatattatataaaataatacgacagcttacctatccaatccatatattatattatataattaaatgtactagctaaaaaattaattatatgaagttgttgatgaaataaatgtgacctgcacttgattgttgatttgatacccattgctttgaatttattatgaagttggtaattaataatgaagattgataacatctctttacactttttacacgttacaccaaaattttatgagatgatgataaattcttgttaattttattttttacatctttcttttttttttgataaaaatattttattttattctttaattaatttcagttataatttataatatatatttttttttatttaatttaaaataataaaagtaaaatatgtgtcaatctttttctatttttagaaagtttgacaatatattcttcttcttttttttttgattgaaaataggaaacttcattaagaaagaatagccaaatcagccattatagtattgttaatagcatcagggacattgctaccaacaaaaagacaatctgaccagtaacaagcaccgcgagcaagacaatgagcgacattgttagcagatcgtttaacaaaacaaacattaacatgagacaaagactttaataaattaagacagtatgtgatagttgaaccaaacatagaaggcatggctacattactttgaagagcttgaactaccacaagagaatcggtttccaaaataacatgttcccaccctttctttttgatccaacttaaagcttctttgacaccaatggcctccactaaactaggttgaacacaaccctctttgtgcaaacaaaaagcttcaagaagttggccattagcaccacgggcaaggcatcccacaccaaaagagttggaggctgcaaatacggcaccatccacatttaccttcaaaaaaccagagccaggggcagttcatgaagtactgctgctgctggtgttagttaatattgcaggcaggggagaaaaccgatttgaagaggcaaccttccattgattcaacacaaaagttgcagtaaaaaatacttcagtcgcactagtaacattcttgttccaaagcaagtcattccttgctttccaaatagcccacaacactattaaagcttcttcaaacacagtagaatggccacggttcagaatttgttccagccatgtaccaaaatcagtcgcaatgatagcaccattaggcacactagacaagttccagcaagattgagcaaaattacaatgaaccaacacatgaagaattgattcttcctccctagagcagcaaacacagctaagttgcacaggcacatgtttagaataaagttgagttcgggtaggcagacaaccagtaatagctttccaagcaaaatgaattaccttaggaggaactttggttttccataaggaccgccaaagattcgactccatctcagcaaaccatttctctttcgaaacttgaagccattgataacagcttttaactgaatatatacccgaagtctcatgttgccaaaaccatacatcattcacgacatcagagttgagggggatatgcctgatgagatcacgatcacgatcacgttgctcaaataaatcatttaataattccacatcccattgtacattatctgttgtcatcaattggttgaccaagggtacgttcaaacctgctccaatacgaaacgtgcccctgctgcaataatcggttgggtttcaaagatactcctccatataaaactaggattgttgccaatctcagcagttaagaaagatccatgaggaatgtatctactcttgtaaattcggttaacaagagaattatcattagttagcaatcgccaagcttgtttgcccaagagagataagttatagtcatgtaaattcctaaaaccaatccctcccgaactcttgtgtttacttaagcgatcccaactcatccaacttatgcctctagctttctttgaattactacaccagtacttagccattagtttctccagagcactacaagtttcaagaggaataaggaagacagacatggcataactcgggagtgcttgtgctaccgtttttagtaagatctcacgtccagcctttggaagaaacttaccctcccaacttaaaattctcttttccatcttctccttgaggaagcctaggattgctgttttttttgcggcccataatgcaagggagtccgagatagaagctattttcatcaacagctaccatccccaaccggttgcacaatctgtcacgcaaatccatcggagtattagcattaaaaaaatgtagaagatttggaaaagttcatcctttgaccagaagcagcttcaaacaaattaagcaatctaaggaaattttgagccttcctcagtagcacgacagtaaatataactatcatcagcaaatagcatatgagaaatagtgggagctccatttgctactttacagccattcaaatcgccatttctttcgaattgtttgatcaaagagaaaaaccttcagcaca

SEQ ID NO: 225278 - DNA, 5417 bp, Cannabis indica
cggtgtgggattcgcacagctttacccagatttcccctacggatcacgggactactgactgtcacattataattttactagaaaaatttaatttaacaaaaatattactaaaatataataacaaaatagaaaagtatcatgcaactatattttcgtattggcatgcatgcatatcatataataaaatataattaaattgaagataatcaaaaaataatgaaaacattccctgcctaattaaagtactatttatatatatatacaaacaatttggattccaaaggtatatatgcatgaatgctgacatgtatatataatataaactcaggccaactagctatatagtgataaaaatatgtttactctatatatgtacgatgatcaattaattgacaaattaagacaaaaagtatgtacttgctttttttggttggctttatttactggaaaaaccatcgatcctttgtgctatatcactatgtatatataaaattatttattcaaatttatatatacatatacatatatatatatatgttgaatttgtatatatatgtaatttatacatatatatgccgtgtatcgcactatgtcatgtttgtaaggctgcatatgatcaagttttaaaggtacgtggctttagcttatacatatatagtgtgatatatattatattataaattaaaatgaactgtcaaaatggaatatattgttaaatacctgtttaattgtttcgtattatgatatgtgaaaccacacatatatatggataaatattatttttaaaatttgtgtcttgtaaaaattattaatttggacactatactttattaaatgatagaatggactttatattttttaaaataataaaaaataaggctttgagctcaatttttaataattttattatttgatataaccaattttaagacaatttttaacacgaatagatacagaaaatataaccaattttatcataacatttttagattagattattattaagttttattttgacaaaaaatagtttaagattttttgtacaattttagaaaacacatggtttattttatcttttaacaaaacagaatgtccaattaataatttttacaaaatacaggtctaaaatagtatttactctatttatattatttttttttataaatatatattattaattatatgtaattaattaggattataataattgtattgttatatatggtgtgggatgtgatattgattaaaacaataaatgtatgtataggcagctagttttcttattcattaagtaatgaaaagatgagtttaataatattagagcataattttggaactcggtgagaaaaaaaccaatctttaattataataagtgtatatacattaattgtatattgtgtactactttttctttttagaacattgtgattaagtattagtggtgtctagcacttttgcgacattttacgttgcgattagctagtgatactctttaaaaactattatattaaattatatggacccaatacttagttgaaccaataataatattgacacataagagagtgctaggcaccactagtgccttctagtatttatcttctttttatagtgggggattgcatatatggttatgcaaaaatatattatataaaatggcgtactgtttttttggttaattattacttgaattaattaagaagagtactcccaatgaaactaattatatgaagaatgaggcagaaagtcgttaacgtatgtatattggtgttttgctttctttcaagaaaagagataaacactatctataactacataattaattaatacttttttttaatttaaaaaaaaaaattagtattggattatttcaatttccaagtgagaattttatataatatataatgtagaaatagtatatatagcgcctgtgcatggctatatttatatgatgcgatggataaagtcaaacatatatcccaataaaaagggcaacaaggaactaactgtataccctttcttatattataaatatatatatatataattgagtgtttatgtgactaattaattaataaattatcaaattaattaaaagagagaaagaataagtaaaaaggaaattaaagcaataactaattaaagaccttttgagtgaatccctggcagaatctctgtataataaagattcccataaattaatttgttaacacaaaactaattaattaattaattaattacaatttggatgcatgcagatgcactaccactatatatattaatatcacaaaattaattaatataaattataatgcaacttgcatatatacatatatatatatatgcatgtgtctctcacccaacttacatattatacttactgattataagggagattcatatacatatatataagttgatatcttggtctaacttatatatttaagatgaaatatatatatatggttccagcaacatgccattataataaatttaattttggtaaatatatattcacatttatacttttaatatctaaaaaggtgtatatatataggtataaaatgtgaatatatgttattgtttgtagtggtgagtagagtatacatatatatatatagtggaaatgaattaattaagtaatgttcaaacgtcatccactactagctatatacacagtcaacatatatataattaaaatgaattactaatactaataataattacattataaaatatataagaagagctgtagagcagtagtaatagtagtagtagtactcaaaaatcatacatataatctgtccctttcctttggacacattattaattattattattagtgctactactactactgcacaaaacaactcccaaatagtattactagctaccactttcaccacaccacatccctagctagctagcttcaaacaaaaacaaatatttatatatatatatatattcaaatgtatgtagtagcagattctatatgtatagagatagagataatagtgtgtatgtgtatattctggcaaagaatctaaacacgtgtatatatgcaccgaaagagtacgtgtagcagagccaccacttgtacgttaattccttctttttaattactatttcttctattatatattatatataatggccacttgtacatgttaattaattcctttatttattatttggacaaattaacaattaatgtttgtcatcgtcaaaattaattgacattaatcacctctctccatatcatgcctcatatatatataattgaataatttgacctacctataattactcatgtagcggatatatataatgttagacactagttctaatatatctaataataataataataataatgttcaaatatatattataattaagatataaaatataatggggtgagaataataacaattaataattaatgagcttaattaataatgtcaaatgtggtgaaaataaggtttgtgtttggactgatatttttacacggaaaagagaggttggtgaaattaattctcgtttggattggttcaattgataatattttcataatgctctaaaatcatttacatcatatttcatctaagaattcactatacatgcatttttttacgttggaataattaaaattttgtctaaaaaaatattatatgtctaaattattaatgtttctcgctaaaattaaagtatttccccacaaaagtcaaaaatatttatttagcatatatgaagcactaggttattagtactcctgatatatacaattatttatttatttaataatttaattttatattaaaaaaatattatataatatgtgttagagtggcaaagtaatttagatagtggcaagttcgaaaccccactacattacatagtgcatctctatttttaataattttttcaaaactaaaagtgaggctgctgagatttaaactccagccccctaaatgaatcaattaactcacaaaattatcttctttttttttttttaattttttaaagaaataaattcattgaaaatataaataatgtcatagaggcaaaaatatataactccctactaattttgttagcttttagaaaaaatattgagttttgcggggtaatatcaccaacttggtttagagccaaaagctattatgtgtaaatattaatttagttgcaataaaataattattttggaaatattaatcacaaaaaatattattattgtagctgatttattttcgtctttttactatataaagtattaattaatggaaaacacgtacatatcggtgcttaggaattaatggaaaccattatctcatttgatcatatatataattatttattaatcatgtgtctaatagaacaattacacgtacgcgcgtatagccttccctaaaaaatgtatgcatactaaaaattcattaaacaaagcctaattattaatgttttcccagaactttgacatataccaaattatattttttaaacttttttaatcgttaaaaattccccctgaaccattgaaattgttagatttaaggacttttgtctaatttcattcaattttactgtttcagtgattgtttatgtactaaaccatgctccccaaactttgatatctatcaaatcatgcatttcaaactttgatatgtactaaatcatgctccctgaattttcatccatgttagaatttttttacttaaaattagacaaaagtccttaaatctaaccatcttaatagttcaagagaaatttttaacagcaaaaaaaattcaaggggcatgataatttagtacatgtcatagtttaggggaaaaaattattaattagccttaaacaaatatatagttccaatcaaaattattgagagacaaaatcctctatcagtaatggaaatgcttttaataaattattagtaattaattaattaataaatattgatacacacaattaagtagtgcaaattaaatgtgtgtgagtgtgagtgggattattaattgatttgtggggtactactctctagttctttctaaaaagaaaacgaatcgaaagtggccttaattgagagatcaaattactaattaattaaaattatatatatatatggtgttaattagattaaaccgggtggactaccctactattccactacttacccactataatagcccaataatcatatttaatatttgtaaaaaacaaataatatataaattatacatcttattggccaattttccacttatttccatttaaatatatttgcatggctatcgctgctccacacatagctaaaccacacacacacatatacatatatatatatatattgatcatttttttattttttattaatttttcttaattactgtaagttatacatatatatatacactaaattg

SEQ ID NO: 225279 - DNA, 2503 bp, Cannabis indica
tatatcatatttttatataatactatattaaactttaatttatactaaaatattatacacttaggtgtccataaaagttaataccacatatagttttacattaaaaatattacataaaatataatttaatataatactatacaatacaatacggtgtaatagggcgtaccaaacgaaccctaagagagagttatgtcattaagatttgaagttgaactggtcttgaattctcatctaacacttgagggtgtttagtaagtctttatctaaactaattagctaaactctcatacttcgtcatcatgtctgcaagattttcttttatcccaaattttttcacattcacttccttctctgctatgatgtctcgtataaagtgtagtttaatatttatatgtttggacctcttatgaaatataagattcctcatcaaatgtagtgcactttggttatcacagtgagctgctatgttttctgatttgaaccccaactcttttgtgaaacctttaagccaaacaatttcttttatggccactgttgcagtcatgtattcttgcctctatagataacaaagcaaccaccttttgtaggttggaattccaactaacacataaacttaaaattgcaaaggcatgtccagtgatgaattttcttgtatctatgcttccagcatgtttgaatccacatagccatttacttcaatttcatctttagacttgttgacatagatgtttactgagattttaaaaattaataaattagagcttaagaaaaatataaaacaataaataataaacatgtaatttttacgtggttcggacattaataatccctaatccacaagtccgttgtattagccttgcaagcaagtgtttgaatattacaagtgtttacaatataaaccctagctctgtactccttttgcttttcttgaagaagaagaaagctagtagaaattttagtagaggttcagtaagtatgaaaattgttcaccctttgtagatagaaaataaagttatttataggcttacatgtgggtaagggcattctctttacctacttaggatttcgttgttgcaagagtaaaagaatacaactggaaatctgaccgtcctacattgaagaacttgatcatgcggtgtgcaaagccagtggctaatactatttggatataagaaacatattgctcaaatgtttctcctttaccgaacactctctagacaggtcgttgggcaaaaggcatgttcagaggtgcatacacatattactatggcctggcatgggggacaagatctgatcttgtgtcagaaaaagtgtaactgtttgtaggtcgatttccatatggagctgacgtggccattcaccttgaggtagcgatcacggtccgcaaccagtccgtagaaatcttcactactcagaaatcatttacttgagtcgtgttccaagacttcttggagatggagacgaatatggttcttctacgttccagagatgctgcttgagccggggacgactctccccgtcgaatatccataaagctcctcccgaattaccaagatatctctgcgaggaaaattggtagttaactctgctaatccgggaggttgacaaatctccttctctaatcatgctaggagcctgcaaccttttctcggaaaccatctctgccaacactcagttggcaccgaccaaataattatgtatgttatacataatgtgatgaaattagttaagttctatgaacacataagtttaactagttttataccgctaattaaaacttgatctaatgtaaaaataaaacatatataattaacaattaaatgtcacctttatacatttcaaaaaaaaaaaaaaactgtcacctttataattatgagtgaattattttgttaggattgaatgattgatacatcataattgtttgtttaagcaataatagtgtattttggtttggcaatattaatgttcgtactgtatcaatatattttgttattttagcagaggaaaaccaatcgaattcaaatgatataataacaaaatatgaaaatgtaaaaaaacaacactaactactttttgttacaatgtaatttaaagtttgataaagttaagttttcaaaaattgaattctattttttttttagtacttttcttctttcctttcatacttttatacttgcacagtttcccctaatggtacaaaattagtacaaaattatgtatatatatacatgtgtacgtatccatagtatccattctaatttgcaaaaataattagcaattaagttatagatgttattattgtaactattttattaaacttataagtacataattatccgttttaattgttcaaaaaattaaacaaaagattaagttgtaccaatagatactttaaacattaagcccgagtattacctattagcgtttctctaaaaaaaaaccatataaagagaagagtagatcgatggtgtatatcagtgaactataagggctcgtttgg

SEQ ID NO: 225280 - DNA, 6492 bp, Cannabis indica
aaaatagtaaaaaaaaaaaatctttaaaacctaaaaatataatttgtttacaaaaaatggtgccttatgtaattatctctatgtctaacttgaaatttcaaatatgaaataagttaagaaatatatctatttatttattaaaaatatttttatattatattttattaaaatatatttatttttgtgagtgggttgcttaatatacgcccactctccacttaagtctagcacataatttatattaacctaaagagtataatagggacatcatttataaaagtgggtatatcttaaagaatgtggaaataaatgtaataattaaaacaagtaaagtaaagtagatatataatgtaattttcataatatttatagtaaaaattacataaaatatggatttttaaaaatattttacttaaatatggtagttctaaatttagacacatttagggtattcttttacttttgaacttttaaatcgaatatatcctaactcatgcagacactacatgcgtgtttataaattagtttataataataaactaacagttcaaataaaatcgtagattaattaaactttactaattatttttaaatataatttacaatctttgaaattactgggtttgaggatcccttttacaaacttacaaaagagttacaataattttttactcccaaataaatatataatcaaaatatatactataaatccgaacaattggacactgcatgctagctgagctaatatgtacattcgctagggaagacctttaactcgtggttgccataattttcttttttccctacttgtaccacaaagcacctgtaaattataaagactcaacaagaaattaaatagtaatacaaaatcacatacaacatacaaccaataatattcatataatcaactacatactcatatatttaatcagtaaatcataatataacataaatattcacaatatcaagtattagtataataagataaactactcatgttacttgatagagtaaccattaattctcatttccaaatgagataattaatgtcattattgttgcctaatgagacaaccaataagtaagaaatctaacaacaattttaagttaagaataataactctttcgtacaaacgataattaccgtatcataaatcaatatgttaaatggtataattgactttttttactttaaatctaatttcaaatgtgttggccaatctgagtcgaaaacactagacgattacatgctctatgtcacataatagtaaactggtaaataatatttaatcatgttctaagacttaaactcaaaattaaaaatttctctatctataaataatgtggaaatatcttaaatattgatgaaatgtaaaaatttctctaaatattaatttttttaattaaaagtaaccaaaaattgtttttaaattttatcatgaaactttagtacttagaaaaaggtgagagaaggaaggacttccgaaaagaagatgaataatattcaagatgtgtttgaatataatatttatttgtcttttataggaaatttacctgtcaaatattattaaaataattaagtacattaatttattaatggcacaaaaagcttcccactaataaagataaaacaataatctacatccatattgattcaatacaatatatatatacatggtactcagcaaagaaatagagattaatttaaacaaaatcccatgcaattaagtagagaaataatacttgcactttgttaattataatgattaaaaacaacctagatattaaactcatgcatgtataataataatactagatattgttcttattcaataatccttaattaatatatctatacaaaatacaagaaaatttttgagataataataatggatggatatatattactactaattatttcaacgttttttgtgtttgagttgcatactattattattattattattattacttttattaatactaaaagagctgctatgacgaacagggcttttcacaccacacataggccacttatgcttcacctgtttccaaggaaaaagcatatccaaaccacacccacctgctcctttgctcgaagaaaaagatgtcgttctcgtcatcgaagaaggccgtccaccaaacgtggacgttttacgatgatgagaacgacgtctatgctgatgattgaaacttcgatcatcagcaatattattattactataataactctcgcaactcttcttcaagctcatggccccgagcgttgaagccgcggctaaggccgtggcatcaggcaaaaatctctggataataaaatccgggtactgattgttaataccatttctagaatcttcgatgatcttcaacttcaacttgtctgtcgtgaattcccgcgctcttttctccgatctttcgacgatgtcgattgcttcggagagtgagaatacatctatggcgtcagagtagacatcgtctgatctgtcgttaaaaacacttactttttcttccccttcttctaattcaacttccacatccgcgtcacaattatcgtaatagtcgctaaaactgttttcattttctacgtcatttttgttgtgacgaaaatgccataataaactcggtgggagtttgggacgtggggtgtcgcttaagccatacgacacttcatttttgtaatcttcgtcgtctttaggtttcccggccgctttttcccacgaaaacggaaccctatcgtttacgctagtgctattacgacgccttatgctagaacaagagagagcttcattaatggagtttgaatgatgaagaaatcttgttgataagaatggtacgttgaaattaagagaagtagctcttgatctatagctttgatgatcatgatcaacataatcattttcttgttccatagggtgaaatgatgatcaaactatagtgggagatttgttgttgttgtgtgtattttgagaaagagaataaagaagagtttttcatttgaaagaaagattatttgatcaaaagagagaaaagttggatgaagtaattaaataaaaagttaagctttaacaattgtatggggggtttctcgtgaagttttttaagttaaaatagatttcttcacatgttgatagtattgttcaaaaaagggaagtacctttatttttttgttatcatgtgtgtagatcgattgaaatctatataaatatatttatatatacatataaggaacatgagtacgtatgtacttaataaaacaccgctaaagaaaaaggctaatgtttctaatatattctccacggactagaacttttacaaggtttaattagttccctagtttgacacgtacgtagctatattatgtgttttgtcaagtacatatgactatatatatatagtatacatagatatttctctttggtataaaatgagatacatgtgtttttacatggatgaaaatatcccacgtatctcattttgaatatttgaggttatgcaatgaaaattaagccaagtgtttgaatactagaattaagaacatgataataaacaagtaatatttattaataattatgctctttgattactgagggttttttgtaagggaaaattgtgtgaatctaaggttacattacattgaaaatcacttggcaaaatacaacataacattaacaagacctctctgtttttttttttttaatttattatctattagattcgtttcatgtacaagggatttcaactttcaagatcattgatctgagtgtggttgaagattgatcaatctgataatccagtggataaataaaaaatatttacatgctttatatcttgctcctctactttgtcttcctttttttaatccaaactctctttcattccattccctctttgaatttcttctctgcaagtttttcgtataaaaagaaagaacataagctgagctgagctgaagactgctgtgcctttcgtctaaaattcgggttggaagcagtggaattgctcaatggagatgatgaacaatggctatctatgtttggtgtgattcattcttatggttcatttacatgctctttagatatgttgtaaagctcgatagtatccgcatggctggaatcaagacacagagctgctgcgcagtctcggattgtggaagcataatcattcattgattcataaaaggccgctcgaagatgcagcagctgcagatctggcttgaagcaatcggtttcgatcatccatcaaaactgttggttcaataagttctgatgttagttagtaattatgccattcaagacatgaaaaattacatatgaaatttgagttttattcagtttgaatccaaataccccaaaaaatcaatagaagacaaactagtttcaaatccaattccaagacattttgcaataagttccgttacatgtacactacaaaacaccttacgataaaatgtgcaaaatatttggagcatcccacatagaaaagatgacataaagtagaaaattgaggaaagaaatttttaagataccctcaatcatgcaacgacacgttaagaagtttagtaggcgaaaacaagatttggtgcctctgaacaaaggctggttacaatggttacttgggctttgtggaattgtcgaaacaatgtaactcactttctagcgagatctacttgtgttaatgcagtctagaagtaaatatgatatctatataggtcctactcattgggataaggtcatcaaagaatttttctttggtcataaacaaataatttgctagaggaataagtttgacaatcaagcaactaaaagtaccaaaaggacgtttcaaatatcatccaacttgaaaactgggtgcctattttttcttttgaagatttgatttcgaacatgagtattatcaaattgaaaagaaaagtgtaccaaatacagataaatcatgcttacctgctgctctgtatctgtaagggtatgtcctcagtggatctaattgtgttgctgtggtaagatcactctttgccatgtcacggtcacaatattctgagcgtttctcataagctgaggcgttatttctggccttctcaatcagcttcgtcatctcatcataagcaagttttcgttgatttttcaaatggtatacacgagcaagaccctgatgtgcgcgagtatgcttaatgttgagtgcgttcatgtagcagtcagcggcaagatccaacttatcacagtctacatacacacttcctaaattgtttagtgcctgcacacaatgaagttgttcagagttaatgtataattttgctataataaccaagatgatagaattgtgcagaatttggcacatacttgtcctttcctaaggccatcggaagggcatcgaagagcttcctccaaaatatggatcacatgcattgaagactcgggatcgagagtggagtctgataaagcatatgctttaaggaaataagcttcaaatgatctctgtatagcaatagattcctctgcttttgccaaggcttcttcgcggtgaccagtgtcataaagaatccatccttcataaacaagtctttcatgctcggaactagaatgatttcgagccaatcgtagactacgcattgcagctttctgacaattcaacctacaaacatcaaaaaatcagaaacactgctaaaacaatgcaacaagtttgtgatcacacttagaacaccctaagagctaatacataaaagtcaataatttacatctcaagaaaacagcatctagaaaataataagttttgaaagctcatgaacaagtttcaaatgtataaacagaaatctaagttacaaactacggccctgttcggtaacaatttacaaattgaatttctgtttttttcattgataaagcggggaaagaaggaaaaacacgcattcagtaaattttttgttttcttaatttaaaatcaaaattaaataaatttaaaaacactttttcccttttgcttctctctctggctcgattcctcacctagaagctcataccattccatattctctttcttggcttcagctattctacaggtaaaatctcttcctctctctatatctcgctctctctcaggtaaaatatcattgtgccacgtcaacatacatactaaaattcaaaataattgtcaaaaatagaaaaaatttgaaaaatctcatttctaagaatttttgctatttgggagagttaaaaaaaaccaatcatttagttgcttttgatgtgaataagatatcaattgattacttttccgttaaaaaatttatttcaaaattttacatatatataaataataatataaccattttaatacatgagaaacatatatttttctgtttccaaaaaaatgacgctaatttaaaaaaaaaaaaattgtttcctttacatatttttaagctatattatattattttattgtttaagatatcttgagattacttttttttttaatgtaactcatatgatgtttcagatacta

SEQ ID NO: 225281 - DNA, 1744 bp, Cannabis indica
attgtagttttattttttttggttagtaggtaaaaataattattactaaattaactacaactaagtttaaaaaggaaaagtaaaaaaaaagttataatagaaagggtgtagagtgtagacttcttttatgttttggtaaatagaaaggtattaaacttaaataattaattagttttaaaaataaatatattgtatttgattaatagtgatgaaatgatgaaattttccgtaatggtatggtgatgttgggacatagattctaaatggtacaaaatataatgatagcatgtatatatgtaggtccttaaaagaggcctatgattttttttggtcaatctttgaatcaaatttgaaaaaggatatttcatttcagtacatgtcatgtccattcccgctaaatatatatacaattttttatttttgtttagagattatattatgagctagtttttattacaaaaatcaaactaagtagttttgtgatctctaataaaaaatattaggtaattaattgtgtgaagtatttatacaattaaaacctataatgaatagtttggtactaattatatcaataagatgaattttgttttgatttgagataattttaggatggataagcttatgagaaattttttcgaaagtactctataattaagtgtgtttgacttaaaataatttcaaaatgagtaatctcctgaaatgtgtgagtgagacaaagctaatgaaaacttgaggtgggaatgttacataaagaacaacaaattatatataagttgccttaatttttattattatttatttttaattttaattgttattgaaattataataattctaaacagtaataaaattttaatttttatacctttcttgaaaatttgatggttctgaaaataaaaaaatataaattgaaaattaaatcctaatcttttaactgatgctctatatattaaagaccaatttaatttattatcttatttttattatattatttaccaattaacaatatattttttttcttcacaacttcaatacctaaatatattttttacggaataaaaagaaaatcacgtattacagatttcttttttaattttttaataatttttgagactacatgtcaattataaaaattttgtacctcaacttaattactttaattgaattatgggtaacactttgagagttcttgtttaagatgaaactaagttggccaaacaaaaaaaataaaaataaaaataaaaataaattcctatcactacataacacgtcatttaagacctaagtgttaagagattacaatgtggaagacaaacttaattaattgattaaatttgtgtattataagagcttaaaatgacattaataataataacattacttattataataattataccaatcactacactaattaaactctctatttctctctccattcttgcttccctacattcatacacatgacattatacatatatctatctattcaaataataaaagcctatatagttaaagaaggaatgaatccattttcatacatatatatttacttttttgctaaaatgaataaatggatgatcacccctttattattttggtcaagatcaagagagagaaaagaaagacaaactcaccgcatagtcatcccataaaaagcttccactttgccccctctctctttctattttattttattttatttaattaagtattttatgaagttaaaaataaataaataaat

SEQ ID NO: 225282 - DNA, 4118 bp, Cannabis indica
ttttttcctttatgtgtttggtaataataatttatttatgaatcatgaagttttcaaacttctatgtatgctcaaaggagacaaaatatcacatgcacaccaatttgaaatcactttaatacccctcactttaatatcacccattacatcctttattaggcaagtataggaagacatctgtagattcatgcatatacagtgtggaaggaaacatatatatatttactttgaaagaaaaggtcaagaattgagacaccatttctgtcctatatatattgcttattatctgccacacgccacttggttttgtttgtagaataattgcatatcccaaaatcctttttgatttcattttttttttcacacttttcttttttcatagtaaatgaaaataaatgcgtccgctcttaaatgtgagctctgtaccaagaatattatgaatgtactttttagttcataacttgatgatttattcgggaaaaaagatcttactatgcattatactattctatagtcatgtattttttcagaacataaatcgagactaattatttttctttaatatacagattttaattactatacttggatttttgcagactagcggtgaaacaagattcttgctggttaataataataaaaaaaagattcttgttggtatttttttacactttgtgctaagtttacaaaaacattgtatttttttatatatatttttttgctgagagattcttgtctaaagtttgtggaaagagcttcagaatatttaatcatgtccgaaggaaaaaaaacccataaaatatgtcccttctgtctaatcccctgacaaaataaactcacaagctctacaagaaaactttgggccggttttactaggatttaggtccctagcttttaaataaacgacaatttaatattatagttaaggtcacatggagcttaattacaagatcaaaaagtagttcacatgatgcattagaaatttagaagagtggagaattgtaactttgtttgaagacttttataaagtataatcaaacaaagaaacaatcatgtaaaactgcaattttgttctaattaggatgtgaaagtgaatgaatggaaataagtacaaagtgtaatagatatataatttatgggaaagtctacactacaccctactaaatagtagaggtattttggcaaactctttaattaaattggtattcatcaaaattttttaatataatttttttataattattaagatcgtttatatatttttaaaataattctaataattcaatgtttcaaaaataaaattaacatattttgttgcaccaaactgttcttttgctggtaatattattaacatatcatacattttaactcatgagcataatttcttacaaaaaaaaaaaaaaaaaaactcatgagcataaaatattataaaaagtaaaaccacttttttagcccttacttcattgcacgatttgacaagagatgccatattaccatttacagttcatcattaacaccttttcttttgaaagggatttttgtggaaaacaacctttttttaatagctgtcaatccttttcttttcttttctttttggtggcaaaataaaggagctaattcttttcttaatcaatatagatgcaacagaaatgttagtgagataaatatactccatttaaccataaatttcatttatttgttaaattcttatatcgacaagaacttgtgcctatagttcaaaagtatttcagcaggcggccttgtggtaatgtcaaaagtttatgacacaagttaataattgctaaaaaaacaattaggatctgttcaagatttaatgttgattttttttcataagaatttaatgttgatttgttatatagcccatgataaacgtaatgatgattttcatgtacaaatgatagtcttattctatacaatataatgattatcgtacggtccatattatggtgaattgtactaaaggaccccactcttgtaaatatttaatagtcttggatacgctaagtcttacaagattcaaattctatctcgaacctatcaaaccaaaccaaagtaccgaaccaaccacaaacactctcctcgatcttctaaaccttccacattttcctacacacacactcacctcactctttcccattcccactatcaaaaaaccctgaagaacaacatgaaagaagaacacctcttctccttctcttcctcctgcattttccttagaaccaaacaccacctttaatttactagcagatagaacggacaagtaataaaaaaggtccagcctttcattcttcttgtctgtcattttctttcaagggcaaaaaagtaacagacatgcctctaataatcttattattcttcctctttccctcactctctctttcttctctttctgagctccctgctttaatggccttgaaagcctctcttgaccccaaaaaccagtttttgaaatcgtggactcctcactctgatccttgcagtggagcttttgaaggcgtggcttgcaatgaccaaggtcgcgtggctaatatctctctgcaaggaaaaggtctgtggggtgaaataccagggactgtggctgagcttcgaagcttgacgggtctttacttgcatttcaattctttgaatgggaatatacccaaggagcttacgactttaagccagctaactgatttgtatctcaatgtcaataatctttctggggaaatcccagttgggtttggaaacatgcctaatcttcaaggtgggtcacttgatttatagtccaaagttcaccttttttattttcttaatacgtagagaaagattatgcattgttatgttattgggacatgtcatttttattgcactgaacactttgcttcataaaccccacattgcagaaaataaaatagaaaagaagaaaacctcaactttgtttagatgtatttcttttatttggtttagattcttcaacaaatatgtttatactaatctttcacttttgccttctgtattctcactaaagcttcctttggacttgctctacgtactaatgtaatgttagcatggttgagcctatatacttttgctgtaatgttacttggtttactttatatgatgattgttaagaaaaaaaatcttccctttattttcttcttggctccaaaaacgtgtaatgagttcttaagtaggacttgtgatttgttgcaaagtaagataaagcttcaattcaagttctctcttgttatatgcagttctgcagctgtgttataatagattgactgggagtataccaattcaacttcgaaatctgaagaagcttagtgttcttgctcttcaatataatcaactaactggtgcaattcctgcaactttgggtgaactgaagacactaacaaggttggatttgagctttaacaaactatttggttctgttcctgcaaaattagttgaggctcccatgttaaaagtccttgacatcaggaacaattctctgtccggtaccattccacaaggtgatgtgttcctgatttttctctttcttattgctctttcttttttcttttatctcttctaaatattaaggatgtagctaaatatatcgacctgatggcctttttgttggtccttgtgaatgaaaatgcagtttttaaaagcctagggggaggattccaatacgaaaacaacccaaacttgtgtggagttgggtttcctgaattgcaagtttgcacagctagtagtgaaggttgggaccccaacaggccagaaccatatcaacctggtaatttttctgccaacagtttcccaaactcaacaagtaaccattccacaaaagacctacccgagtctgtaaatttagagtcgaattgcagtggagctaagtgttcaaagccatctaagtctcctcaaataggtgtagttttgggggtgactggactttttgttgcatttgttgtttctggtcttttctcattctcatggtaccgccgccaaaaacagaaaattggaagtactttcgacccatcagatagtcggcttagcactgatcaggtgaaggaagtttacaggaagagtgcatctcccctcatcagtctggaatactcgaacggatggga

SEQ ID NO: 225283 - DNA, 4276 bp, Cannabis indica
  modified_base (4176)..(4176): a, c, t, g, unknown or other
aaaaaaacttttatttaattaaacaaatgaacatataagatataagggtgaggtctccaccctgaggaaaaacatataatttatcaaactaaaacactagttttaaagaatttgaacatatgtaaacacctctaagcaaagtttgtatcctgctaagagtgttcaaagaaatgagctttttttttctttcctttttatcattagtccctttcttgtcaaattttaagtttcatatcctttttgttttttccatctatttctgatattaatacttcttatttgtttcttgattttctggaatcttggttatgatcttctgagatgctgtagatggccttttttattaagataaacttgtatggaaatggctgcagcaagttgttgaagcataaatggttaggaatatagcagatgattttcttaagttgtgaaggcaagagttattgacatacagttatggtatttggaatcgtggaataagattctgggaaggcaataaaagttaatcaccttaatctgttattctgtttcatattgatttggcagaattagtacttaattcacgataggagctgtggtgtgaagattcagtagcttgaggctgtttgttcattaatggtctatttggtgtcattttgttatgctttttggagcatcctcactattgatatagtgccttgtcatcattagttattgtaatttagagcctgctacagtttgaagcttagttgattttgcacattatcttcggacgtgtcaaatacttgatgcttggcaatttagggataggggcttgggttcaaattggtcacattgtatgcattctcatagtttctggatcaagttggatgtggttttgcttatgaagcttgaggaaggtgcatgtataattgtcagtcagttctttatcaaggtagatatgtttttcatgactcagttagcctaagaggattgttcttatctgctaccagaaagcaatgaactgcttctcatttgcttttgtggaggctcgatgttatttgaattttgcttgacctactttttagaaaagaagttattcttggagtgctggaacaaacttaatgatctcttataacaaacaaagacccagccctgcttgtttagtggctaatttgttcggattcagtgtagataggattttgtcgatgacttctgtgcctcaatttttgagctggttacagttatcttatgtaatgtcaggggactagagtcatttccttcgtttccctcaaattacatttttactcttgggaacttagtaattgagctatagtatactgctccttcagatcacatgcctctcgtcaggagttagcattatgttcttttagaaagattcattcccgagttgttatttctcatgggagagtgcaactttattgcaatactaaataatatggtatgctttctatcatagatgtgcatgtgccattcgtgatagatatttgacattctgtagtcaagcaagcattggccaacacaagtggttctgcagtatgttcaattgatggaaagacttagatgtataattgcttgagtctcaaacagctaaaaggggtcagggttattaacaacagcgtactggtgtttgggctgccttacaagattagtattttgaagcaaattcagcttgatattagtgtttggtttcactctcttgattttatgttctctggaaaatatttccgttcacttgcttcctaaatcctctctgctttgctttgtatttgagcatgaacttaccaaatgaaccagaagcatgccttaccttcgtgctccactgaattgaattggtcgtttgcttcaagtgctaaaatatctgctcttgggttggtttgggtcagtcagttttaccacgcctcttttcagttgtttgacagtttactgacaggcacagcgtaaagagtgattttaaaaagggctaacagtttcagagttgtagactcttcagttctgtgagcttaggatatgccctcgagaggttagagttgtaccgaggcagagttttgaagaactcacaagttatagtcatttcttgactgttctttatgaaaatattcagtcactttgcttgcttgttctatcagtcctcctgggaaagcggcagaatcaacataaaacttttacccataatttttcgagctagagaagttttaagtaatgcattgggttcatgtacagtctttgtaatttagcaattacttcatatgaatgtctttattgtactggtccatagaaatttagcattaattgctgttttgaaaattgtacaaggttaaaagccgccatagatatcagtttctgtggggatcaaagttgcagctgggatgtaatactctagcaaaattgcttcttttagtaatctttccctgttatcatgatctgtcttaacttagaagttagaacaaataaaatgtaatttattggattgttacaataaataagctattcatattggttttgtgtgactttttggttttatcatacgatcgaaagagatcagaattgatctcattggttttatccttttctaagtttcgagttggatgatgctacctatgtcatgtgcacacagaaacatattacataacatggtcttttctacactgttgtttagtctattgaagttgttttgtgttgttagtaattgagtatgaatatagaagcatgatttagttcttatgtttttttttcttttaaatcttcacctgcgagtgccaacacaactaaatttatgttatttaattatttttttttaaagaaaaactttattttgctgctccttgaaagcttttataaatttcatttagttagactatttgtgtctagtttttttttaatgttgatcagtttgttagaacattgttttctattacagctttaaacataagtttgcatgaagtttcttttaatatcgaaatcatgtttccattcttcctgtaaggtttattttgaatttgtttctgtcttatccattttcttttgcttgttatctctttccgtgtatattgctcgtagtaagttggtagcttctatattattgctggcatgagttgcagtactgtggaatttatgtagatcatgctggaaagagatactggccgtccacgtggatttgggtttataacattctcagaccgccggggaatggaagatgcaattagggaaatgcatggacgggagcttggtgatcgagtcatctctgtgaacaaggcccaaccaaaaatgggtggcgatgatgatttggacagtggttttcggggaggctactcagctggtggcaggagaagctacggtggaggggataggtctgtaggacaagatgattgctttaaatgtgggcgcccaggacattgggcccgagattgcccttctgcaggtggtggtcgaggtggaggttcattctcatcgcattctaggtttggaggcggtggtgggcgtggggatcgttttggaggagaccgtgatcgatatgtagatgaccgttatgatgcaggccgctatggagagagggatcgctttgacagcagggacaacaaatatggaagccgtgatcgacatactagtgataggtatgaataatagtgattatttctatcttcagagcggcggagttgtcatctgctacggtctcttattctgacttgggttttcatttactgcaggtaccaaccagctgaccggttcccaaatgacaggtacaccggtggtgataggtacccacaaaatggttacgataaagataggaacttcgacggagatggtggtccacgaggtagtgacaaatatggaagtggtggagcagcacgtaatgagggaagaagttatcgaagtagggcgggtccttatgaccgcacaagtagggggggaagaccatcgtctttcgatcgcttttagattagtatgttatttcaaaattgtaactacatgcattatgaagttaggatctttgttttaattttctttaggatgttaagttgaattccactgtagttgaggattgatggatgatcttgagcaatggttttagcctttccttttgcccttattaatggtagttttttctatgccaaaagttctaattgaaatgacgctttcgcttgctgatgtatccgtaatggtcagtataaagcacatgaagttaaattaggtccnctatgacgcgtttagtcttaacggttttttttttttttttttatttttttttttttacgtttttttttttttaaagtttagtaattattattaggttaac

SEQ ID NO: 225284 - DNA, 3724 bp, Cannabis indica
agaagagaaaccaagttctgtttgttgagtgtgataatgaatttgtggatgtgttgcttagctttctgacattaccaatgggaacaatcataaggattggtgataataataagaaatctggaattggatgtatggacgaattgtataagagtgtagaggctatgaatccaaagtgtttttggaccaaagcttgcaagaacatgttgctggaaccaagaagcgcttacggattagagttgagtaatttagctgtaaagattaatgatggaatagattatgcaaagttctacacttgctcaaaaactccttgcttgaactacgagtcattgggttttgttagttttttaaagaactcagtatgtgcttgtgggaaaacaatggacaacaaactgagaatgaggtatggaaatggtggtagtaaatgtaataatggttattggagtttcattagtagtaggaagaggtttattgtaagtgatgatttgcgagttcttccagcatcaatatccaatgctctgcttctaacacaaggactcgttgataatagcagtgttgaacatcggaatattcatgttggtctccaagaggtaagagagtgttaatcttaacacatatattaataatgtcagattacgccaagaatatataaaatagagcattagaggaatattgtccaacattttttataggttgccaaacgattaattagtaatattttctaaaagagtattactattgagtaccagtaatatctaacacatttagcactattgagtaccagtaatattttctaaaagagtattattattgagtaccagtaatattggctagcaatactctctaaaagttattatattaaattatataggaatcgatacttaattagaccaatagcgatattgagacataaaaagatactaagtactactgatgtcttttagtatttctcttcttaaaagttattttcttatgttatataagatctagggatatgattttgtcccgtgatatattttcacggaatgtattccgtggtacattagatgggtctcatggtacattaaatgagtgtcagggtacgtttatactttttaaccctaattaccactagatcaatctcagctgtcagattaaataactccttcatctgacggctgccgtacatcacggattacaatctgtgaaagtacaataacaagacaaaatcatatcccataagatctaatacttattacacttaaataaaaaagaatacttattacactaataactgtatgacacggaaaagaatggagagtgctaagcgcctattttagcaattctctaacataacaactaacatggccgactgcgtaaacataaagaaaaaaaatgatgaaacttttattaaaaagtatgtggtattttcaaaaatcactaaatatatgtattttataaaaaaaaatgtttttaatcactggctgtgtgggttctacgtgcagcccaggcccaaccctaaaaattgattatttcagaaatataacaaaaccataaaatttcgcacaatctgtacatgactattaaattaagttatagacaacagttggctagctatatataattctctaactatttttgtttgtgcagattttgcagctactccatcactcactactctccaagacacccttaacagatgcttttataccaaagctggctgatcagaacatggatatcattctcttgccgaaggagtactactcatctttacactcgccttggcagccttaccaatattccagctctcatcatcaggggatgatgatgaatgtaaaactatggtttagcaagtcaacaaagagagtaatatgcattgaagcagaagaagattttgtagattttctcttctcctttctcaccattcctttaggctctgtcctcaagctattaaaagaaaagaattcattgctaggaagcatagataacctgtacaaaagtgtacaagaaagtagtgatatatcccctaaatgtaaggagatgcttcttagtcctaaggttgaaagaatgtttggttgtgaaagcctattgttgcttgaagtgaatgaagaggtgactcaaacagagtttgcttacaacaaatgctatgcttgttgtttgcaaaacaaaactacatgctgttgttgtcacattcaatatcagagacttaaactaatgaaccccaaatgtccaggcatgactgaaaagggtggtggttttgtaagatcacaagggtgttttttgatcactgataatcttgtagtggaactcctttcaccagcatctggcttgggcagacttgagattccctttactgatttggaggagatgccaatagcagttggaaaagcagaggtatagatagttcactataataattctttgttattaattacataattcaaagtcacattttgaccaccaataggctagaatttaaccctctcatattttgtgcaggctctagctattttcaaagcagctatgacaactcgaaatgttctgagtcaagtttttagctcaatggtgatgaacaagaacaagcttaataatttgtatttaaatgattattagggaatgtgattatctggactgttagaaatatgagtaatgaataatgtaacaaagaataattttcaaaatttcttgacaagtgatcgagcatttccagcatatatctttaacttcatcatcttttatttgaaaatcaatctaacttcataatgatcttttatttgaaaatcaatatataacagtgcttcgcatccatgtatacttgactttaatcttcaatagccaatactattaatttttccatttatgtgttggaaagtttatgaatattttaagaaaaatatgtaagtgtcctagtgtgtgtggggtggaaagagtctcccatggggatatgaactctcattttacaaaggtataaagagtgtaattttggcatttggatttgagtcccaaggggtatctagttttgtgcgaatgggtaaggacacacacttgacccaccacacgcccattgggttggttggtgtggtgtggcactatattatttttatttattaatttaattaaaaaacgtatttaattacttagtcgtatcagttaacgagacttaacgattattcaatccattcgcttatataatgctatattataactgatgggaagaaaacatcttttcttatcagaaaaaaaatagttttcataaatactaaaactccatctgcggcatcaaaattattttagtgtattcgacggtgctctacagtgcagtggggttccgatacagtgcgacgactgggctgttttatcctgaggacgaccggcaaatttcgactgcttacacactcttggacaataccgcgaacgtcttaaagagagcaacttaatccgcgattcaactcaaaaaattttcattcggtaatatcattcctcttttattttgctagcagcttcatgtgtgtatcattaaacaacaaataagtttaaatactattttgtagggccactatatttctaataccatacaaagtgaccaaccttcgatcagaacagagcataaacatcataatccaaccaaattctgtggttgtcgcttgacatagaatttgattggctaaactttaactttaaccttgatttttctttcctgaaacagtttaactttgagttttggatttttgaaaaagaattttttttt

SEQ ID NO: 225285 - DNA, 4184 bp, Cannabis indica
aatattatataattattaatattgaaataaatattggataatcaatatatatatttttatgaaaaatatatatttggtagaaatgataacttgtgctgaatgaactatgtaataaataatatagatgtatgtgtccttttaattttgttgttgtcatgtcatttttttggttaagaatatcatgaatctaaaattaacatgtttaataaacaggtatgaagaaactcagaacagggcaaagaaaagagaaaatacagagaggaaaaatgaaagtgaactgaatggaaagtgaacaaatgattactgttcaatcttaattattgaggcagtgcttgcatattatatattactgagtactgaagataataaaacataactaatctcaacagaattgtaacagactgacacaattagttacaacaaaaaggaataacagtcttgataactaactgtcagtgtcactcatattctcatcttctaatattccaatatcccccctcaagtgacacgggtgaacaccaagtgttaacttggatcgaaagtaagaaaagaggatgtaggaagcggctttgtgaagatgtctgcaatttggtgggtggagtcaacaaatcgaacatccagtttgtttgcaagcactcggtctctgatgaagtgaagatctacttcaatatgcttggtgcgagcatgaaagactggattagaggcaagagatccagctcccatgttgtcacaccagagtatagggatttgaaaaacttgaacagagatctcatggagtaaagattgcagccatatcacttcagaggtggctaaagccaatgccctatactcagattcagtgctggccctagcaacaccctgcccaatccgcgatagtatagccttgcaaatcaagtaccttggcaggtttaaaagtgaggccaatatgtttagttcctgctagataccttagaactcttttgcaggccccccaatgttcaattcgtggttgagacatgaattgactgagcttattgacagcataggctatatcaggtctagtttgacataagtattgcaacgctctaataatacttcgatactctgtcgggttgggaagaagtgttctagattcatgagttaacttggagtttgagcacattggggtggattgaggcttagcatctagcatcttggtgcgaatgagtagatctttgatgtacttttgttgagtgaggaagatagtgtcatgttgcttttgtacttcgaaaccaagaaagtagttaacattccccagctctttgagagcaaatttgttgtgtaatgccttaataatctgtttgatttgatgagtgtctgcccctgtgagtaatatatcatcaacataaactagtaaaaggagaagcttgccttgtttgttgctgtaaaataagctactgtcagatttggactgctgaaattcaagtgacagtagaaaattcttgagcttgtcataccaggccctaggggcttgtttaaggccatagatcgccttgtttaacttgcaaacgtgattggggaattggggatcaatgaatccttgtggttgagacatgtagacatgttcttgaagctcaccatttaggaatgcattgttgatatctatttgttgtatttcccaattgtaagtggtagccaaagtgaatattattttgattgtacaaggtttcaccacaggactataggtgtcaaaaaaatctattccaggagtttgttgaaagccttttgccacaagtcttgctttgtaggtggaaatggaactgtcagcattgtatttaattcgaaaaatccatttgttgctgataacttgagcatcatcgggtttgggaacaagaacccaagtgttgtttctttttaaagcatggttttcagtatccatagcatgtctccatttgggattggcaagggcatctttaacatttgttggttctgtatcaggatcagtagtggttaagtatagttttggtttgtgaattcccattttggctcgggtcatcattgggtgagcattctgagttggtggatggggagggttacttgggtgtgatgagcttgaagaagatgtagttgaagagggttggggaatactaggaacaacagtactgctgtcagttgcagacagtgaggacgtagactcactgggaggtggaagtggggttggatttggtggttgtggtgctggaatttcaggaagtctgtaggtgttgtaatcaatgtgagtaggttgagtatttgagttagaggtggtaggattgaacatggttggatagggaaattcaagttcattgaaggtaacacttctagcaacatagattcgaccactaggatggagacacctataaccttttgagttcaagaaatacccaataaagacacatttggcagatctaaaagacactttgtgagattcatagggtcttaacataggaaaacaagaacacccaaagaccttgaacagattgtaatctggtttttgtttaaacaacttttcataaggtgaaagaaaatcaatggtttgattaggaagtctattaatgacataggctgctgaggtatagacttcccaccaaaattgtaaaggcatttgggcttgagcaagaagagtgagccctatatcgactacatgcctatgttttctttcaactttaccttgttgttggtgagtgtgagggcaagagttcctttgaacaatgcctaaagattggaatagtttgtaaaggggttcatactcttttcctaagtcggtttgcacacttttaatttttgtttggaagaacctctcaacataagcattgaactataaaaacagtttattaactttagatttggtttgcatggggaataaccaaacatactttgtgaaatcatcaacaaagctaaggtagtatttatagccatcattagaggtatgaaatgaaggtccccatacatcaaacaatattaattcaaagggcatagtagttttattgatggtacttttaaagctgaaatggtgttgcttgccaatttgacaagcatcacagaatgagttcttgatacatttagcttgaggagcaacattggaaagaactttagctaaaaacattgaaagaagggtgacctaatctacaatgccagacattagaaaatgtgcttttgtcataaactggattgctggaagtggtgaagttgtaggctgctggtttgagaggaatattggctggtgtgcttgttgatggaaatgatgacttaggatggaggacttgaagttgataaaggccttcatgaactttaccccgaagaagaacttgcttggtgttcttgtccttaataagacaacatacatcatcaaattcaagggtaacattgttatctttggtaaattgggaaatacttaaaagatttttagtgacattagggacatgtaagatatcttgaagaattaaaggattacaagactgagtaagaatagactgagagccaatttttagaatagggagactagaaccattaccaacaatgaccttggctttgcccttgtaatcagcagaggaggtgagattttcagagttgtttgtcatgtggtgagtggctccactatcaatgtaccatgcagtggacagatcttgacttgtggtggtttgtgaaagatgagcttggggattatcagttggggtggtggaatgtgaagttggattttccattggtggtcctgtaaagttgatatcgaacctatggtaacacttcacaaccgtgtgacctgttctgccacaaagctgacatattggtttatttgatcctctacctctaccaccataattgttgttgtttgttcttccacctctactagaaccacgataaccacgacccccatagctgttagttcctcggttgttgttgttcagagacatattagcaagattggcttgaacattggtgagtgattcagaggtttgctggtttattctcatttcttgattttgaagcataaattggacttcttggagagttaggttttcagattttgaggtaagattgacaacgacagcttcatattcagctcctaatcctccaagaatgtataggattagatcatcttcggacagggaatgaccagcagcagatagagaatcactgaattgcttcattttcaagatgtagtcatctatggataaggagcctttctt

SEQ ID NO: 225286 - DNA, 10943 bp, Cannabis indica
aaaaaaacatacacagtaaaaaagataataatgccgcctgacagtataaatgtaataaattgggaaaagttagtaatttatgtaaatttcccatttgaaaaccatcaaaattcgacccgcatagagcccaaattaaaatagtgaaacttttttattgtgattgtgagagaaaagatagagtcagcggaacttgcaaagaagatgaagaatgacattgactttgataaacgacaacattattgtaatgcgtattctattcccaattacttttctcattggagaagacgttgattctaagcccgttcctgcttttttttttgggggttcttttctactcttccattaccctcctcaatatgataccgattctaaaattaagacttcattatttgatagaagaaaaagaataaaaaagagtgaattatggttatggaaagaaccccaattgggtcaactgtacgggtgttggcggcggttgtggtggtggtgctgcttttaatggtcggtaatgggtgtgaggcttctcctttcaccaaaattcgaaaccttgctagtgttaataaaccaattcacgatagtccccctcaacaggtgatttttttttttaatgaattttggttatgctttgattaattattgctattttctgaatcgggtgtttgtctattttagatttctccttcgcctagtcccagtcccaattctagcgtggatttgggtccaagtagagttaataattccgtttctccggcactgggctcggtatcttatggccttaccaatgagaactgcacgagctcgttgagaacgtgcccccgtgaaaatcagattcatatgactgcttgcctgttttcctcttcaaatggtattgattctgatgttttatctatgtttgaaggtatattacatgtttggttgaatgcttgatcaggaccaggtttctaattttaggtttccattaaaattatggtccattttggatcactcacagtgataatatgtagtttttaattccctttcttctgttggttggtattaactttttggggtcaagccactttgtttagtcttttagtgatgacctcatgatgttatatacagttaccagtaccacatcttaggccctttaacgacgtgggtgttaatgtgagtcggcattgagcattggctttctgctgatggagtcaataagaataacgatccttgtacataatagtaagttgtaaaatgttaatgaccatgttaacatctgtgctcaactcgattgataaaagtttgatcgttgttttgaagccattctcttttgatctttctctaatctctatgaacatcctccattactgaaaaattctcagatgtgggtaacaaaaatttgtcaaacacggagggattttgtaatatcattagttgatttaaaaacaactaaacagaactttgaagaattatttctttatgtttttgaagaacaaaattttgcagttaaaaaaccccccaatactgattgaaaggatttgtgaggaactcgtcatatgtttttcttttttcaatcataagcagacttacctcgactaacactagttatggcagctaatgctttggactaacatttcaaactttgacttcagcagtgcccttatgtatttgtgtctgaaaaatatggttaatatacgatgattatctactttaagcagcaagaattacggaactttgataatttgataatcacttcaggcttttgtgatttgggttaatgtacttgatattttgaactatttaacactcccaaagcccagcgatcgggggacttaggttcatgtttgctctttctgtgaatttataaatgcaattcttaatttttcattaatgtagtagtgtatacttgttcatggtggtacattcggaacttttgacaccaggtttccagattttgagtctctcaacttatcttgtgaatatgtctattttttcggtgatttgtaatctataagaggcaaaattgtagtctcctggctctacaattagtctcttttaggccctttttgaaaaggaaaatcttttgcttagttactatagataatggagttttgctataattaagtaaggccatgattatttgaaaactttcagcttatggtgggttccaacttacagtaagcatgtgcatatttaatcataatttgctggtaggatagaaacacaaacccacgagatttgattacatgttcttttcaccatgatagaaatttgcaaaactgattttaaaattcactgccttaatagaaaactataattgaaatttagtgtggaccattcgtctgtttcatgccatgtcagacatttgcagtaatgcctcctagtttattactcaattgtaaacagaaaaaggactagttccttttatattgctatttgtatgtctcactctgtaaattggaataggaaatataactctgtaaagcgccagagaaaccatgggaattcatcctgattgatagataattgtactgtttcttaaaccgtttgaattgtcagctcaataatgctgttccttttcctttgtagccaacatggagttacttcttcgtgttcaaaatgatggagggagccctttggaagtaaatgttacaaccagtaatactctgaaaaagatacaaatacctgaacatcacattaaagaggttcgtcttatggtccatattgatataatgttctatgcccaatatgaccttcatgtgaaatgaattagttcatatttagttgtaggacattgaaagagcagtgtgtttatggaaaggttttaacattttaatttttaattaaacttcattcccattctttgtaaaaggacttggcttgatgtctggcaacttttatttcggactttgatcattgattttttatgcatgatttcaggtcagtatctcagatacaggaaattcatcagtagaactaaatgctggaaatggagcatgtataattcacttggaattacctgctcttgataatggtttccttaagcatgataatggttcccttaagcatgataatggtttccttaagcatgattatggtttctttaagcatttctccaactacaatgattatgcaactccagtcaacggagcctactttcttttctttactgtactgattattggaggcatatggtcctgctgctgcttgttcgggggaaagaaacggcgcactgatggagtcccatatcaagagctagagatggggcattcgagcaacggccatgtggaaacagaagaaccttgggatcaaggttggacgatgattgggatgaaatcaaaacagtcaagtctcctatggctcaccgcaatgaaattgtgtcaactaatgcccttacttccagatcttccgatgcagatggatgggaaaacaattgggatgattaggatgaaagctctcattttgtgtccaattcccagttaagcatagcaaatcaagaaggttatacttacagaaataggaaaactttcattattcattttcatacgtgtgttctttagctcaagctaacacctgaggattagaaaacagttttggtgtgtggaaatttagtattttcattcaaaatccacgagagactaattttcaacatttgtattcgtatttgtattgtatgtatatattttgtgttctctttcctacaatggaaatatggagttcttaaaattaaaatttgtatttccaaacatttatgctggattttgagtgagtttctactttctaggcaaagagaatgacatacaaattacaccattacaactgatgcattttattaaacaattattgtatatatatacatatcataaaaagatggatagctcagaaccaagacaaagcttttctatactaaaacaactgtcatacttggtatgagaatgagactaaggttttctttactaaaaatacattcgttgtttgagtgggctcagttccactttaaaaacataatggtggtgtccacgctgataattgcaacttttccacgttttcttcggaataaagataacaaaaaataaaggaagaaaaaaaaaagcttcaaatgtcgctttataattatccaaaaggaataaaatttcaaacataaatttactttataagaattattgccaaatcaaaaagtggggaaaggaatttgttggtagaggtgcaagaatgtgcatggcgcttcccactcgctaatcctacgccatatggtatgctcccttggaatcactgctaatcaaagctttattttttaaaaagaaaaatctcattaccaaaaataatataaataataaaaaggatgaccatggaaactctttctttagttcttacaaacatggcttatctgggattttgattttgtttatagtactttaaagctttaataaataaatatagagacaactagaaaagccaatggttggtaatatatattcaatcaatcaatcaatgacaaagtaggtacttccttctgtcaatccagtgatcaagggactctgatattccttttcctatgcccaaaggaaagaactttaaagagggtgttatgaaatgaaaggaggcatgtgctagtttgtgaaaaataatgccaaattactattagttttcttgggccccaaacaaaatgtattataaaatgtaactgggttaccttgggagcaacctaattaagacaactaatcggagtccttgtctacgcacatggctactatagccgtgaaaatcttcttttcttctcattcttcttcttcgaatccctctttcctaggtgggtttacttttttacatataaattaacaatacataataaatagtaaaaggaaaaccaattacaagacgtgtcaaaatcgatgataaggaccaacgggagaatatgtgggacagtgtgtgctaaactatctactatctagaagagactatcccaaagtttgctgaactatctagaataatgctaattttggtcatgattatagccagcaagttttacccgcccaatacattttgtatgtcgatttcataagaaataaatcaaacaaaacaaaaaaaggaaaaggaaaaagagaaagatagagttgggcaattgttgcaattggtatgagtaaaaggaaaaggtataaaaatgtgtttagttagtcttcatttcattggaacaataaaacactagggccatgttatgttttacactatcggctttagctttttactatactctactgaggtaaagattaaaaaaaaaaaaaaaatttcttttcttgtaagaaccatttttttttctcatacaagctaccccacactatactatagtcaccccaagtaaacaatgtgaaaatcgaaacataaagaaattagtaaaatatttaacaactggtgcttctattccgacaacatattctatatttttctatttgcatgatgccatgctatcattatatgtaaatatatatatatatatatattctttaatatttctttccaccacactaatgcccaattccccttgtggggtttcaccctttttattatttaattttctcaattttctcaagactatttaattccttaaaagtgggtgcagagattcttggggtctccactggctcttgagtcactttttgacattttgaatatgatttgaccattagcaatttacgaaggtcatcgcattacttgggcatatgggacaaggtccgtgaatttgaagggtaaatggtcatttaccaaattgtgcccttcgtagagaagtactgtacattacttactctttcttcaattttggcagatatgtgagagaatggtacgacaagcattaaatggggtgttttttttaacaattttataatgcaagttaaaggctcaacttcctcgtgtaaactatcacatctgtctgaagtatatgaaccaacaaaaacaaaaacaagtacattcatttttggtagactccagtaaacgaaactgaaacataaatccaaactttatgaggagtagaatcagtttagcaaaaaaagaaaggcataaaactaagacagatataaataaaatacaaaagattagtagcaaatctaatctaatgagaaacctggtgaaggggaatccggctatctgagatagtaatacaacttatacaacacagtgaacatgaatgaacataaacaagtgaacacaagaagaataggataagaaaattttgtgaagtgtttcttctctaatctattgatgtaagaacgaaaaccggattcttcttcgcctgataaccggataaccgattgttacatccctttcaatcaatcttttaagataataaaactctaatttgatgatcccaactcttcttggtcttctgaaggacatctgatcagttccaatatattaacaacctcccccatgtccggtcgatttgagggcacttgcgaggtgcatatcagacccaatttcatcacaggaattgcctcttcggccgggaaattcccttgcagccttccatcaacacattcctcaactccgccttcttctaatgctcctctaaccatgtcacaaagcaccacaacgtcatcttccatgtactccacaggccttttgccagtaaccacctccaaaatcaaaaccccaaatccgtaaacatcacatttctcagttatcttcactgttttgcaagcaaactctggcgccatgtaaccaagtgcactctgaatcttgctgctcaagacatagcggtcaagcattggcaacaatctcgctaggccaaagtctcctactttaggctcacctgaactgtcaatcagaacgttgctagattttatgttgtagtgaataatgttaagttggtgcaagtgagccaagctcttagcagtaccaagaattatgttaaacctctcattccaggagaggacattcccaccaggtccttcatggagatgcttgtacaagctaccaccagagacaaattcggatatgaggagctgcaaggatggtgtccaatagtagccttcaagtgctacaagattttggtgcctaactttgcccaatttcttaacttccctttcaaactctccttgggacttgactagacttgaaactgtgagcttcttgattgcaacagggcgaccatcacgaagaactgttctatatactgctccaaacccacctcggccaagttcgcaatccttgttgagcagagcatgcgcacctgtgctgaagtcagggtcacctgaaaacatcacaagcttgccagaattgttgtctgtagtaggggaatggctgaactcatcccctccagaaaatgtgagcgctgcagctgatcgtgatgagtaagatcggacacgaagattaagtacagtgatcgcaatcacaccaataactatgacagcagctgcgccaatagcaatgagagcagaaatgctgagaatgattcttttgtgccccatagttgtaggtaactccccaggagcagaatctgatgaggagttgggattaaggacaatgggtttaggaaggacagcaggacaagacttgttgactgcagagccacaaagagatgggttgccggacacagagtagggggatatggtgttgaaaaagccaccggctggcagttcaccctggaggttgttgtgagaaatattgaaggacatgagattgggtagattagccaactgttttggtaggcctccagcgagtttgttagaagacaaatccacattttgaagcttcacaagtttagccattgcagcaggtattggaccacttagcatgttctgtgataggatcctacaatgttcaacagagacaatatagaaataaagaaaatgttaggattctatttaaatgttttcttcaaaaagaactgaaatcagtaaaaagacctaaaaaatgcctatatcaggtaacaatgatggatatttaagattccacgccctcgtgattttcaatgccaattcagtaagatatatatttacacttcttcaaaagggtaaacactaaacagcatacgattcataaaagggcagaaaattatcaactatcaattttaaacccaaacattcatactatcaaatatcaacattattaggcatttcaaatccacaataattcatccaatgatttttttcatactaatccgagtaaagaaaatatgtaatgcaattgcaaccagagtctaccaacttttcgatggttggaaaaccagagaatcaaccacttttaataggaaaccacctaaatggagaagcaacgaacttagcgggaaaaaaaaaggatagagaaaaagtgaacctacaaagttgttaacgacgagcaattctcaattgaagttggaatttttcctgaaagcttgtttttctcgagcctaagttccttcagggacaccagtccaccaacttccacaggaatggttccattcagttgattttgactcaaatcaaggttgtccaagaatttcaactccccgacagtcacaggaataggaccaacgagagagttattggacaagttcaacgctttcaagctgctcaaacccccaacagttgatgctatcttaccggaaaatgaattgtgggataaatccaggacttgcagaaattgaagcgcagtcgtcgttaacaaagtaggagtattcatacttccactcatttctttcccggtaagcgaaaccacttgtaaactcgagttgaaaatccatgaaggaagatcacctgtcattgaattctgactgaaatccaaagacattaggcttgtgcaagaagccagggactgtggtaagctcccagttagatcattggcagaaaagttaagaacctttagagattgaagatttcctagagaacttggaacaagaccggaaaatttattggttgaaaggtctaaactctcgaggctttttagttctccaatccagtttggaacgttcccagtgaaagagttgccgcgcagatttagattattgcagagggaaagttgctgcattgtctctgggaggctaccggaaaaggaattctcgctgagatcaatggacctcgcaagcaaacaacttccaattccatctggaatcctcccagaaaactgattcttcccaagattgatagcacgcaaattgttcaaaccttcaacccccttgggaacttcaccctccaacagattgtcagacaaatccagcgatctaagcccattcaaagaccaaattcctgatggaaacgacccagaaaattggttagatgaaaggttaatcgaagcaatggttgaacatgagctcaagttctctgggattttccctgaaaacttgttactggccaatgaaagcactcgcagagacccgcattgtcgaaaaaaatcctcggatataactccagagagactgttctcgctcaaatcaagaactctaaggttatcgattcgtgctatattggggctaatggttccggtaagattgtttctggccagtgacagcttcctgagaaattccaactggaacagccctctgcctatccgacccgaaagagagaacccgtcgaggttaagctcagtgactctcttggatctggggttgcattttaagcccacccaaccacatgggctgtcatcatcttcgttccaagtcgcaagctttcccttcggatctcggatatcggccttgaacacaatcaaccccaaaacgtcgtcgttcaaggaagggttcagagatctcacgtaaataggagttaagacggcaagggtgaataaccagaggaaccttctcatacttatatatgctggcattgttaaatactctcaaagacactgcaaatccataaaagatattgcaggcgacacagatgacccaaaagcctaaattacctttacagttagcttcaagagctcaaaactgtcaaaacaaacacttgaaaaaattacttaacaaaagaaaaaatttggaggaaaacaatcagaaaaacgccaactttctttaacggctagattcggaaccgcccaaaacaaaatacaagacacacccagatatggagtagcaccaataaacaagaaaacagcaagctttgtcaaaatgacacaccctcaacccgaaccccaacagcccaaaatggcaaactctgtatttaaagggtcaaatgtacaaaaccctaagcgaaaaaagaaaaagtcagagctatagaaagctccaacggtcagaactggaacaaagaagaaactccgaccacacccgaacaaacaaaagcggctagcgtaacagtatacaaaggctcgctggagagtggagactacttccctcgccggagctcccactattcgtcgaaaacacaaactcgacaccggaaagaaataacttagtctgagaaaatgcagggcgggaatgcgccggagaactcagaaaataacctctctctctctctctctctctctaaaaggcagtctgatctgagagacgtggggcagcagtgttgggtgtgaactctgaataaagggaaaaaattaaattaaaagcgctttattaacggcaaagcgggaccatgtaggtagctgggagggacagtcaatttaatgggacaaattgacacgtgtcgtgatctaaacggcgtgattatccgacgtggagcataatgtggtcgtgtcagatcttcttttgacgtggatcgcagagtggcaataatgtggagcccgaggatagggattgttttgtgagtggggaatggagttgggaatcaccccctgggattttattaaattacgattttgacattcagataacgaaatatgacccatattacggatgtcgttgaaaatacaaataaaatgaaagaatatgaaaatgaccgccttacccttctttgggaacaaaagtcaaaagtggctctaatacatagacccataaataatagtgtctatttcaccgctatttttcttgagattgagattgacctttccctagttttgttataataaaa

SEQ ID NO: 225287 - DNA, 3538 bp, Cannabis indica
tattattattggttaatcggagagcttcttgtgctaagtgaagttcaccacgaagcacaagaagctctttctcgagctgtttcttctcagccagagcagcatcgagtctatattggagagtagtacaatccacctccagactctgtgttacgccacctagcgcgcttgttttggtaccacactgccacctggcgcgctgggatgcccagctggttagccagctggtgcttgtgctctgactctagcttcttctcgtagcagaagtttctctcgaggactctcacttgttcgtcgcttaacctcttcttgttattttgactcatgttttgccctaatactataccttcttggttttctccttgttgataatccatcaaataatatatagataaagatatagatatatttaaccccctttttgagtgtagtaagtgagagagagagaaagagagagagagaagtgttcttagaaggagtttttggtttggttttgatgagaataatatgaagggaattactttagagattcaaatattggtttatataataatttgcatgaggcctttgttttcacgtggactggtcctacataaaagagtaatatatatataaatatatatataatataatatattatctaaattatatatataaatatgtgtatattatataaaaatatatagcaagtagcagcctatatagctagccacttaaccagtcagttttggctttctttaaattcttgatcaatgttcgatctggtctccttttcatatatatataaatataataaaaaattaattatataagttaaaaccaaataataaatagtgtatgaatatatatatataatcagattttgaaattgttgaaaatctctctctgtttcttttagtagaggttaaaaagtcaaaatgctcatttaaatattaaaatgtgattaattaattaattaattaattaaaaaggaaaacttcttattaagagaagtttctttcaaaagaaaggttaattaattaatttattttgtgttacacggccgcaagactagggtatatatgtgtacatatttttccttttttgactatatttaattaatgtttttgttgcaaaatatttcaaatttaggttagaacttagaaaatattaccattcgtgtgtgtgtgagatcatgaatgtggtgtttagtaaaaattaaaaactcactttatacttaatttcaaagtaattaagtatgtatagtatttatagctttattttagaaaaaataacataaatttttatttttagtaaaaaatttacacttttatgttttaaagtttttttttttaatttttataatattttatatagatacaaaaaaactacataaaagttcgaaaataacattcaaacaataacaatataatatcaaaatagcataaaaaaataatatacaaataacaaaaagcaataaaagaactagacatacaacataaaaatatatcaaataatacgttctaactcagcgttcctacgttgtgcttcattcaaacggcgtctcaggcgacagctttccgtttcataagttctttctcccacagattgagcacctccacaattgagctcttcatccctcgcagttttgaccattcccacactgagttctcctcgagcgtgttgtccgtgtacatttatgtaaataaaattttaaaaatatatcaaataattgtataccaaataatatattagaatatataaattttcccctcaaaataagtaaatatgtatgatatatatcaccccaaaatttgtacaactaatttgaccaattaaaccaaaatatataaaatatggagatgagttgacaccatataaatcttaatttcttgattcttgaactagaaaagcagctaaagccaagtagaagaagaacttaattatatactaattaataatattttttttttgttttgtttttctttccataattggaatgaaaagatgacaactttgagaaagttttgaatattctcttgtcttttagcagctgtagaaaattgaccactatttattttgctctatatgctttatttaatataagcaatgatatcatgatctatcaacatataacataattatttgcttattaattagctattagaatatttcgggcattctattttgtaaaaaaaaaaattaatagaccatttattttattaaataataaattagaccttgtaattttaaaaataatataaaataatattttgaactgatttttttgttgaaataaaagttattataataactcaatctggaattgttatgataaaactatgtacattttttacatatatgatcgcactaaaaattatcttcaagttggttatgttaaaaaagaatatatgaaaaattgagctcatgttattattactacaaaaaaatttacttttagtcgcaataaaatttataactaaaagtaaaatagttgttactaattataaatcactatttatatattgtgactaaaaggtccgtggctaaaagtattagtcacaacaatcaaaatttattgtgactaaatgtatttttagtcataatacttgttgtgactaaaattaaattagtgacaacttgtattttatatattatgttttagtcacaaatgactttttgttgtgactaaataattgtcactaaaaatagttggtttttatagtgtatttttgtacaattttaaaaaatataaaatctaatttatcatattacaaaataaataatcttatcaataatttttacaaaatacaaaatcagtattaaccttatatacacgtttatatttatcgatttcaacaaaagattttgagccttaaattaaaataatatttatatatataaagggtttgtttgtatatgtgaccccattaattaattaagcaacttgtgtatgataatttattcatgtatgatgtaaaagatgaccaaattaaaatagtttgattgtgacatttaattttccaaaccatgaacctatatatacactatatttatgtattgcatattaattggggaagatttatttgaattataattaaaaaaccaactccaactagctaatctactacaaacaaagaatttgaattgaatattctaaatacttaattatatatattactaaactttttaattgcaataaattaatttgatattaattagtttatacaattttttcagtgtgtcattaaattatcatgtttaatttgattaaaattatgattttcttagtaccaaatatatataaatatatttttttatacatacaagatacctactaatatataatgaataataacagaaactttgttagatacataggtgaatcaatgatcctatatagtacgttgtttattaatttgatcttgttagttattatttaatgctgtattttgggttacaaaataacctactttattaattttcatatgtatatatatattgcacagcagccattgtcgttttctaattctaacattatataaatatttattctatataa

SEQ ID NO: 225288 - DNA, 3661 bp, Cannabis indica
tatatatatatatatatccttttcgttatcatttcgactttcatggccgactttcaaccatacttacttttcattatttaaatgaaagagtgtatttgaccccacatgaaactatatacttggaatcttggaaaactgaaaaggaataagcgagcaaaaagattattagctagatagcttgatggatttttcgaacaataataattgaccattttgaatgatatatatgtgtgtgttagtggccacaatcattgcaagcttccacatatatactacaatgcaatactatttggaaaattttattttgtgtgttaccaaaatattcatattaaaaattagactccaaatttgtttatatatttttattcttaactaattaataattaaaaaaattaataaaaagaaaattaatcacatactcggctctctctttctctatcactactctctctttctatcactcggctctcctctctctaacactctctctcaatctctccgctccctatctcttgacctattttggtggacgactggaccttatcatcgaaaagaatcacatatattcacctcaataacgagtaagtgttgttcaaaaaatttcttaaacatttagattagtatgtagtttatttttaatagatttgtgtggttattgtttacatggtgttattttgctagttttattctttaaaatggcaatatctaattttctcaccaaactgagttttttaataaatttggatgtttttttcgattaaatatcaatatcttctcactagttaaagtaagatagtaagtgatgacaattttcgacacttcttcaatattggtatatcgagattatttcgacaattattgtaccaaagataaggctgaaaattttcgataatttttcgatggtatatcgatacaatttcattccaggataaaaatataacaaaaaatagccaaaattaatcacacatgacagaatcatcaaaaactcaatcgatgtactatcgataaaccatcaataatcaattaaaatactaaacaaaaataaatgtcaacctgccattgatttactatcaataaaaccatcaaaaaagtgtcataattttttatggtttatcaaaagtaaatcaatggtatatcgatggcaggctggcattcatttttgcgtggtagtttaattgattatcaatggtttatcgatgattccgtcttattgtgtgatcaattttgctatattttatcctaaaatgaaattgtatcgatgtaccatcgaaaaattatcagtcctaaatttggtgcaataatcatcaaaataataacgatataccatcaaaaaagtttcaaaaattatcatgatatcttacctttttactctaattattgagaatatatcgatatataatcgaaaaagcatcgataatttgttaaaagacccaatttggcgagaaaactagatctcgcaatttcaaagaaaaaatcaacaaaataataccaatgcaaacaaccatacagatttatcgaaaataaactacaaactaatctaaatgtttaattaaaaaattatttgaataatacttactcattattgaggtgaatatatgttttttttttttttttattgatgaggtttggtcgtccaccaaaataggtgaagatatagggagcaaagagtgttagagagagagttgagtgagtgagagagagagagagagccgagtgatagagagaatgctaagtgagagagctgatagggagagagagtcgagggtgtgattaattttgtttttatttttttttagttaattaagagtaaaatgagaaaaatatgtaaataaaagaattattttgtataaattaattaaagtctaatttttaatgtgagatattttcttaaacatacaaaataaaattttcttatatatatactccttaccggtttttttttttgggagggaaggatagtactacaatagtaacagtaggtagtgatcatgttttcttatgcataagtattatatatattcacttaatttgcgcttaattttcaattatctctatatgtattatgcatgcaatatctattatgtaaagataactaatactattgtgaaatttgacatatataatctgaatacttccttcatgttaggattactttattatattccttgaaactcttcccataaactccctttagtactccttaatttgggtgatctctaagatattgcgttaagatttttattctcttattagtctcaattattacatatatcactctaaaagcagcaatttgcgactaaaataaagaatttgtccaacaaatcatcatgtataattatatactatatatcactataattaaacgttgtgatgaatgatagcatattaatttcgataataaatgcgacttggtagaataaacttaaatggttatttactaccaaattacctaacatgtactaccaaatattttactcaagtataaatggagttcggcgggttttgggttttgggtcgggttcggcgggtttaatgtggtcgggtttgggttttattaggctaaatccgaatgattcatttttgggcccaaataaaactacttgatttttaaaaatagtatcttttttttctatttttaacatttttttgcgctttattgaattaaagtatataagtttaaataaaaaattatattatatgtaatataaattataatttatattcatgtacacgtgagtcaagcgacgctctggtacaccgaaatgcacagtcttgcatacagtcggcatgtccgccaatattatgtatattcaaatgaatcaaatcatgtatattgaaatcgatggttatagccgctatgtatattcaaatcccattaatcccattatttctctttagcatgtttcaaacaaacacagagcaaatatataaatccaacatatataattaaagaaagaaagaaacaatgaaatatgaaggttgacttaaatgccaatttttcatttggaaaaactaaaaagtaaggcatatcaaaattggatggcatatatatcacagtctacgaaagtaattttgtactgtttgggtatcgggttaaaacccgactaaataaatgcattattttaaaacccgaacctggcatctgtgttgagtattttcgagttagacccgacctgaccacacgggttttaaatttttcggcttttttggcagcggatcgggacgggtggttgggtttttgaatttgcgggtctagatgttcatccctagtatatatataagtatagttagaactagatgaagaatatataaatattttagcacaagattaaatatttttaaccagaaattttatattaaaccaatcatctaatgacaaagttaatggtagacacgtagagttagtgggtgagtgagtcagtggtagaaattaagaagttttttcacatttacaaatttttacggagttccacaaaaacactctattgcaactaaaggagcaaattaaattgcaatcaaacttcgtatagcaacccatataaaaaccaccagagaaataacttgaaaaactcaaatcgtaaatttaaaaaaaaaaaatatattaaaaaattgtatgtggggtaattctcttaaaattaattatgtaggataataattaaaa

SEQ ID NO: 225289 - DNA, 4902 bp, Cannabis indica
acacagagattcatcaatattactaaaggagtattaattaagttaattaaataaaaaataataaaaataaatataagagatttttatgtgatttaagttattaatatatttagttcacaaaagtcaatatttatatttgtgattacaaattcataatgagttaagcaaattttttgttatattttgaattgtactctttccttttgtcagtacggcctctcttatatagaggatgtaattatttccttattagagtcttacatttaattagaaaagaaaaaaaaaaaaaaatcatatatagaatgtataagttattcatctcattgtcaataaattttgaaatggaatcctatgcatcttaacctacacatattttaccaccacactttcaaattctaatattgtatcagagtcaaataaaattctagcgagtatccgatccaaatccaaaatttcaaaccaaaagagctactatgagccaaaaatatcgctggtccaaaaaaagatgaatcaaaatagtcgcttgtaattttgtgagtcaaaagtgtcacttgtgatcgagccgtctaagaccggtaagcaaaatattgtcaccatttggatgttagagagtcacactgaaacaccctactaatttaggcacgctacaatactttcttaattactgtgcactcatttgttaatcaaagggttaattgaaaaacgtgaataattaaaacattcataaataaacttaaacttaaaaaaatatatacatatacatatcctgggaccccattttaaaagttacatttgttaaaaaatacatatgctacaaaagttggtgcctagcgactactaaaataaggcccagctatcttgaagatctgaacactctaagtttaactgcttcgatatatacaatcttcatctaacctgaactcactgttgctcaacttttttcttacatttacctacacatataaacaatatttgtaagttgacaaactcaataagaaaaatataaatatataaccagatcgtaactagacgcccgtacacctaatcacgatcttatcccatgtccaacttatcccgtgtctaatgtgtagtaagtctgaaattttcgtgcgacaaagcctagcatatatctgtcggtatccaatgcaactctatgtacatcgacaccactcttgctaatatgccgaactaatggctttagaattttcttaacatatatccgttagtattcagtgcaactctatgtacaccaataccactcttattgatatgttatctaataggcaactaaaaacatgaaggctaacgcatgtaagcatgcatatcaatagactaatcttacctcaattatgaatttaggtgtgttggtcaacttgagtggaaactgctgctcaacgatttaagaccctaactcacaatttacataaactggtaagtgacccgctaaatcacttttgcgtacttagactcaaaactaaaagttttcctatcgataattaagtagcgtagatatactctaaatatcgaaaaaatactaaaaatgagactacaagaaaaattctcaaaacaaaatgcaagaaaacctaccttttactaagaattccaaagagaagaaactaaccttggcttgtaagcttgaattctaagttgaagaatatccttgaatctaggtctaaaaatagtggaataatttatggtttaccttgtttttttgggccaaaaattgaggaaagagaaaggggaaggaatatattttttatatttatcttgtttttaattaaattgtttgttttattaaaataatatcatcatataacctttaagaaaaaggttagaaattcactaaaaacaaacttccaataactaagggaaaataaccattttgccttttcttcaccttaaagcgacataaatgcctcgaggtaatatgatccaaaatcataatcctaaataacctgacattcaaaatgtttaactatcttgccctgctaattctaagatactccaccgtatttaagtgactctaataaccaaatcgtcgcattctactattaccatgcaaaaaaatgtgaaaaatataaaatttcatataaaatacataattcacttagaattcaaatatatcttcataattgaaaaattattaatttaaagcctatttttgacaataagccttaatatctgttaagcggaatataataataaaagattaagtaaatctctaattatctactaattctcataagattaagtaaatccttaataatttactaattatctgttaattgtaaatgtatgaaaaaataatatcatatatatcaaatgtatatagctataagctactcctctttaattgattttgaaatgtaaatatcatattacatgtttgaaatgaataaagtatattataatttgaaagaaaaaaataggattttggtagttaattttaaagaaactatttatggtatattgtaaaattttgatgtaaaataaagtaaatggagttttgataatgtatttcaaataagagtctcaaacatcaatgccaaattcttgtagattatgtttatgggtgcttctacaatgcatcatttaaaaatggatctactaatgcagtcgctatctgtttcatctaaatttaacacgctaaaaataggattcaaacagtctattgcacgcgagactcttttattttatacgtgtgtataatacacagtttgaagcctattttcagcgtgtgacattttttttttaaattttgtaggatgtcttaaataactaaaacgtagacgaccataaaaaaattggactaaaaaattatcctaaatgtcaaaacagataagaagtacatcgataaatcccttttaaggggtgcattgtaaatttttttaatgtttattatttatcttagaaggttggcttgagaaaaactgtgaacatttaggattgcatttttggtttttcgtatttatgggtttatgatatttacatatttgtggggaaatagtaaatattaacactaaatacagtagtctagataaaacaaaatataaaaaaaaaaaaaaattatataaagaaagaataatttgcggtcaaactccttgaatttttaaatttggtacggtttaactcacatatttaaaaaattatagttaaagtttttagactccacaatcgttttggccagcactttctgttaatttttggctgttaagtgccaaatagacctatcaagggtacacgcggcgaagttttattagatcacctaatattaataataaaaaaataatttaaaaatatgaaaagttaaataaattaaaatatttaaaactttccttttttttttgttcttcttctgaactgaaaaaaaaaaaaaaaaaactaactcttcatccatcccagccacctcccaaccaataacatattatcagataaacatccattaacttccaatataattttatacccacagcaactcagattagagaaataagttcaaaataacccccccaaattaagactgctattattcgaactcaccctagcactgtatgtggtgatcgatagtggtctgtggcctgcatgaatgatcatgctatagggaccagtcgtttggatctcaccaagaaaggaggtagagcgagagaaagatgactgttcaacaatctggtgttgggttcgtgggtctcatcatttgggtttgggtttggcattccgcctgcactgagagagaggaacaaagagagaaggggattgataaagagctaggattttttttttcaattcagaagaagaaaacaactaggaaaattgtaatttattttttaaatattttaatttatttttaatttttaatttttatttaattttcatattttaaattattttttttttatttttcaaactattaatattagatggtctaataaaatcttgtcacgtgtacacttggcagatctatttagcacttaacaattaaaaactaacgaaaaaagtgctgaccaaaataattgtagaggttagggattttaggcataatttttttagtatgagagttaaatcgtaccaaacttaaaaatccaagaaatctgaccgcaaattacccattgaaaaaaatattaaaatgatactattcatttgtgagaaaaatagttcactccaatacattttgccaatgatgactaataaattttaaatcgataaagtttgtttaaataataatttatatttttttattacaataaaaaaatcgataaatgaatatgaatgtgatttagcaaataagaacacaaaaaaattatagaggttcagctctctgattacagtaatagtctactcctattttagttgtattacttgtgagaaaataagcaaataagttcttcatctctctcgaaagcttacagataattcgaaagtataagagctctcttgaaaaatataatttggatccctaaatagtgaaacgactccactatttttagggagaaaaatacatcaattaggtttcccaaaatacataagaaataaaaatagaaacatgactacgttcctctcttacataaacagcatgtataaatcccaccaaaaaacgggaattcaattgaaacaagaaaaggaaagtatctctaatactgcttcagtcgcatttatctcgatcggtgtatgtgagcttgctgcgagaattgaggctggtcgtaaaattgcatttaccgtatccgaatgttccaccttattcttcagataaattatttctagatcataaatcactctaaatagcatactgaagaacgtaccacccgtccaagtcttaatatgttctccacgtgtcacttagaagaacgccacgttaacctgtgtagaatttgagataacatttaccccacaaatttgcgtgtgaac

SEQ ID NO: 225290 - DNA, 5811 bp, Cannabis indica
gattgtaacaatggataatcataatgtatttatatcttggtacatatagagcgtcctatataattgagagtgtaatttcgaatctatagtgacgcaaagaggaattaataagttaggaatttattttgtaaattctagatctacttattggaagctcggttatataggcctatgttcccttcactagttgagataatattgcttccagactcagttaattggtttcaattaatcaattataattctaaaattagactatgccttatttatgaattttcactaagcaagggctcaattgtgaagaaaatagattttagggttaatttattaattaagagactttgtgtggtctaattaataaataatataaatggtaattttatttgataattaattataattattaaataaatagttttaccatttatagaattaaacttggaaaatatagtattactaaaataagaataagtggttgaaataaagtgacaaaattataactagagagtggtccacctagtggccgaccttagtgtgtaattttgcccaatattttattcttttttaatccatataattcaaacttaagccctagttgaaacactgctctcatctcatccaattgattttcaacctaccaaatctagtttctaactgtgtcagacaactagtagatgagagacaccttctatacagttttcgaaccctccttcattgttcttcaaccaattcgcccataatgatagagtgtcatgcccacacataacaagtcaagtactcaatcatagtgcgaaagatggtggtaacaaaacccggaggagagaaagagatccaggctcagatcttgataatactttgtgacaaaaaagaacaagggttagagatctaagcggaaatagtcatattattttgctgcaattaatgtaagattttctgaactcttatgtgtctaattttatcgtattagagatattcatatttaggatgttaatcaacatacttgttagtaaatttagatcccggtaaaatattcccaacataaaccctaccaacactcgtacagtagtagtacgtagtgcatgtggtacagcggtcgtaccttagtaacgaacattcttactcatttgataagccttgtggataggtgtatgagcgcctaaatacaagtcggcaatatattatatgttatatgctttttttactgagtttgaagctgaacaggagtgagtttcaagctcgagggatgattgcacatgtcgagacggtgcgacctggagtgttcggtcttgtgacaacttaggctgtattttgtagttgctgtgcatcatgtctgtacaaattatttttattatgattgtaaaagtttaaatataggatcctcgtttgtgtaaatatatatatttataaagttcaaagttttatcaaaaatttaatttgacataatttttaagaaaaactctttgattagcaaaggtggcaaaataattagaaaaatcactgtagcgcgcctaagtatcagggcattacaatctaggtgttgctcttgtttcaaaaattctcaaaggcagtgagaattacagtaccagaagaagggcaatgttgattgctcttgtagctcgagataaggtcaaattcatcaatgggaagctttctcaattcgatgatgatcacgaagactgtgattgctggtgtagatgcaataacactatcatttcttggattttacatgctatttttgatgaatttgcagatagcataatgtaccatgacaatgcagctgaaatttggacaaagttacgtgagtgattcaatgagaagaatgctccatgaatctttgaggctaaagagactatgcagagtcttactcaaggatcgaatactgtgactacttattacactcaattgaaggctctatgggatcagatcagagagtatagaccaaaacctatttgtacatgtggtgctatgaatgtgatttaagaatatcaagaggaggatcaattattggaattcttggttggattgaatgattcttatagttttgtcagatctcagatcttgatgcgtgatcctctttcaagtgtgaacaaagaatatgccactgttgttcaagaagagagacaaagaggattcactaatggatacaatagttcatcagatttggacaaatcatcatcaagcaattctagacagtttgctagatctattcaacctttttgatcaaagtgaaattgtacacattgtggcatgaatggacacacaattgataggtgctataagctgaatggatatccccttggtcataagcttcatggaaggtttcctaatcgacagtgtaaaggacctccaaggaagtctgctggtgtgatttttttaggcatggatgaaggaaaaccagagaagatgccaatggagagatatcttatttctagtttttcaggtgttgaatgtcagaaactcatggcattacttgctcagaaaaccactgagactaacactcctaattcttctgatgaacaacctgtagtttctcatttttctggtaagaattcttttgttcatagtaccaattagatcattgatataggagccacacgtcatgtgtgtcctaatatttctttgttcaaaaacacctacattgattctaatctaaaaactgttcttttgcctaatggtttatacactaaaatatcttggctaagaataattgttttagttcctgatcttgttcttgaaaatattctttatgttccctctttcaaatacaatttgttatctgtcaattctttaacagctacaactaattgcactttcttgttctctcatgaaaattgtgtcatctgggacactttaaagaccgaggtgattgggatgggttggcaatttgtattacttaaattgtaatcagatcagtaattagaacttttcttctatttccacttctatttctcattcaagagtttcaaataaaacagtttggcactatagattaggtcatccttcttgtgtaaaaactcatcatttgaataaagctttaaagtttcatgctaattctaatttcctatttcattgttccatttatcattatgctaagcaaataaaattgccatgtaatctaattacaatattgttgaatttttttttgatctaattcatgttgacatttaggtactttatcacaattattgatgattgttctatgtgcacctggattaatcttattaaacaaaaatatgatgcaaaaattgctataccttagttcataaaattagtttaaaaccagttcaacaaaaccattaaaggagttaggttagataatgctaaggagttacaattcaaagacttattcagtgaacttaggattataaattactattattgtgtccaaagacctcaacataactctattgttgagagaaaataccaatatttactcaatgttgcttgagctttgttatttcaatcctatgtcccactggtgtattggagagattgtgttgctacaactgcctacctaattaacagaacacctacaccaaacctaaggaataagtcaccatttaatgttctctactctaaaccacatgcccatgaacacttaagaacttttggatgccttgcctatgcttccactttaagtcaatctagatctaagttttctcctaggcctgttccctttattttcttggataccttgttggtatgaaagcctacaagttgcttgatttgaactctaacatgacattcaattctaaagatgtcttcttttatgaacacattttccttttgttcatactaagggtcttcctccttcctcctgcacatgaatcttttttctctaattttcctcatacatcagggtcccatgattctcatacagcagttacttcacaatctcatactgaacttgtcatgtctagttcttttgatatgattagtttcgatgtgtctaatactgtctctccacatactagattagggagacaagtttcaaagctctcatacctgaatgaatatcactgttatttagccactaatgacacttctatttcttctcaggtttcttttgtcactactcaccctttatctcaggttcttgggtaccacaagttgtctcttgccttcagagttactgtacttattatttcaagtcattttgaactagaattcttcagtcaagcccaaggcattcttgaatgggacaatgcaatggtcacagaaatagaggctcttaagaagaatcatacctggattattgtctccctacctgcagatcaacatgtaattggttcaaaatgggtctacaagatcaaactcaatgctgatgggagtgtagagaggttcaaggctaggttggttgccaagggttacaacgaacatgaggggattgattacacatatacttttgccctattgactaaattggttactattaagttggttttatctcttgcagcaatcaaaggttggcatctacaccaaccggatgtcaacaatgcctttctacatggtgatctccttgaagatgtgtatatgtctctacctcaagggtatagacctaaggggaagttgccaacaaatgcagtttgtaaattgcaaaaaacattgtatagcttgaagcaagcttcaaggcaatggtttgccaagttctcaagtgctttaactgatgaaggatttcatcatttagccacagaccattctttattcatcaaacattccaatgtaagtttcatttttctgttgttgtatgtggatgatgtaatcctagctagcaacaacttggttgagcttgaatctttaaaggtcagattgcatgctcgatttcagttgaaagatttaggaaaattgaagtatttcctaggtcttgaagtggcctgatcagagaaagggatctttgtttctcaaagaccctatgcattgcagttgttggaagaccttggttatctaggatgtaaacctatgaattcaccaatggaagctaatctcaagcgtggacaagatgagaaagagaagcttgttgatcaaatattgaacaaaaggattgttggaaaacttcagtacttaacaattacaagaccagatatctcctactcagttaacaaactgagccagttcttgtctacacctagagtcactcacctacatgcaactcaaagggtcctgcagtatgttaaaggtagtactggacatggggttttctttgatgtaaattcataagtaaggttacattcttacactgactttgactggtctgcttgtccagatacaaggagatctacaactggtttctgtatctttgttggaacatttatcatctcatggaaaattaagaaacaacactgtttcaagatcttctgcaaagacagaatacaaagcaatggctaacactacatgtgaagtgatttggcttctcttcattctaaaagaactgaaggttgagcatagctgccaacccagtgtttcacgaaagaaccaaacacatagatatagactgtcatttagtgagggaaaaggtgcatcaatgtgttgtctacacagttcatgtttctacaaaaaaaacaaattacagacattctaactaagtcactcttttctaaccaactcagtaccttcaaaaataatatgagattgaaagacatctacactccatcttaaggaggagtattaagatagttttgtattatttggttagttagaaaattagctagaatgttaattatgtatttgttagctatgcatagtgttagtgtgctgtttttgtatcagaatgattttattgaatataattcagtctttctctctctctctctc

SEQ ID NO: 225291 - DNA, 2140 bp, Cannabis indica
ctcttaaccagaatgattctcctaggcttgcccatcttaagtctgctttagatgctatgattttcaaagaggaagtctattggaggcaaagggctagggttaagtggttaaaggctggtgataaaaatacaaaaaaaattcacaagcatgcctcatttcctaggaagtctaatactataaaatataacaatgataaagatggtgttataattaatactcaggatggtatagttgacctttatcacctcttactttcaaaatctcttctcttcttagggcagtgaagttgaggctacgaccactatcttctcttctttgagttctgggctcgaggaatctgatattagtttccttgaaaaagattttacagctgatgaagtcaaaagtgttgtgtttcaaatctttggggataaagttgtgggtcttaatggtcttaatgcctatttatattagagaatttggtctgttttaggagctgacttcactgatgtagtgttggattatctcaataatggggttgattttgttgaaattaataccacgttgattgttcttatccctataaagcagcgtgctaactcccttaaggattttaggcctattagtctctgtactactttttacaaagtcatttctaaagtcttatttaataggcttaagcttgttttgaataaaattatctcccctcatcaaagtgctttctattgtggtcgaaacatttttgataatatccttttagctaatgagctcatttatgctattaataatagacgcattggcaaaactgggtgggctgctattaagcttgatatgtccaaagcttttaacagagttgaatggaattttcttataagtatcatgtaccattttaatttccctatcaattttgtttctaacattatgaaattcttgtccactgctattatctctttctctgttaatggacaagttgctggtaaggttatacctaccaggggtttaagacagggagaccccctttccccttatttatttatcctttgctctgaagggctttctgccattcttcaaaatttccagaataggaagctccttaaaggtattgccatctcaaggaatgcacctcacatttcccatattctttttgcgaatgatagcatatttttttgtttggataaccgaaactcttgtaatgccttaaacagtgctcttaatatttattcaaaagcttctggtcaagttgttaattttgataaatcatctattctcttttcccctaatacgcatgatagtgtgtgtgccttgttttcccaaacttttcattgggataataagccttttattactaaatatcttggtctcccccaatgtctctctcgatctaaataacaatcttttgcttttcttaaggataaagtgttatatgttgtccactcatggcatcacaaatggttctctaaggatggcaaagaaaccttaatcaaggttgtccatcaagatattccctcttatgcaatggcctaattttgtctccccactaaaatttgtaaagaaattgagtctattgtgtctagattttggtgggggtcctctgatgatgacagatctgttcattggaaaaattggcaggctatttgtcaatccaagttcatgggagggttaggtttcaggtctttgacacattttaatcaagctatgcttgctaagtaagcttggagaattcttaaatgttcaaattccttgctcgatgtaactctgaaagctcggtattttccccattcttccattttggatgttgtctgtcatcatagtcctcccttctcccggagaagtatactttggggtagggacttgctaaagaaagggcttatttggaaaatagggaatggacataccatcaatacaataaaagatcgttggcttcctggttttggtctaaattataactccttattacatcctctcccttctcccaatctgtcttttttttatttccccctctaattcctgggatcttggcaacttgagacattattttgataacaaccttattgatagtattttagatattcatattgctggccatagctataatgatgacctggtgtgggggaaagacaactctggtatctttagtataaaaactgcttatcatcttgct

SEQ ID NO: 225292 - DNA, 4396 bp, Cannabis indica
acaatgtcgtcattactcatttcccccgacaacttaaaatatcatcattcatattatattttgccgacgagctatcaccaatgacttttcaccagcaacatgtcgctattaataatcattactgatgaaaaacacacccaccactgacgaaatttgtccttatcgaagcatatgatttttgtagtggtcagagattggattagtggtagagtagtccttcgatcgtagaagagagtgagagagaagagaaagaaagagataggggtgtgttgaaaaatatgaggggtaatttaagaaatagacaaaaattgacctagttagaccatattagttagctttagtttaggagaaaaatttaaacctagtaaatgaatattttatcgaaattcacaaactaagaacatgtatttctcagcgataactgatacattttactctaatttatcaattaaactattagtaaaagtaattattattaggtaccatagaatatgtaaatattgtcttataatttaaatgaaaaattataatataaagtataaagtgacatatgaaatgaaactcaagtatctcgtagtatattctggatgggctactaatacaaatattatagaaacattcttttttcattatggacataacatatatagtccacaagtagtgacgacaagttacaaacaaagtcaacgatcaaattttgtcaaaatcgaaatacatgatgattcctctttaggactctttacgtaatatttcatgattacaaatattgaacaaacccactaatactattctagtcaattagttgtgtacgtaagtaataataaatattctctttttcatgatatttcaacttggatcgatatatatatatatatatatatttcaattgatcaatgaattactatgtagtttggtgtacattttgggtcccatagaattgtaaattgaaccaacaaaacatagacaacaactactgttattagctcttattagctcttcaaaataaataaaagaaagaataaagaagacatattatagagaattgaggagacacacactacatgttgaaaaatgacgtacataaaaagtgaaaaaatggtccaacataagatggacaaagatcataatggaatacacatccatgcgatcacgagtagaggttggcaaacaaaatcaatattgtgattttgctttgcttagttagaaaaccttgtaaaactccatagtagtatttgttaaagcattattatccgatgttactaatactttttagcattactataaagtaacgtcttagaaatagttagtaattgtttatcacaattattaaactgtgagactcgagacttaattatattaatattatcacataacatctcttagtagtgttagatacttttggtgtgtcttttagtatttttctatttgttatgatgttttgagataataagaataatgagaatgtataaaacaaaatctatgttccatataggagtgtttattagaacacatctaatatttttaggtctattcagatttaatccaattatatattaaatgttaaaaatttgccatcctatctgatctaattaattattgatccaatatttataggatgttggattagatcggttctatccaataaatgttggattagattggttatatccattagatgtatttcatgttgtttacctagaaactgatcccagtgatatggacatcaatattttgacatgtgacaagaaagaaaatatcccggagttgagtaatcccgagtcatagcagttgacctgggagggttccctagccctacgcctaggttgacattagagaactccgaattggatatttggatcctgccaagttgtttccaactcaccatcttttaaaatttagaaccaagaagacaagaagaatacaagtcccagacttggaaaactgaaaaagagataaaacaatatttcggaagtcaactcgggcacctaggatttcacctaactcccaagttgacattccaactaggattttaatttttggatttgtcttagtgcaaatggcttaaactttatactttgacatgaataagacctgtcacgaacatacttgaggtaccaaaatcagaatcagagcactttctattttgagcacctaaggcactaggcgcctaaggcacctagtgcacccaacacccaggttgacatattgtcaacttgggagcactttcaaccataatattgaagaattatcccgagcattttctttgtttccatccaaaatgaagaatcaaactacttttgggaaagaaatggattgacttggaggccaaaactaggacccaactcccaggttgacttgggcattgggcctaacgcctgggttgacactttgtcaatctgggccatttccaatagtagttcagaagaagtcttctggacatgctctccgttttagtgattaagatttgggtgctttagtgaaacaaacagagtcatttgggagccaaaactatgaccgaacacccaagttgacctaggcactgggcccaacgccaatgtcaacttgggcgctgggcccaacgccgaagttgacctttgagctgggcccagcgtctaggttaatcttttttcaacctgagctatttccaatcaacttttttgagaagtttttcggtcatattctctgttttcacaaataactaaaaaaaagggctaagtgatatcaacatatcacttaggcatcaaaaaatacaagtttgggacattttttgcacttacctagcgtccaggttgatgtcaagatgtcaacctaggcgttggattgtcaacctaggcgttgggtgctaaatatccttcagtaaaacagacataactctctcaatattgattagattgacatgattcaacttaagttttaaaactctttcaatgatcttccaagtcatgtctcacacatatcacaattttgaagattttgagtccaaaatttgtgcccaagacaagtaagattttttccacaaattatctgaaaacgatccaacggacgaaaattaagctctgaaaattgacaattttcatcaatagtcaattttcaccattagatcatcatcaattgccaagatcagcccaaagtgtatttttgtttttcatagttttgtattattttattagtattttaataggacctcattccctataaaaggagagctcctctagtttattttacacattcttctaagtctccataaggtcagagcatctctatctactttctttctttagaagttagagttcttgtcatagctagtttttctataatttttgtaagtaataaaaagtcgaagtagacgtagctcaattacggtcgcaacacaaggagtgaagtactataaatttcatgagtccctctagttacttactttaaataatacaaaactaatatattggttcagatttatccaatattttagacctagtatttttttagatcggattggatcgatctaatattttaagatccaatatttattggattggactggatctattcaatctaaaaaaatattaattttaattttcatatatatatttagtataacaacatcaaatataattactcatctaaataaaataaaaataataattagttcaaatagatattcgatgtattgaatttttagaaatcgtatccaatatctaatttaatccaattagatatttaaaaataatatctaattcaattcaattacaattggatatttaatatttgataatcggctataattgaatctgtcagttgaaattagattaaattaatatatgcactaataattttatatgattttagtgaaaattttatgtttgtgtggattttcttgttaattatattttgagagtaatcttaattttttctctaaaacataatctcaatattttaaaatattctcttaaatttatctcctcttaattactaaagtcgtctaacaactaataaaaaccatacatttcctaaaatagtataatataatatattatgatataaatagtagagaagagtatttcgaaaagaaaaaggagagagaaagggtgtcctatagtaagattcatgattgtaattagtgagcaaaaaacaaaaaagaagataaattattgttcttttttatttagtttaatgttaattaaaggtacgtggtacaagacagaatggtgatgatgtggaccgtgagatgcagaacacatgaggatgatcatgatgatggtcactgttgtattatgttatagatttgtcgggattaaggttagcagcaatcatgtcattgcaccctacaatatggacaaacacactgcttcttccaattccaaaaactatgttcccgcgtttagttggagataatgaa

SEQ ID NO: 225293 - DNA, 2904 bp, Cannabis indica
tattattattattattatggaaacgtgtgaacccaacactcaaataaaagttttaagccttctctctctctctctcccactcactttattttggttttaagatttgtaaaagccactctctggagccaactataccatgcccttagaatttcttccttcccagcttggaaaccaccatacttatcagccattttcgtttctcaacaaccccattaatttgaatgtttcacacattatatcaatcttcttttgaagcccataaataatacatatatatatatatatttaaagaaatctgtactgactgtgtcaccaaccatccccttcaattacacaaatatgaaaactgtatttattataaaaatatcagctcttatcagtatataaaccagtcccagtttcaaagtcagattctaaagttgtttgtaggtactaagtctcagaataattattatatgatgtgggaaaggagaaaaggagaagcttccgtgactttaattgtggcttttggtttgttccaaacatgcttttccgaaatcaacagagcaagttttcctaatggctttgtttttggtacggcttcctctgctttccaggttagtttttcttcatatagaaacttttggggctttcagatctttttcccttttggtttaaactaataatatatgtgcatgggctggtctacctctattccatgttatgagatatatcttttccgagatcttgtttgtttcctgagaaaaatacattaagacaaacatgctataaaagtaataaccacagccattggttactgtacctgtactgtctaatcctgttcacccgtgattagatttagatagaagctccaacaaataaaaaacgacatcaaactttaacataatctaaataaatagaagataaacacaagatttcgttcttatttaatttctgtatcgttttacagatacatcagaacataacagcatcgatctatatagaataaagaaaaaaattgttgagattgataaagtgaagtaggggagatgaaaagtggaactatttttcgttattaaaaatatatattatttgaaaataaaataaattataggccattaatatcatagcatggtggtgtgtgcatttcacataaaatcgacccgttcgataattggcgattttatggatcacgtatccgtgtttttagtaacccaaacgaactattctcttcgctcacttttcttatatttattatttttaatttcccaacctgattcattaattaattattatttcgccattcttctaataaatattatatttaacttcccaattgattataatattttatgaaactatttattattttgtttttggtgggggaatgtgcggaaatgtataaaatgatttaattttattcttctttctggacacatgacaattttgtaactctgtctctagtggcctttttttctttctttcttttttttttttttgcaagactactagaggcctttgtaaacttgtgttttgaccttttttaattcctaaagaagttgccaaataatgtagcccacattcttccaagttagtaatagtaaaaagtttttagtcattatccactgaggacgtacttgaagttttttatttatttatttatttatttattttttttactgtattttgtttcttcaccgtttagtaaatatagtaatatatatagtatttttcctttaaaaatatatatatagtagtttttgtgcattgaaaactgtaatattttattttgggaatataaacattgttatggaaaataagtttcaagtatattcatatctatgtgtagtgaaacaaattaaatacatggaaaaatcatatagtttgaatagatacttaaaaagagactcaattcatgatatacttataattggtgaaaccaaataacgtctcaaaaagagatattggcttcatttgtgtaaacttttttaaatttttaatatttgtttgtgataatcctaatttatggaagtaaataaattataagctataagtacaagtgaaaataatattgtaaaacggagccatactaaaacaaaatgttaaaaagtaattaatcaaattaattaataatattgcattgtcccttatcaatatagagaattttgtttagttattaaagttgcatgccaaaataaggcacacattaattacatataattaatcagttatgtttggtatatttttataatttcattagtagacacaacacaatgtttgtcagcgtaattgaatagctaacaagctcgtcaattatttatttatttttattttattttacagtatgaaggagcagtaaaagaagacggtagggggccttcggtttgggacactttttcacataaatttggtaatatttaattcttttttacttggatttttaaaagacccctcccagaaaacataatcattgtttgagggagtgataaggatgaaatttttgcataatgcatatataaaacttcaaagtatagttaactaaaacatttattttcaaattccgttcaaagagaaaatatatctatttcaaattatagtatggtgataaaatacaaaactatgtataaatagttgagaaactagctaagacattcttaacaggtgaagcttccgttaatattatttgactctttcattgtataaatctaatgggttgtatattatattttaaataatataaattattagtagactctatgcacgtgtcaaagtgacactactacaaaaagtctgatttgggtagtttataaaaatgatatacgagtgaaataacaaaaaaaatataatcctcttaagtaataaaacagaaaaaattaaaaaaaaaaaataattaaaaaacagaataaaaaaataataaaaaatata

SEQ ID NO: 225294 - DNA, 3193 bp, Cannabis indica
caaaacgatactacgggttctcaaaaaagaaaaaaaaaagttatataatgtttagtgatgaaattccttaactaaagagatattataagtctaacactagataaatattttctgcaggtccaacttaatattacatcttatatatatgattttaataattattagaaaaaaaataatagtgatatgttagacaacaataatactcttccttataaagtctggccgatcgcttggtgttagattgtactatatacatgaatgctctacacaacaagtttggatgtatatatgagatagtatatatgatacaattaatagacttctttgagtacttatcttaaaatttctaagtaaattagagattcagagaagaacgctaaaaatgatcaacatataaaattacaattacacatattgaacaatagattttagaaacaccaattaagatcaaaagagactagtcaagttttctttgtatagataaatggtcagagttttgaagggctgaccagtccaatatttgacggtcttcaatgaaatttaggaatgaccataccgaaaacatgttgtatatatttatatctctaaactattattttgcatgcatgcaacatccgtgaatcttatctttaaaaaattgcaattataaaaagataaatcaatatggctagtttctatgtgttgtccaataatcttataagtgcatataaatagacattatacaggccattatttccttgcaaagcatatatcattattatcatatataccattagttataatattcataactgagaagacttatctctattgaagaagagtacgtacgtagctacaatcggtattagaatctaacttctaaatttcaaagtaagctaattaactatgtctattgatgctttggcaatggcgggagtagacttacagagaatataatatgaatttcgaaataagggagagggagtactgcagccatgaccctcatcttcaacttgaagagcgcccagtaattaagcccccatctaagaaatgtttgagtatccatattgatcatgacgatgaagatgttgatggtgctgtagatcgtatgaaagcgatgattcgtgaatgggctaaagctgttatactttcgtccagtaccatgtatagatcatccacttgtaccacatcatgatattcatcatcacatccataattttttattttttatttttttatattgtatgaatcagaactgttgtcctttctataaatattggaatagacatatttatttattatatatggatgaattcattagtatatttaatggttaaaaacaatttctcaaaataattgacgctaaagtgttaaacgaaaataaatatatagtaattaacgcttggagtaagataaataaagagcttggaatcaagtagttttagaaatagatagtttgattgtggtttaagctacttttaattcatcttcaaaacaaaaaaagctactatataattcactacaaaattttttatttttagtcacaataaaattaatttatgattgtaaaaaaaattgtgactaattataaaatatttttcttatattgttactaaaatatctctggctaaaaggtatttgtcaccaaaattacaatttgttgtgattaaatgtatttttagttacaatttgtggctaaaactaaattattgacaacttgtatctaaatgttatgttttagacataataactttttgttgtgaataaaaatcatattttgtcataaaaaaaattatattatcactaatatatactaatatattgtcactaaaagtaattatttttaatttgtaatgattattagcttctacagaatagtgtctttatttagttttgttgttaatgttgctccaggatttcatgatgattgaataaattttggaattttgtgtatccaattaaaaaaaaaattatagatagtaagcaaataatatttacaaatcatggtatataattaaaattataaattaatctaattattgaataattatagatcgatcaactaaactgatgaaaatatatttaattttaaatgtatctcttagccaataatggtcagctgtaagcttagttaaataatccattatatcaccaaaataaaataacaaaattaaccttagctcaaactttagtaattaaatgacttaaaggtaaaatggcctaatatcataactgtgcttaaacccgatattctaacatcaaatgtatgaatgtcccctaaattaggagtgtatatgggttggatcggatctgatccggctatgatccgacttggtccagatcatgtaaggatctgtcccgccccgtcccgctagatcagatactcggatcagatcagatttctcgacttatgatctgatccgacccgactcttttttttttaagaattttaatattaacttataattttatatctattttaattttgtattagtattattaaatacaatattatgtttgttattgacatttattaatagattgtttaaagataatatatttttaataaactctaccccaacaccgacaacgggtcgggttggggtccaagtttaggtcagggtcctctgttcgggtccaagtttggatccgaatccgagtctggggtcctgggtctgggtccgagtctcggtccgggtcccgagtccctgtctggatttgagtccgggttcgggtccaggtcccgggttagggtccgagtccggtcctaatcttgggtcccgatcccaggtccggatctgggtctcgggccagggttcgtgtcgggtccggtccggtcccgggttcgggttcgggttcaggtccaggtccgagtccgagtctgggttcaggtcatggtcccggttcccacgtccgggtccgaggtcccggttcgggtcccgagtcgcgatcttggtcgcaagtcttgggttcggtcctggtcttaggtctcgggtcccggtcgaggttcgggtccgggtctcggtccagttcgggtctgtatccggctgtgggtctgggttcaggtcccaagggatccaagtttggggtccaagtcttgaattaagtttttttataaataaattgaaatcgggccggatcagatccgatccataaaaaaattaggcagggcagagcggatctaatccaatatccaataaatatctgaatgttt

SEQ ID NO: 225295 - DNA, 5359 bp, Cannabis indica
tttttaaaatttcaaaatttaaactaattttaaaatatctaagttttatttgaattattttatcaaattaaattaaatatctaataagataaatgatatgaaataaccaactagatatttatcatatcattttatgatcttataatttaataaaattaaaaaatcaaataaactattttaattagatgataagtaaactggtacgataatatcataaatattatatttctaacttataatttataaataataaaatatatgacaaactaaccaatttatgaatttgaaaatattatggttatgatatctataaaaatatctaagttaatttcaaatttaaagttatttaatttatcatataagataattttaatataataattaaaattagaaggataataacaaccttttaattttaaatatagcttatattaaaatatctaatcttatttttaaataattagtagattttaagaaattaataaatttttaaaatttaaccataatttaaaatataaaataaccaatttttaaaatttaaacaatcaaaatataaaaaattagtaatgatctattaaataattaaatattattaatttcaaaaattgatatttacgtttaaatattaaaagtaatattttatattgatatgtagggacttgaaattgaaaaatctaaaaaatagtgaaaaattttcgaacaaattttgaatgtttgggggaaaatatgagatgaaggtttctggaatcaaatgttttttgaagagaaaacttgagagggttttgagaatgaaagggaaaatgaaaaatctcattttcgtaccatgagggttttttatagttgtcacagtcaatcattgagatcgtgacacatggcagtagaaaacgaagagacgcttgatccaatgattatgcaaagttgagcttgcacagaccccgaagggttcgatgacgtggcatcttgggaagataaaaccataatcacaaccttcatttcaaaaatcctcgataagacacccaaacgtcaccacgatgtgacaagccaactcgcctatcccttgagatagttttgtcgcttgacaaataattgtcatcacgaaactaggggcatgtgttatagtgccaatttttcgcctagaaatatgagtacaatcttgtaaaaagttgacacatggactcagttctcgatggaaaaggatgacgtatcaacagatagttctagaagagctaacctcgcatgacttaaacttgcgagaatgtgcgaccgagatagggtataatcacacattatgtccaacatagttgataaaaaagcatgaccaaaagaagttagtattagttgcgcctataccgattatatgcgatgagcaagtatatctctattgcgatacataaagaccacatctttacgcatgtctagtccgaaagactaaatgtattcaacaacctgttaggaactcgcaagttctaagttgtcaaccataaggccaatattgtaggcccgaaggcccaatgtgcaagtaaaacaccaaaaactctacgagcttatgtgttcgaaatatgggtagtcaatgtgcgacttagcaattcacataggttcaaacaattaattaaagaatggttaaaaatattctttaatttattatttgagtgtttttttcttattaaattgtataattaatgtaataatagtcatgtctaactaattatgtaaatctaaacagacacttaatttttatgtaaaggagtgatctgaataaaataaatgaagcaaaaactactgccaaaagtggactaagcagaccgagctctgactgaaccactataacctcttgtctaatttatattttactattttcattcatttatttacaacctatatttgattattcaccactttaggtgaatactcacagttctgtatatgtgtgtatcgaatactcgcataattttggtgttgtcaatttttctctaacaataatacgcttttaacatatcaagtttaaggacataaaaaccatctcctttttgttttgttttttcaaagaattaatgcactcaaagccaataagagcattatcggtgataagacgtctcgaaagaaaagtactttgttcatcagaaataaagtggcacaaaatttcacgcatctgatgagtcatggtcttagtaatgatcttataaatgactaataggccaaaataaatctagtaggatcatcaactctaggaatacgacaaagaaaagttttgttaatacctcgcaaactatagtcgccatttaaaaaatacgaagcaacctttgtaacattaggacccactgtgttccagattttttgatagaatccaacattaatgccatcctcccgagattcttagcatggtcaatttgaaagaaagccatacgaacatcatcctcaaaaaattcctgagttaattggttattcacatcaggaattttcctaggtaccgaagcaatcaccttgttaagagcatccattgagggtcgatccgaagtgaacaaagaagaaaaataaagctcaaagagagcccccaattttgtctgacccatgatctcaactcttgccccattcagaaggctagagatcgtattcgtagctttcctgtaagaggcgcacttgtggaagtaagcagaattttgatcaccaagtttcaaccaatcatttttagctcaagacacccaatgcttttcttctttctcatgaagcacatctaattctttttcaatttttcgaatctccccacaactaaaattatcaagaatgcatccaaaatggagaaatccttaattttttggttgatagctttgcagtgtctcttgtgaacctctttattctatttatttaatttgcttcctacatcctccacattagctatacaacgcacaaaggagctggatccttaaatgtaataccctagatttatgaaatggattagcaaaaccctaattagataattatgtattatttgaggaattatattattatataatttaatatatgagaatttatatgatttatgacatgttaagacccccgttggtgagctaggggcattttagtaattttgacccgagaagggtaaaatagtgaaattaatttatttacgtgcttatggaactatattattatatagtatacatgtgatgtatttttcaggtatgttctgacaggttggcgcagtatagtcacaaccgggtatttcgggccgaaccgggttcaggcctaaaatacaatttgagttgaattattggcattttaattgttgatgaataattaggaatggaaatttgggccattttcgcgggccgggccgggcccccgcccgacgggcggctttggcccgattacatcgggttattatcgggctttcggcccggtccggctcggcccggtacatattatttcgggtcgggtccggcccggcccggtttcaattttttttctgcttgtttgttttcttctacgtttattctcttttccaatcagtcaattcattactctccgtcagtcaattcatcaatcaatcataggaggatgagttaatacatttcgaccctcgaagaaaatgcatttcgtaactcctccaaaaatggtttcattctattaactgaattgttttagttgtctatattattaggaaaataattaagaaaccaataatatatatggctttgggtcactggatagcttgttgttcattcaatgtggcggtttgtgatttattttctttttcttttggcttgaagtgtaagtgaaaataaagtgtttgtttttattaaatatgcatcttagctcttagcttcattactttactctctttttggggagtttatagcatggaatggatcactgttgttataggaatatgccatttcttttttaatctagatcaagaaggttcggagtttttgaggttttttaatctcaatgtttggaatctttcatgggcttggcatcttttcaattaatggttttttacaaggttaagatctttgaactgtgcttctgaaattgagcatgcaagaacacttacagagagttagtagactagtagtattagtatttttgtgtgtgtatatgtgtatatatgtatagagagttagtagtattcaacatttgtacaaataaataaaataaactgaattttaaaaaaaaaaggaatactggtcgggctcaacccggcctgattatatcgggttgggcttgacccacaatgctgaataaagaagtcgggcctggccgggccgggccaaaacaatatcgggtcgggccagcccggcccgattgccattcctatgaataatctgaaaattaattgggtttattatatgtgaaatgtcatttttgcccttgtgagtgaatatgtgtgtgattttagcctaggggcaaaatggtctttttacctttatttgttaattgataaaagatgaaattttgagtaaatcaaatagaaaattctggttttttcttcctctgacccgaaccctctctccctcaaactctcttctttttccaaattttattcttgatgagaatttgcttgatattggcttggattaagctttgagtttgaggatctttgggtttgttcttgatttgagcttgaggtaatcttctatgattttaatctttgatttgttgctgaaaattaattgttggagaatatgaaaatgtattgtggttgtaaaattggatttgagttgcatgttctttttgttgggttgtcttatgcatgcttggagctttaattcttgaggttgcttgagttaagtttggacaaaaaattggaggattttatttgtgtattttgctgttcttaagctctaaaattggttgtgtaaagcatgagttcttggtgtaattttgtaagaattcaagataggaatttcttggaattaagcctaagttggagcttggattttcatgaatttgtaatctgaaattgtgggattcattgctagaaattgatgcatgaaatatgtgtttttgaccctttgataattgctagcaactctatttgatggtttggaagtttggttgtgatttgggaaggtttagttgagttttgagggctaattttcgtgttttgctgctggttttctggcttttgaacccaggtgccgcgacatggtatttagtagggttgtacataattttttgtaaaccgcccaacccaaataacccgcccaaaccaaactgtaaaaacccgacaaaaaatacaaaccgaaaaaatcgacaaaaatataacccgcccaatctgtatattgggcgcgttgaaaaaagagataaccgcccaatgaaactgagataaaccgagataaatgatatttcagcttat

SEQ ID NO: 225296 - DNA, 5225 bp, Cannabis indica
atcattctttctacttagtttgctcgccttgtcccccgaggatgtgctgcctgcagtgtatttatgcacaaataagattgctgctgaccatgaaaataaggttggtcaattcctcttttaatatttgtctacactatttcttatcaaaatgttaaaaaaaaaatctacttctattgaattgtttcttacagatccaaactatgcaggataggtattttcttattatgcctgttaaaacattgttgatatcaatgatatgtaatgggtcagtcttacattgtattttatgtcttacaagtgttgttttgtattatcattttcttctttcttttgaatgctctaagctaagcagtctactaataactgcaatactaaacatagtgtattggagcaaggtgtcatcaagcaaattgtctgtacaattccctttcctgtaatgtgaaaaatgaaaaatcatcatttataacaatggtacaggagctaaatattggaggtagtttggtaacatcagcactggaagaggcatgtgggacaagccggtcaaaattaagggagatgtacaatgacttgggtgatctaggtaggaatttcgcactgatcaattattttcttttcttgttagcattttgtattgcatatcaaatattctatttttctgaaaggtgatgttgctcaagcatgccgtcaaacacagacattacttgctccacctgcaccacttctgataaaagacttattttctactttacaaaagataaggtagggagacatcaaccttgggtttttgtttttctaagtttctaagctctgaaatatttgaattttggtttctggcattctatttatatctctcttgctgtctttctttctttctttctttatttattttctttataagaagaaaaataagaagatttgtacatgttctatctatcattattttattattcttttacagaaattaaacttgtattagtgattgaaaatactacaagtataagtttggaaggggaaaccacagaaagaccataacaaaacaaaattacaagttgcacttaaaagacttcatatccctaaggtgtcttggaccattttatttttcagtctaatttctaaacaaggttacggtgtttaattttggttggttgtatggttaacataaatgaatatagaccattcaattaatttgtcatttttcagtttatttatgtactgttcatcagtgtacaaacaggcagtggaagtacattaaggaagaagaacctaatcgtcaatctcatgcgttcttgtagagagaaggaaatgaagtttctggttagaactttggtaatattctctcagagcagagcccttttgtttttaaatgttggatcacatggcatccttcatttatctccattttttttgattgggatataccttttttaaataaaacattgaactgaggatgctctttatgttatacgagtatagattaaaaatttacgcattggagctatgatgaggactgttctccctgcactagctcaagcagttgttatgaattcttctccccatgaaagcacaaaggatgagcttcaggttctatttatttctttttgaatatttcaatttagtctcttaattgtttctgaattgtcagtagaggaggatatacttagcgtttggaattgtttattcattgtaattttctttttatgtttcttatgctatatttctttaatctagagcctttcaggagctgttgttgaagcatacaatgtggttcctagtttggtaagttactcatgctttggactaaagtactactttctagttttccccacattccaggtctattgttattacagtttcctcagacttaccatccatgtggcacatgaaaagaaaaacctgctctcttatttttgtatgctactattatgtataccgtcgcaccacttgggcttggttgggtgtgtgtgtgatggatggggaggggttcaaatccctattgtattcacacaaaaaatgtatcttgtatagcagaacctttttcatgtgttttaaaacaaaaaaataaaaacacatgtatattggcatacgatcagtttgagtcctttaatatctcatgcttctctttatatctattccacttttgggctttccatgtagtaagtgccccttttaacatataattttatcctgtaacaattgcattttagttaactagaaactatatgtttcactagaagctgtttcccgagatatatatttctacttgtgattgacaggacttaattatcccctctctaatgaacaatgggattgggttttcatcatctactatgtcaatgattccaggaatacctattaagccaatgcttgcaaagtatgttctttgctgttttcttttcctcccctaaaattctttgtaaaattgatagaatgcatgttatgatatgtccttttatataatcttttttctgtggtagaatcaccaatggtgttccacaagcaatgaagctctttcaaaataaggcttttacttgtgaatacaagtaagtctttccctcttatatgtttgcattcagtttttcatctttgggttaaggttggcttgagagaacctatttgatatgtttgatggatccttcataatctaagcatgtcaagacaatataatgaaatagtttttatgctgataccttgtttcagatgttttcttcatatttgcttatcgtttttgtctttttgaatagcatttcttttatacagaaatttttatttaagtgatcatcttgcagcgtttttgaacttcttgtatatgtctttgtgcattagattaaggatagtattttagttaaggccatatgttttagatggttctaatttgtaggctggtcttattagttttaggatatttttgctaagcttctaataatattattcacatcagaatagcctctatatatagagggttgctaagatgagttggcagctcagagtatatcttagcaaatcggacaattacaaaaagacaaaacaaatctgattcaaaataatccctagaaaatagaatacaagacaactcttctaatctgactcaatacaaggaaatcttcatagaataaacacaagattttcaaccagtcttctgtttcattatcctttttgtatgagtatgttgatagtattatgttgctttcacttttatttgcctttgtcttatatttctacatattacttgatgagtaatctactggtatgcgatatcagatatgatggtcaacgtgcacaaattcacaagctacctgatggatcctttcgtgtgtattcacgaaatggggatgaatcaacgtcaagattcccagatgttattgatataatgatgaaatcttgtaagcctgatgcagttacctttatacttgatgcagaggtaagaactattgatcctacagagtatatgtgtacttcatattatgtatatacatgtatgtatgtatattatgcacttgctgtcattatcgtctattcttcttttgggtaggactggatttttcattatttttctttttttgcattggactggaggaagactggtttacttattaattactattttctttctgagtaaaaatataattgattcctatgtatgtctttttaatggttttagattgttgcaattgatagaaagaatggttgcaaactcttgtcatttcaagagctgtcttcccgtgggagaggcagcaaggatatctcaattacattggacagcataaaggtatctcatgtgacaatttctgtgatattatcatagttaatgatttactgcttgaatttgcaggtttatttattttttcaatcctttttagtcttagtaagatgaacaatggttttgtgaggagtggaagcataaagaaatggttaaaccaaaatcagatttcagaaataaaggatcttggattatggatgttaccacttcatatgtattaaacatctagtctactattcattcgttgtgcgcatgtgtttatttatttgcttgcgcacacatttacttttgtttcactttctgatttttcccttctgttatctttctttgcaggttgacatttgcgtatttgtctttgatgtcatgttttcgaatggacagccgtaatttccttaactttttctgaattgtatgtgtatgatataccatatcaagtgtgtgtagtgtctagattttggatcaaccaaacagttttcattgtagaatcgaaagcttaaattcagatgacctttgcagttgatttgacgcatgcttaactgcatcaaactgtttaaattaaatgatgaattagtgatgatcccattcttctagctttgtttaagatatccgtgaaaactgtactctaaagtaaatagagtcctcactttctttgtttactaccctcatgatgcccaaatggaagggccacagggcatagaaaagagatcctgttagattgttttgtgatagaataatcttagaatagaaatagtctgccagctattttccataataaacacaagtaatgaattcttcaagtgatctttattctgaaaaatcagtgacagttacaatatcgaactttttgagaggcatgtttgtccaaattctcaatctttcgagaggattggtctctccacaagagtctactcttttctaactccaagctaatccaaatgaggttgctccctctctatttataagcattggtattaaaatgacttaggtcacctaggactacaattggaccaatagaattaaaacattaagacaactcaacctatgtacattaaagtatttcatttaatccttacgtgatgcacaagataagtcttaggcttaggcttatcattctgacttaggtttaacttaatcttgtttttataattagttaaaaaacagtctttaacaaatttttttaaatgcttgaatttagcacaaatcatgtcaagcatgacagatttagagtcataagggtgttagatcttcaaacaatttgaggaagttgagtaatctgtgaaaagtcattgaggaattaaccgtttattttcaagtaattgttgttttagctgatgtaaattctttttacaggttgttaactattccattacgccaaagacgaaaatgtatgcatccacatgtcctgttttaacattattatttacaagactacatgtatataaatacaaatatatatatgtatatattt

SEQ ID NO: 225297 - DNA, 5377 bp, Cannabis indica
ttttaattttccgaaattagtttaaatttccaattcaccccccctcttggaaacatatcttgggctaacactttttacgaagagaaatttgactcggttaggtgaaatggcaggggaagtggtagaaatccgttggggggatgagaatcgtatgttcttaaatggttatgtacgaatgaggatcgggtttccattaaatgcgagtatatttgtggggcgattcattccatgtggagggcaaaagtattggattcaatttaagtttgaacatttacctatgctttgcttcaattgtggaatttggggacatgaacaaaaagattgtactagtgatttactgagggaaactgattgtgctggaaatatggtgccgaagtatggagcatggttgaaggatgatgacccctgccccaatggatttgtatcggctggagtaatgaattccactacacatattgaagtgggaggacatgagggactggaacgaagtccaggaagtgctagtggtgtgcatggggggcagcccagtcacggtggtctgagctcagttacagaggaggagcaaacggttatgagaagtgtgggggaaggaggtacaaaaatcgtggagggagcagttaatattcaaatggttagtggggaaactaatagccacgtggcatccaaagaagtcaaggacaatgctggtgggtcaaatgtgaaacaaagtattgggcctgaaacatgtattgggctgtctgtgagaagtactaatgtaatggactataatgttatatctgagtccacttacgctaaatcacctgaagttgagaatacggagaacgataagaaaaagaggaaaaatggaggagcgaatgtgactattgatttagaggaagtcgaccgtctgaggagtaaagggaaacaagtgcaacaagcaccggtgggtgtggaggacaatgagaattttgctattggggtgtccatcggtgagttcagaggatcggcttcatccccagggcaacgcaagaaagtttccattaaagcaagagctcggcttgcgaagaacaatgggggatctcgggggaggatagtgccggtgcctgagagatcgcaggatcatggtgggggtttgggaggtgcttcgttggaggccgattctcttaaagagggtagtaatggtgggtcgggtattggggaggagaaggtgcaatcgtttgtttctgaggtgggtttttctaatacattggatttaccatctcaatctgctagtattgaagcggcgagccttgcgcagcaaggccgccgaacacaatgaaactcctcagttggaatgtccaaggaattgggaacccttggacattacgtgctctacagtcccatgttagagagtttgatcctagtattgtgttcttagctgaaagtaagcttagtaggcctcaggcacagcgtttgagtgctactctgcagtttggggagaatttttggtctgttgatcgggtaggattgagtggtggtctgctacttatgtggaaagatgaggtcacggttcgtgtggattcttcttcaccaggccatattcttgctatgattgcgggtaaggactttcttccttgggctttgacttgtttttatggtaatcctgaggcttctcaaaggaaattttcttgggagcttcttcggaatattagcagggaagtgcaaggagcttggttgtgtgttggggatttcaatgagattgttagtttggcggaaaaagttgggggtagagttaggagtgcgggtgcgatggaagagtttcgggaggtaattgatgattgtaagttgattgattttagctctagcaagacggatctcacttggtgtaatgaacatgaggttaatccgataatggaacgattggatagggggttgtgtaatgatgaatggttacgttgttttgtgggggcggatattaaagtcttagattggtgggcttcggatcatcgacctttggtggttgagatgtcgttgggtaatggtaatcaaacggaggagcatgataggaagaaggggcgattccattttgaggaagcatggtgtgaggaggagcaatgtaaggacatcatagaggagcagtggcgagaggatgtggctgtaggatcgggggtggattttaaattgaaaactgagagggttggttttgctcttgctagttggaataggaggaaaaaaagatgcttaatcagaaagttaagaagttgaagacaactttgaattctttgtcattgttgtctgatcctggggtgtgggtggaagttaaaaaaattgagagacaactgaatggtgtgctggagaaagatgagaaatattggcgtcaacgtagtcgagcaatgtggttaaagtggggcgatttgaacactaaatattttcatcgcaaggcttcggctaggaagaagaagaatacaattaaaggcttgatggacagtatgggtatttggagaactgagataagcatggtacagcagataattgaagagtatttcaggaatatatttcagtcgtctcctacagatcccgacatttttacggaggttgttctgggggtccaaccgaaagtgagtgaggagatgaatgggttgctgttggaagtctttactgaggaagaggtggttagggctgtgaaggatatgaatcctaccaaggccccgggtacggatgggattcctgccttgttttatcaaaaattttggaatacgcttaagaaggatgtggttgggatttgtttaaagttcttgaatagtgatgcagatttggcttgtttgaatgaaactattatagcacttataccaaaagtggatcggccaactagagtggaggagtttcggcctattagtttgtgtaatgttatatataaaattgtgtcaaagtgtttggtgagccgtttgagaggggtgatggggtcggttatctcggatactcagagtgcttttgtcaaagacagacttatacatgacaatgcaattgtggcttatgaaggattgcactgtatgcgtaagaatagatttcagaacggtgataagatggcattgaagctcgacatggcaaaagcttacgatagagttgagtggccttttcttcaggaggttatgttaagattgggattcaatggcagatgggttgctaaagtaatgaaatgtgttacttccacgagtttctcctttctgatcaatggtgaagttaagggaaagttgacaccggagcgtgggttgcgtcaaggtgatccgctctccccttttttattcctcttctgtgctgagactttctcgaatttgatacaaaatgaggagagggaaggccgattaagagggattcggtttggccgccaaggtctttcggtttctcatcttttcttcgcggatgatagtttagtcttcttggatgctactatgaggagttgtcaacaatttcagcaagtattggagaaatactcggctgcctcgggacagctcattaactatcataagtcggaagtttgttttggtcggaatgtggctaatgagatccagactcaccttgctgagtttttgggggtgaggtgagttgataatcatgggaagtatctgggattaccttcctttgtgggacgtaataagaaggagtttttagatgagattaagaacaaggtgtgggctaaaatgaaagggtggaagcaatccatgttctcaatggctgggaaagaggttcttattaaagcgatagtgcaagcaatcccaacttacaccatgtcgtgttttaaattaccaaagaagactatttcaagtcttcatcgtatggcggctcggttctggtggggttcatctgataaagacaagaagatccattggtgtaagtggcggtatttgtgcaagccgaaggacaagggaggactgggttttagagatttgggcatgtttaatcaagcgctcctcgctaaacagatatggaggtgtattcggcatccttataatctatgcagtcgagtccttaaagcctcttattttcctcataaaggtgtgctggaggctaggtgcggggctaatgcatccttcgtttggcgtagtttggtgtggggtaaaaagctgatattgaagggataccgatggcgtgttggtaatggggaattggtcaaggttttggaggacccgtggcttccaagaccggtcacatttaagatatatgataaacctccacttcctcctcacctctatgttgctgatcttaagtgtgcagatggccgatgggatgaagaatttataaggaatgtgtttaatgagacagatgctgacttgatcctagccatacctttttcggattgggaagtggatgacaaaattttgtggcactatagtaagaatggggaatatactgtgaagagtgggtatagaatggctagttctttggactctgagcaacaccattcggatgatcatgttattgttgaatggtggcggaagctatggcgattgaaggtaccaccaaagatcaaacactttgtttggaaacttgttcacaattggctcccaactaatgccgtgctagctaaacggggagtcccttcaggtatggtgtgtgtgcgctgtgctaatcaagttaatgagtccattagtcatgctttatgggagtgtactgctagcaagaaattttggaaagttagtggtctgctgcaagatttaaatcgttatgagggggaggatcttttgtccttcattatgcggttggcaaaggggtgggataaagaaaagtttgaattctttttggtgttgctgtggcaggtttggaacgtgaggaacacggtggttcatgggggctgtagtccgatgccgggggacatggtggaatggtgtggtggttatttagatgagtatcggcgggaccgggggggtagtggttcgaaggagggaagatcgggtcagcgttggactcctcctggtgcgaatcaagtaaaaattaatgtcgatgcgggggttaagcaaggtggtcgctgctcgggtttaggctgtgttgcccgagatcgggctggggtggttcgatatgctgcagcaactgtagtgcagcaggaacttcctccattgcagctggagttgatggcgatctgtcggggtcttcaactgggaatacaacaaatgtatgagcagtttagcattgaatctgattgtcttcaagccgttaatttaatccaaaaaaaggaagatggctgtagagacatagatggcttgctgcatcaaattagatctttaatgtgtcatgttaattttgttggcatctcatttgtatttcgcgaggccaaccgagttgctcatgaattagccaattatgctttggtttacaaggctagtgccatatggattggggtcattcctccttgtgctcatcaagc

SEQ ID NO: 225298 - DNA, 4451 bp, Cannabis indica
ttaaaaaaaaaaaagaaaattgacccaaaaaagggtctcagtgtgcctttgtcgcttctcaacagctttgcataaatacataaaaaacaaacgtcaatctcaaccaaattcgatttgcccactttcagatatgcaaatccttgttgtgaaagtgtcgaatattcttccatgagtttcaatactacatttcagaaccccaaaacatttacaaaaatgcatgattaccaaccatctaagtgttaaaaatgaaagaaaatgccttctaaaatgtcttctaatccaaaatatttgaaatataagaccaaccctttattggttctccacgtttattacaccaattttgaatcttttcaacctttgttcgtttcttttctgtccaaatatgatcttcactttttgtttatccaccatgttatgatcaacttggtgttccactatggacaaaaacatatcatgtgctaacctggactccatttaaagatgacttagcacctctttaaagagagaactttactggttgtttgagctgttattgctatatttgtgaaaaggtaaaggacccacctagctagtggacctattttaagcctatgtaacttagcaattttacataaaatgtctatatactatagatgttctctcctacacagcaatgtacgtagtttttttcgtagcccaaaaaagacctataagatataacaagttagtgccttaactttaaaccagaagtcatggtagtagaaaacatattcagcaaaataaactctctgtacggataaaggaaaccagaataacattgactttggagcttggaccactcaatatattgtcaatgtatgacacaagctatggagactttttaactactttgagatcattataccttataagcagaaacatgttatcaactatctgcattggaaaacttcatcaaaaaaaaaagagacagtggctagataggtaggagaaaattggttgtattcactagaatagataagaacaaaaaacgacatatttcaatcataaataataaatttttcaaggtacatactttgtaagaccaatatatgaatcagatttgaatgagtatacaaaacaagagactatattggagaactctggttatatttccagtttgtgagcttctttatccctatacaagtggtacaaactggacagtgggcatgcctcgtgctctagccataagaagaaataattcaaggggtaatgattttacatggcaatgaggattatcaagctgacgatttcgagcattcagggcagctaaattggcctttgcctagacaattcacacatttagtagatcttacctctgattcatcccctaaacttataccgaatagtaagccttctttgattaatccagcccctttacattttgtgcatgctatcatcctaagattgccacatttcttgcacatacctagagaactgaatgaagggtcatataaacacaataagaaattagattgcaatataattataactgaagcaatatatatatgccaaaaattgtattgtaaaatgttctcaaaagcgatgtataattataatagtaactatatattcagagtttcatttgactgagttaagtaaaatttgcaacaatcacccacaaatacatatatgaatagaaggagagcaagaagatcagcagtgcaatgtaagattcaagtgaatatgaaattagattgccacatttcttgcacatacatagagaactgaatgaaggaccttataaacacaacaagaaactagattgcaatataattacacataactaaaacaatatatgtatgccaaaattgtatgtaaaatgttcttaaaagagatatataagtatacttgtaactatatattcagagtttcatttgcctgagtttagtaaaatttgcaacaatcacccagtacatatatgaatagaaaggagagtaagaagatcagcagtgcaatgtaagattcaagtagatagaaacttggtaaaacacaatactatatctacggaattcaataacttctcaaatctcagcaaaaggtaaagaaaatcaaaatcattaacagcaattgaatttgaagagactattgaccaaagaagccagggttgtttggcaggatagtagagttgtcatgacatttgacatttagttgacacggatgattttcaatagcactcaaataaattttgctaaacattcattcttatccttcaaataagcagtcgaatattatggttttgaataagccagtagccataactttttcttctttataacaagtataactttctcctatatgcaatcaaaactagaaaattgggtattgtaattaaaaacaatagaatcaccctatgctaaattgttaagatccgttacagaaatacataaagaagaaactgtaattttctcaagaattgttttagttaggatatatgaggattaattttgatagagactctcccaccgtttttctatttctctgtccctctcctcccctcatgcccttagtgctcactatgaaaccttaaactaaaagttacttgtacttccaaatggtctaaaatatgaatctatgagttctttcccatctaatacatatccttttggttgccccatagatattgcaatttttactctactgggtctggtgaaattgtcagtttaagactaaatacctactgaatagcatggtcaggaagggaatgccataataattctggccaaagcatggctaagctgaaaacaactatagccatatgcttccatatttataagagcaccgaaaccccaattgggttcttcgagtgtttcaaaagaatgttaacaagccaactgaaagtaatgaaccagggcctcaacaatgcaaagcaaaataacttaaaatatcaattcacaacacaacaaagaaacagaaaaacaatagctttgttcccaatagtaacaaacacgaaaaaagataaaaaacgaaaattatgggaaacattcaatatgagcgtttaaaaggggtgaattttgagtgttcaaaagatgagaactacctgcgctgagaggcagatatgaaagcatcgacctttggagcagcaatggtggcacataggagcaaagtcccaactccaaaacctgctagctcgcttgctgttatgttctccattgttgtattctgctcttactaaactgaacaatgtttaatatttatcttatccgaacaactaatatgaagattatctaagtgcgacttaagcattgttccaaaatggcctattagctcagttggttagagcgtcgtgctaataacgcgaaggtcgcaggttcgaaacctgcataggccacatattttttccccttgtttcttttctgggttttcgaaattaatatttgggccggttgcgatgacttaataagcttttctttttgggcctgtatagatgggctaatagccttttcccgattctgtcgaagttggattgtattgtatacctttcatttgttttaatttttacctttatttttatattctttaagatatactaacttttatagataatgtctttattatactccttaggttaatgtaaagcacgtactatacttaagtgaagggaaatggtaatattaagcaacacactcataaaagtaagtagattttaataaagtataatatgagggtatttttgattaatggatacaaaaaaaatatccttaacttatcccttctttcttttattaatatagtaaccaattttattattgagtgtcaaacaatacatttgtattaaatatgaaggaaattattccaactaagaaacttcatttttttatatatagtgcatatctactaactcatatgttacagtattactatttcgcattagatgtaaaagacatacacccgtaaagataaataataagtacctaatagatctacaaaaataacccaactcaaagacaccctcagagaaaaaataaatagagttgacaacaatttcaacataactgattataaaagaaaacaaaaaaattccagcaaggaacaactcttagtaggaggagaattttagtagcatgaagtagagaatcttgtgcttgtgaggataaatagaaaaaatattttaattacaaagtaaataaaaatacactttaattgaaagaaataaaaaataataatcataattaaaataaacactagttacaagttttataatatattttcaatataaataaacaatattagataaacaataatagtcattctaagtgaaaaataagaacacttatattattaaaatgcaattgataatagaagtaaaatcataaacacaagttactttcagataataaataacttaaataactcaataactttaaaacttaaataaaccaaaagttaaaacactataataacaaataactaatacatttaataataataataat

SEQ ID NO: 225299 - DNA, 2656 bp, Cannabis indica
ataaaaaataatataagttttttttaaaaaaaataatttttagaaacttgccataaaaagattattagattattaccttattaattttttttagttcccatcaatgagtattacccattaagaagtgttccatgtatatatatatatatatgatattattataaaaacaataaaaaaataaattatatgaaaaataacaaaacaaaaaaaaaccataaaaaataatattaaaaacaacataaaaaacaatataaaaaaagataaaaaattaacaacaaaataacaaaaataaaacttaaaattattaaaacactgtattttatataaataaaatctaaaaaatcataaaaatattgaaattccttccagaaatttgtattaaatttaaatttgataaagttaataaatttaaaataatgtttaatttagagtaagtaattaattttcaaaaataatagtattattatctttgaacgaaaagataaccatatttagatgcatattaggttgggattttaaaaacactccgtctatatatatgtaccttttcttttacatacattctcataacaataattataaagaaagagctcaaataatggatcaattatctgaggacgtaattgttaagattttctccaatttaaaggccaaaaccattcttacaaatttaaggttggtatgcaaacaatggcgtcaaatcatcgatgaaagctattatggagtccaattagcagagaatctcttaaataaaggtgttgatgaacaagaccctttactattacttctcacccaaaaccctaacaacaacaacaatgatgcctccacagtttgggatgaagtaaataaaagaagaaggattaacgccatcattaataacctcaataaccttaacatggtttcaaacgatggaatatccaaagaaaaggtgttggagattaattttaaccaatttccatggcccgaagaggaagaggaagacgaagaagaagaagtctccttggagagttctttgcatggcattctttgcttcacaaaaaaaactaagactaaaccctatttggctaacccttcaaggaaagagtttctagaattaccatctataactccttccaaagttcgttattgttcttacggattagggtttgataaatcatctagaaactacaaagttgtgagtgtttttctcaattcttctaatgataaaattgaagctatgatctacacacttcatttacgtgatcatgataagaaaaaatcatcatcatcatcatcatcatggaatatgatcaccaaatcacaacctcaatgtcttccaataccaatgccaaagtgtgttaatggagttatttattggattggtttgcgtcaatttgataatactaagccttacacttacaacactcctcttaacctttgtaagatcatggcttttgatatagagaaagagaagtttggattggtttctttgccaataactaatattgattcttttgaattggctcatcttaataatggggttcttagtttggtggattcttcggataagactcctaatcatcgcgttgagatatggaatttgaaggattatgagaaagaatattggattaaaatgtataaattagaatggatcaaattagcaccacttgatcaatctcctttctttgctaatccattaagagttgtggggccatgggagaatggtcaaatattactatgttatctctcaaagtgttttatgacttatgatccaaacactgatacatttgaaaaactaagttttccagatttacttagtaatgaattagtgaaccaatatcatacctactttccaacactgctttctctctcttggttcaatcaacatcatcaacactagtctatattattttagatttagattttgtctttttcttcttgaagcaactattatgtagtagtggctcaacttggaatttatgtcatatgttatcaagattatgataatgtaatattcctaattcatttgattaatagattttaaaaaaagcatttttgatttgattatgcaattcatcgatcatatgtagttgttcatgacatgcataaaaagcattttatttcttgtgcttagaaaaagtatcttaatgaatccatagttatgtaagtctaaatgaatgctttgatttgtgtccaataatctcaaagcttcatcttaatggataatctttcgtttgaaaatgatcaatattggtggagacagcctaagtaagaagcaaagtacttcaccaatcatatggcattgacagaattttgtttctttaaaataaaattttcaatattattcattttgtttcatacttggttgcaactttttattacttatacctattatatcaatgcattattctattttaagaattctactttatacttgaaatattttgggttataaaaatagcaaaaatgaaagtaaaaccaagagcctatatagataaggattctatgttaagttcaaaagataaaaaggttcaaaaatggcatgaaattcatctgagaaaaattctaatagtattcatttgtatcattcttgggacaaatttctgttcccaaggaaaaaatatttacaataaaggcattgtgtctgcccaaaaaaaatgtaacaataaggtttgtt

SEQ ID NO: 225300 - DNA, 4313 bp, Cannabis indica
catatttatcataagagcttttaaaatctcatagtaagtataatttccttatcttataatataggtaactggtcactcctaagatagtaacaagttactttggtaaaccactatattaagtatagcctatatagatatctaattactccttagatgataacattaagatttgaatatatatacatatatgactattgaaaggtaaataataagcagctagttgagctagcaattaaaaggaaaaaaaacaatctaaaaagaaaagaaaatatttgaaaaaaagttatgtaaaatagcataactaaattgaaaaacaaaaaaaatgcacatggtagaaaattttcttcttcttgaaccttcctacaggctctggtctggttcagtctcagcaaggttttgtttgatgcctttccattctcatttggtttctgcttcctcctctttagatcaagttgtcgcaattaattaccctttccctaactttcgcatttattatcccagacgtcaccctaatcattatgaaacttcccctaatttctcaagctcaaacagtttttaataccctttctcctcacaccttcatttaattttggcggctccatctttttcacaattaatgttcctgcaaactatctatctatttctcttcccaagtcgaatttccagagataaaccaaccgtcaattggtatctcttcagcttaaacccaaagctcatcattgcatatcttctccgaatccagacagtctatgcaggttttgaagaggtggttcagagaccgtttctctcttcgaggcgccctttcttctccaggtatcttcttctatcgtttgcttcctttattgtgtatttaaatacctgcttgcaatgtcttcccccaccatcattttctccttcttctaccaaatctgtcatcccttcgtttctggttttaatggcgtcctcttctcgaacccctactccttttaccgctcttgatgatgaagagagtcttgttcacgatttcgatcacatttccatccattcccccaattagtccaactctttatgtttgttctttaaattgttgtcccccaagtctgccaaaccttcttggattgagaaagctatgtctgaagcttggactcttagattcccagtccaaatttctgaataccactctggattattcctggcctcttttcaatgtgacggagaccgtcgtcgtgttcttgaggaacagccatggcactttgataagttcctcatggtttttacccatcctgctgtgtccattactccaactcccgattttgttcggtatgttcccttttggatccaggcccataggattccgtttggtcgaaaaagccctcaattggcgcaattcattgctgacgagatcggagaacttattgaaatatttcccctttctttgctgaagagctttggtccttatctccgtcttcgtgtcttattcgacatcactaagcctttacgtcggggtatgaccatacatttccgtggtattcctgaacctaaatggatcagctttcaatacaaaagcctccccaatttctgctacttttgtggttttgttgaccacacctacaacaagtgtaccaagtaccttctgcgctgcgataactttcccgttcctcccactttggagtataaggattctcttcgcgcctcaacatctgctcaacataaaaggaacccgtttgaaatttctaactctatcccttatgaggagtactttccttgcatacacacccggactgatgatcaaagtttacaacaagccgttgaccaattccttcgtgtggattcccctgcttcgtatccagcttctcatcctgctgcttctcggtcactttcactcaaccttcaatatatatgccttcacctgtagcacacatttccatttccccactaattatgactgattccgtaacaacccatgtcgacaaaggaaaagcaattgttgtgtctcctcccagccttcctccacatagccgtggaagcaagggtgtggttatcagtgaaccacacaccacatcttccccagccatttcctatggaaccaggcggcccttaacgcgtcaaactgcccaagttagagattctgttcgaagtatgctgaagagagcaagggcagttgttcctgatgaagctgtggttcctacaatgtccgatgatgagccaacggcgggtgctgctacgcggccccgtcgagaaaagtgagtctttgcagttggaatgctcgaggtttagggagtcctcgagcattccgtaatctctccctgcttgtcaagcaacaccagtccctgttattgttcgtcatggagactaagctgccttcaagacgtggaatgcacctcaagcacaaacttcattttgataatgttttagaagtgcctaggcaggatttagggggagggcttttaatttttcggaaaaactgtattgatgttactgtcatttcttactcccttaatcacatagactgtattataaataattttactgatatgaattggcacttttctggttattacggttctccttatgttgatcaaaaagttgttacttggactcttcttaatcaattatttgacaccgctcctcttttgccttggttagttattggtgattttaatgattatctttatgttagtgataggaattcgactaattctcctcccccccccccccatgcaatgcatttttttcactcgttcctggataaatttaaccacacccctcttcatcattctagtcctaagtttacttagagacatggcaaaatttagagcggctggactggtgtacttttaatcaactttggcaaaatcttttccctcaggctactctcttccatttgagtttctatggctctgaccatagagcccttaaagttaagtttgatgatcctggttcacataattgtaagtcatcacgctttcatatggaaaatcattggctcactgacccctcttttatctcccttgttcaatcgtcttggaccagttcaactacctggacttcatctccccttcaacattttctggataggcagtccatctgtctctcagatattaagacttggagtaaaacccagtaccccctccaactccaaatctctcgaactcaagttgagcttcatcgactcttgaatgataactagccttcgccctaatccttaactcatgctgctcatctccaatctgagttagatgggctactccataaggatgaagtttattggaagcaacgtgctagagtccactggcttcatgctggtgacaagaacacaaaattttttcatcggagagcttccatccgtaggaagaataactacattcgccatattgccctccctgatgggtcaatttctcgtgatactcctaccattgtctcccaattccttaatttttatactactcttttcagttctcaaggagtctgcgatatggctatcaattctattctccaagggatttctaccagaatctctcctgagcaatcagcttacctcgaaggaaacttcactgaggctgagatcaagcaggccttgttcggcctttcgggtgacaaggcgcctagacctgatggattaaaccctcttttttaccagaaaaattggtctatctttggtcaggatctctgtcgtgctatgcttcacatcctcaatcataagggagacatttctttgatcaatgatacgattctagttctcatacctaaaaagaaaaaaccccaaaatttccgtgatttcagacctataagtctttgtaatactctgtacaagtgcatctctaaggttcttgctaatcgtattaaaagtgttcttcactcgatgattagcaccaaccaaagtgcctttctcaaaggccgtcaaatcactgataacattctaatagcaaatgagctcattcatgccattcactcaagacgttcgggtaagattgtttgggcttctattaagcttgacatggaaaaggctttcgatagagtcgaatggcaattcatccatcacctgctcactcatgtcggttttcctccctcctttacctctcttatcatgaaatgtcattccactgtcacttatcgtttatccctcaatggtaccctcactgacccttttcaatcaacccgtggaatcccacaaggagatcatttatctccttaccttttcctcttggttgttgagggcctttctgctgctatacgtttataggagcttaatggaagttttcctggcattcaaatctgtaggggagccccttctctctctcatcttctatttgctaatgatagctgttgggttt

SEQ ID NO: 225301 - DNA, 2541 bp, Cannabis indica
gaaattctaactgatcctagctatgctggtcagtttgtcttaatgacaaatccacacattggaaatactggtgtaaattttggtaggtagctttctcttagtttttgtctttcacatgtttgcacttcattgtctctttgaacataacttcatatgtcaattacatttttgacagatgatgaagaatcaacacaatgctttcttggtggccttgtgatcagaagtttaagtatcaggtacactttgtgacttgctgattcagctgctccttttcataaattggtaaaaagaagtttcatggacatgatgtatttattttttatgcagtacttcaaattggagatgcaaggaaacactaggtgattatttagcagaaaggaacatcatgggaatttgtaagttaatttcccacagaaacttacattttaagattttgcattggcgctgagtggcatttggcttattattagttatcctttttcttagtaaattctgacttcttcttatgatgctttttgttgacatgacagatgatgtggacacacgtgcaattacccgcagattaagggaagatggaagccttattggtgtcttgagcacagaaaaatctaaaacagatgaggaactattgcaaatgtcgcgatcatgggacattgttggtatgatttcgaacaattaatagaatggttttcaatgaaaaaatccctcaattcttcatttgatttgttttgtttttgcaggcattgatttaatcagtggtgtttcatgcaaggccccttatgaatgggttgatgaaacaaattcagagtgggcttttaactctagtcgagatggagaagcatttcgtgtgagttgaaaaggtttttgttgaaataattttactgttgcgaactatcggtaattaacactgaatttttttggactgaaggttgttgcatatgattttggaatcaagcataatatacttaagcgcttagcatcttatggctgtaatattactgttgtgccatcaacgtggccagcatctgaggtgttaaagttgaatccagatggggtgctgttcagcaatggtcctggagacccatcagcagttccctatgctgttgaaactgtaaaggaaataattggaaaggttcctgtttttgggatctgcatgggtcatcagctgcttggccaggccttaggtggtaaaacctttaaaatgaagtttggtcaccatggaggaaatcatccagttcgtaatctacgtagtggtcatgttgagattagtgctcaggtatgtatctttcaaaattggtcggataaagtcatgttgagagtaattcaatatcagccatttacttcattcttcagtggcttcataaaaaacatggagataatgtgtaggtattgaagtcaaattaagaaatttccgtccaagattcaatagttggctcattcttaaaggaatgaacaagctgacattccttagaaaaattaccttaggcctactctaaggcctgaactaggagcaataaatatgaactagatatgtgactgagtgcttagctatgaactgaaatatttcctacttcatgggtattgaatttttcgcagaatcacaactatgcggtcgaccctgcatcactgccagaaggtgttgaagtcactcatgtaaatctcaacgatggaagctgtgctggtcttgcttatcctgctaaaaacattatgtctcttcagtatcaccctgaagcatcaccagggcctcatgattcagacaatggtaatgaaaataatatatatatatatatatatatatatataatcaagcttttgtaaaaattctaaagagtgattttatccatgaaactgacaaaggtgagtttgtttacagcttttagagaattcgtggagctaatgaagaaaacaagacatgcttaaaagagaaaatccagtgtttgtgtgattgatttatgttgaggtgggaaaaggctcaccattatttcaaggctcttatgtggagagtagcagtagagaaagaatggtttactttctctgtttttcttttcttttttccggtcaacaatttttttgcttgtattgaaaaaatagtagagataaaacaacttaatttggtccttaataattatggtcagttgtaacattgtagtttgtttgcttgtattaagtgacattggataaggattaacatgaattattataaaacattattagccaagtgagaggttgggttgttttggtttgtgcatgattaagtcatagctatttgctgttttttttttcttttgaaaggtactatttgctttgactttgtaattataatagtttaattaacctattaattttttttatttaaaaaaacttagttataatatgatacgcctgctggcgacaatgcactcagtcacacgtgtggtcaaactattagctttaacaggggacacgaatgaaaatagaaataataagaaaattataattgaataaaatttaaaatttataatggaataaaagataaacagtttttttgttattattattatt

SEQ ID NO: 225302 - DNA, 2399 bp, Cannabis indica
cagaacttcaaaaattcacacaatgctcaaatcaaatccaaacaacctcaaaccttccagacttgttctatataacccctagaacatttctatagcatcaaatccacccagaaagcacataaacaaaaatcaccattaaagcccaagctttgagttcgaaactcaaacttggttaaaaaacaactaacatgctaagttgtgattactgagccaaacaccgagttccatgttaccgggcaaccggaaatgacaaaaatatgaaaactactgaatgacatagaaatgcatctctgaattcaataataacagtataataattatttaaatagctataaataatttcataattaaacgtgattaactgctaatttccaaattaaactaagcggtctttacatttctccacctgaaactccttgggcaaggacatgtagaagttgaccctcttctctaactctggggtcggggtggattggggatggcaatctaataaacctataaagtaaggagtcagaatatggaaaacaagaggaaaaatataacttcaccaactaaagaaaggactaagacttacttgcaaggttgaaatctaggctgatggtaggaaccctcctcaacgggaagccaaaagtgtgaaagtaattatccctgaagtcatgtgtgtacttcattgaactggtgaggcatgggacactcttgttgtactttccaacctttaaaagcccaccttatccttgtgacctctcattggttgggattcgatctagtaaaaatacaagacctcttttggcgtcggcacaggtttgctgtgtttgacacaaaagatatacaatcctagcagcaggcggtatgcctgagctataagttggaaatgtgctaatcccactattgcacagaattcagcgaaataacacctaatgggcaggtgtgcccccatatcgacttgagcctaactccatatgatgaagcctccttttgtgcatttactgagcctctctctgttgagttcgtacttcctcatgttgttttaattcctgaacaagttgatatgttggttcattcccacggactgtcattcacgatcatttgggaagccttttgatgctccatcgtctcctcttctgaatcaacctcctttcatcgagaacgcttagtcatggtttctttatagaaagaaggaaattaaagcaattagctacctaacatagaaaggaagttgggggtcctctcccataaattgcttggagaggtcccaactagactcactacctaaaaacaataactaccaaaagttactcattctagacaggaagttaggaacaattcaagaagagagacgacaaaaactaacattaaatccaaaaccagaaggattttgggagaaaaattagccagcacaattattgcaaattaacctactctagaaattttgaaacgaaaaaaatttgaaaaataaagcagttcatgacgtctaagtctacctacggttgcaatcgcacggtcaagaaaccctaatctcatcccaaaatagagcatgcacatataattcaaaacaacgaattcaaaaaaatgcattccataaataaagataatatatctgatgttatttatggaaaagtcaaatcaattgttgctgggtttggctcaggaagttgattgcacctttcgcaaaggcaagaggctaaggcaatcaacgagtcgatttttgctacaaaatccaaattaatagtttcttctactgcaaccgtcttgattgttggtgatggaaagtgtgggaatttgcgtgccttaatccgtaacaatagacaaagacaaaaaatccatggtgttttctagattgatgacgaaggatgttcttcaaagatggtttgaagttctaaagatggcaagaggacttgggcgcttctaagggtttaaaatttgaaaaaaaaaagaagtaaatgttgtaaatggagctatcggcggtatttatatcccagggaggaaatccacatgaaaaagtaatggacgacaatgatattggcttaaatgacacgatctccatccaaaagctagggagatcaacaatctatgtatatcctcccatttaattctctctaaataaaggtgtgaagtaatgatgaagatgcactttttcagtttttgtgtcagcccgtgaacagccgttgaaatgtagccgttccttgaaggagactcctcgatagtcgtgccctgtaccacactcgactgtcgcatggacacatcatcatcagacgcgaaagtcagcttttctggtcgagtgtcctgtgaaatgtcactacttcattctccaatctccacgtgtgcaaattaagatactagagcaagctttaaccatgtgcagcattctgaaatcttggggtaaatattatctgcatttt

SEQ ID NO: 225303 - DNA, 4341 bp, Cannabis indica
agtactagaaactttatgattctgtagttgggaattaaatgttgttctaatgcctttctttttgtgtttactaaatgaaaaatctagatgtttctggagaaggattgagtttggtcttcaggcgctgggctacaaagaaaagtgcaggatcaactaagaatggacgagactcactgcccaaaaatcttggagtgaagaaatatggaggagaggtgagaagctgtttgttttgatactatgagaaaatgtagagctgaggggtttcgcttgatatagctgtagattttgtcatttttggtttttatcagtaaaagaacggtggaagttatctcaagtgacatattcagaacttcacacttttcatttatattttaaaaccaaaagcaaatagttgaaatgagaactctttatttttaaacccaaaacattatatttcttttcttattgtgatgcagagagtcatacctggaaacataattgttcgccagaggggtacccgtttccatcctggaaattatgtgggcataggaagagatcacaccctttttgctctgaaagaaggtgttgtaaagtttgaacgacacaagctgagcggtcggaagtgggttcatgttgagccaaaggatggtcatgtgctgcaccctgtttatgcagaatgtgcagcccccaagctggaaactatggcttaaattcttaatagagtttaatgtcaactttcttttttcctttcaaattttaatattaaagatagaagtcatagcctttttggtctaaaaacaattaattttcttctttgctagttcaacttactccgatttgagattcataactagtacaatcaataactttttgctgagagaccaggacctatctttagttgcacgaggatgtgtccattgttctctattgtttccatccacagattttcataaacgaggtggctaagagagtgcttggactcgctcgacatcatctgatcctcgtcctttggcctggtagaatcggagtctactttgatgctgcatttaagaatgggacagggactattgctgtggtgaatgcattgctaccagtcttctacttaattgcagtggaactgccaaggcccaagactttgaagctgaattgtgtggattcaagtttgttttatctatttgctccgggctttgcatctctggttatgtttgtctgaggttgtcttcacatatgaaacacaggcttttccttaccaaacgctgccctgtttggaagccattttatgtttgttgacgagtcattgttctccttctcgaatatgaaactgtcttgtaatctcagtgctcactgttctgcattctcagttagcattttggagggttttgcatgtctgggaggtgactcttgcttaccactagcctttcggagttataatttgcttctttaaatgaaaaagaaaaagaataagagaagaagcttattgtgtttgatgaccagccatgaaatatgttcggagttatatgcattttagttttttgtgtttgatgctcagccatgcagtaaccctcgattaactttcagtctgtcgatcccaaatgataatttacagtttacacattgctgagcttaaccaacaattgaagataatataaatcataaacattcatgtgattcaacacttaaaccaatgtaccaccaattgtttggcttagtggcggagattcgtcactaattttgggttcaacttgatataaataatagctagtttttctgtagcatttattaagttcgtttggtacatcataatatattttgatataaatcaaaatttcatataacattatacaaaatatgatgtacaacataatttaatacaatagatgtacaacacaatttattataatactaattcaagctaaattgtatcgcaaataaattaaaaaaaaaaaaaaaagttaactaattgatttgtaacatcaaatataaacttactcttcaataattcttttcataccaaatttttgtagctcaaaattatcctttttttttttccttgagataagctcaaaattatctttaataatataatctaaaaaacttttacaatatatttttttttttaaaaaaaaaaaaaaaagtcaaatttctttttgagaatttattttttataattagatatctataattaaaacacatactttaatatatatttatggtttcagaaatctagattaaacttttaagttatacctgctcactagattggcgagaataaataagtagttaagtaattataagagagacacaacaaatttatagtagttcacttcctgtatcgcgatagtaatggagctacgtctacttcaagtttttatttggtaattacagaaaaagattaagtatcaaaagctccaatttttagagggagaaactagagagagaagctctaaccttgtgggtagtattctgaacataaaaaatgagcttatggagctctcattttataagtgaaagagacccacaaaaataaggaagaaaatacaaattggatgtttttgaccatagatgatgatctaacggtgaaaattagctcttagtggcgatagccatttttcaaagcctggtgggtcccgttgcgggtaacccgaagcttatttttgtaactcccttggggtaaaatttgacgataatagcttcaaatttacgattaaaatgtgaggcatgacttaatagagcattgaattagctttgaaatgcaagttgaattgtgtcaatcataccaatattgagtgagttatggctgttttaactaaaggcggtgatgttgacatccagcgcccaagttgacatcccaacgcccaggttgacatatgacgtcaacttggacacttggtaagttcaaaaacatccaagggatgtactttaaggtgtctaagtgatattttggcatcacttagcctatttttgtgttctagcaaagttggtcaccaatttttggatatgttgctattctgtaaatgagagattcaaaactcttcattttcgtgtgagtttcccatgttggaaatgagaagtgcaaagttgtgattttcatttctttgacttcatggatcttagttattgtgaaaaatagacgaatgaccgaaacagaatcagaatcggataagcagaacctagcacaccaagctatttgtcaacctgggtgttgagtactcattcccgaggtcctcggatctcgttttgatatttccaaagttctagaacttgaggacgaggtatcctacaccatttttgaccattccagattcattggtcaaatcagatttggcatttgagcaattcaaggcagcgtcgtaggttgattgtcaacctgggcgttgggtcttatttctagggattcgagtttgtggttttctctccaagtttgcttgaatctttattatttttgatgatggaaaaaatacctggaacattttttggtaaacttgataaaaaacaatctaggttgacaatatgttcacctgggcgctaggtcctagttttggccctccaaaaatttcgtttggtctctagaaatagttgaatctcaatatcttttgtaaatgaagaagatgctctgaagatttcttaaaaaacttcattgaaaatggcccaggttgacaaaatgtcaaccatgtcaacctgggcactgggctagccccaggtgtcaatttgggcgctaggtcttgctttcggcacccaagatgtgttatttctaccacataaggacttatttctccgtttttgatgaagacaaagaagatgaaaagtttgaatctcagatctggaaggtgttgagattgatagattgtcagcctgggcactaggtgctcaaggcaccgggtgctcaaaaataaacttgctctgattttgattttgatgcctcaaatatgttcgtggtatgtatagttgatgtgccaatgcaattttgaccctttttcactaagacggtccctgaacttgaaaccttacttgagaatgtcaacttgggtgctaggtgaaaaccctaggtgctcaggctagctttcaagttataggttcatataatttcagatcctgagacttgaattaggttgctccatgtttttatggtaaaaaatactgaaaaggtagtgagttggattcaagtaattgaagtccgaactgttggattttctgccctaaataaaactaatttcatataatcagatttactaattaataaaagatcagaaattattatatgttgcctgattcacatgatttatttcatgattatatatgtttaatgtataaattttattaagtccagaccatatatatttgttcatgtttattgtgtcgtca

SEQ ID NO: 225304 - DNA, 2242 bp, Cannabis indica
atttagtgtttaacataaataattttatattatttaagtatttttattttactattttaattatttattaaatgaaaaatatgataaattattcgattatgtttttatgatatataattgattatataagatatattattttattttataatttaattgttttttttatttttttatgcaaatcattcatttatatttatttattattatatattttaattttaatttaatattatatatttttatttttgtttaagttttttttttaaaaaaaaataaatagaatagtttaatctattcttaaactaaatacaagattacttttattataatccaatcttacgggcctgtatggattaaataaacttaattattcaataaaatgtccaattatttttttaaaattaatatattttagaattttttacctactatatattaagaaatatgtaaattttgtcagtaaaatatgctcaattatattttctggcccaatgaacgatcgagcatgactactagagtctctgacctactttgaactgtttcaacacttttttcttactattttatctaaaaattttgttatattcgttgacatttgttcatgtaactaaattaaaaattgaaagaaccagtaactagtcactatgttatttcgtagaatcataaccagttaccacttaatgaaaatatgtaactatagtgtatatttatcatgtcgactagtagtattatttatataaataagtctcgtgtttctttttttattgaaaccaaagatcaaaatttatttattttatttgtttgttatgggatgccatattattaaaatttcaaccaaagtaccatacttgctagctgttaaaatgattatacagccacaaaaaaagaactttttaagcaaaacaaaacaaacaaggaagagactatgacatacttaaattacacatattttgctttatactatctataaatatatcattaaaattaaaagtgatgtagtctctaattaaaactatataactatataattaaatagacatgattgtgcttctgcattttgggcttaattaataatgctattattgaggcccaagcccaatagataagatggacccaacacttgtttgtccaacattttttttgttgttgtcaagatttgtccaacaattttttgatgcaaaaaaatactaaaatttgaattagtgactagaacataatataatcaagaagagttacttccaattttgttatatttcttctagggtcattgttttctacattccatctcagttaattatagttattaatagggataatttaaaaaaaaaaaacaaaaaaacaaaaaaaattaaaatatggttgtatagattttatttacataaagatgtatttttatgttgttactcttgttattttgtggttcatttttttgttattcgtatattcttttttatgttattttgttattgtttttctgttattttcacgtgattttttcgttcttttttttatttttataaaatactgtaaaatatattaaaaaaatattgaacataaaatataaatatttctctaaaaataaccatttatgtaatttttcctatttataaagcttaattatcaacatttcatataaataacaaaattttagagtgtcacaaggttctgtggaggagtatcctgtcaagtgctctccctgctagagcggtgatcgggaaacgtttccacatagaagacatcacttgccccttatgtggacggggggaggaatctcttgaacatcttttcctatcctgtgatgtggcttttcatctttggcgctcctctccctggggcattttcccagtgtgcgacactggcatccgtgtttgggattgggtcaagtttatctgggatctaaacaaaagaggcatcgatgctgatgcggttttcctatatgcctcgattgttgtggatactatttggagggtgcgaaacgagaaggtccataataattgttcccctgacataaaaaaatgtattgataatatttgtacttcttatgcagattctcatgcttctttgctgcctagtcccactccagatctaacggaagcttggtcccctcctcctctggattggatcaagctgaactgtgatgtaaaggtgggccttaatagtctgtgcatcgctgttgttgcaagagatcattttggcaaggtgattagaattcagacggctcgggaagatttctcggatg

SEQ ID NO: 225305 - DNA, 2888 bp, Cannabis indica
cccactggttttggctggaaaaatctttctggtccctctgttgataaggaactccatagatattggagcttccgcaccaaacacaaagttttatggtcaccttgtctaactatggaggtgcagttgtgaaaggacaaggcttttctggtatgaagttgctgtaaccattgatgcagtggattggattattgacacattggaggagcttcagcagaattctgggacgcaaatagtcagctttaaaagatattttaggaacaacattgctagttgtttttggaatgttttttaaatgctaaaggaacctttctaaaactttgccttgagaaacaaggtgaatatgattattgtaccaaaagaagacagcgaaggggtggtcagagttaagaaaatgtctcaactgagaggatgcaaaagagatgcccctttttatctttatcccctggctgtgtgtttgctgtaaaagaagtgaagaagatgtggatcacttgtttttggattgttgtttcatttgtatattatggtttaaattgttggaggaatttgagttgtgttgggtgttcccgggctctattaaacaaatgatattgagtaaggtggttgggtgcagatgcaagacaaagctttggaggactgcgatcctggcaacattttaggctgtttggatagaaagaaacatgagaatatttgaaggatctgaaagttcagaaacggatatctaggataaaatcaaattctagacagctatttgggttttcaaaaccaaacattttgaggacttatcatttttagattttagggattggaaatcactgatgtagagattggaacttttgtttttgtcttatctccttttctatgagatttttgttgattattttgcgcttttgagtaatttttcgcttaaattttgtgaccacgattttcctctaccacaagtgagggctctcaatacataacaggggtggccagacaatggctgctttctctttttcaaaaaaaaaaaaaaaaaaaatgaagttctaaaacaacttattttcttactatactattgtaagtagaattctgttggtagtagttgtgggagggtatataaatagcaccctagtctatagttgggagggtaaatgtaattgttttgttaaagaaagtaaatagtactattgggagacaccaaactcagattttcgaaaccattgtgcgacatttcttggatatcaacaaagattggacttttgattcagtattcttataatgattttaagagttgcctttattgtctttgttgcagctctagagatacaattgtgcttgccttgagatttttcgttcgtagggtaagtgttactgtctttaagtcttgtagtttctgcttatattttatcattggacatgaaatcatgtcaaccctgcgcttgtgcttattgatattattgtttaatcaaattttaattgataatggtactaactagcaggctagtgaaagaagaaaaggaaaaggaaagaaaaggggtctattcttttagcagagcaattatttcttccatcaagatggttcatgttgagggtccacgctcccatcgagcattcattcatgtgtgctgttttgagatttccgcattattatcataagcaagaaggattttgtgctgcaattgtaatcttttgcgactattagttttctattttaggtacattcccattccccttccccttcccttctctccttgaactaacctagtatccagcggtcttaactggtacgactacagctacattaagcttggagaaatgaccgtcgttaaaaaaaaaatatattaaaaaagatatataattttttttttcttaaatgtcttcagcaataaaaatatgatttctaaagataataatatagaataagggtgtaggtatttggggaataggtcctttggcgcaacgtggataattttatttgtcattaatataatttatgtatcgattatgaatgtgcattattgcccatgtaatgtaaaatagacgtatagtttcaaaatacagaaatgcattccaatggtttctctactctatattgattttcctaatctctattatcttatctacatattttattgagaaattaaaattggttcactaattcaaaactatttaaaatttgtaaaataggttaacttttactaaaattctattttactgaaattaaaattggttcactaattcaaaactatttaaaatttgtaaaataggttaacttttactaaaattctattttactcatctcattctaaaaattgactctcttactcccttttctctttctcttgatctctgttaaacccaccaagaccaaggaaaagagcaattgaacccaccatctgagcaccactcgacccacttcactcaccacccagttgacccaccacgaagacaaacaaccaccaatgacggtttcctcctattgtatttttgaatatttttcttattgatttagggttaaaatattgtttattgataaaaaattagggtctgatatgtgcgttttgattaggtttagagttgaatctgtgatttttgggttagaaaatgcattttctaggcaggttcaatgtaggtctgatgcatccccgatgtaggcccaatgcatagtgatgaaaaatttgatctgggttgaagacaggctcggtatagggcccgatgactagtttgattgcagtcaatttttccaaaaaagctgacagacttgttccgataggtccaagatcaacaagacaatatcggacctactgggccctatatcgcgcccatcggactatcgggctatcttcttcaaccttcaatcgcttcaacattaaactaccatcaggccctatatcgggcctacatcggacctg

SEQ ID NO: 225306 - DNA, 4001 bp, Cannabis indica
tatttatgaaataatccctaatattaatagattgagcatcctaacaaattaatatttgagattttcatcacctaaactattattactactactactaaattgtgtcttatacactttttttttttgtcgaaattctcctaaactattcacactacaaatgtataattatcatggcaatactgcataagtaaatgtatttatttaaaaataaaaataaataaataattttatatttaagaaaaaagaaattaaaatataatttattagaaaaaataattaacaacaaaatccaatcaatctatgtatcaatttatatatatattctataaaaagtgtgtctatgtaacagaattcttggtttaatgatttattttcttttaataaaaactatcaggaaattaacgtctccgttaactttcatctacctctatcatccaccaagtataaaattaataataataaaaaaatatcacaaccccatttatcgcaatttcaatcgtatacattatatttcttctctttctacaacatacaacgattaaaaacatcacaaacgcatatatagttttgggcttaatattgggtctccctattgagcatcggagcttgaattcaagtttttcatagaattcaagtttttctttttctttttcttgccgaaattgatgtctctctacgtggaaaccccgaaggggcaagacgtgtttgctttggaggagattagtgtatcgaattccatagggattttcaagaaagcatcaaagccgttggttataaatggagaagcgcatcagattccgttcagtgataacacattttatttcgtcttctcaggcgacgaccggctggaaaaatctccacggctgttagattttgctttagagattgtacggacactaaaactcgaagggtatgcggttgttcatattggggcaaaagatacgtatagtttcattcatttcttgctttattcaattgctccagctcattaacaatacgtgatatagatggttatgattcatccatgccttttatatgtgaaattatttttttttttttaaaaagaatgtgtttttcttagccaagggattaagaaaaactctcataaagagaatggtaataagtgtttagctcctgggtacaaaaaagattgggttaggaaagctgaccaattgattatggaagaacccttaaaggcatgacttactttgaagaggaacatttagaatgttaagtatctgccatcaatgactgatataagccttaagagtaggtatgtttatgttgatgttggtgaagaaacttaaaatatggaaatcaacaagaatttaaactatatttttgcaattataaagctttgaaattgctcatcttccaatttttgagaattcaactattagagtctgtctttaagaatggtttactagattgatggcttgacttctgcattgtcttaattattagacattaattgattattgatcttatgaaattcaagccacataaagggtagtatgaagctggtaaacaaagacatcaagaaagtcgtcggagtagaaaggtttgtttgatcttcttgaatggtgcaattattagtttggggtggaaaataacatgaaatatcttttattttctttattctctcaatttttttcatttaggatgataatgatgaggaaagcaataatggtggttgggagtttgttggcaaaaaaaccccaaagacaacaacacaaggtatgttttcttacatttcttctagtgttggataccatttatgaactcaaatatttgaggcattttgaactgtctaacttgcttgcaacaacaccaaaggaccacttgattggatgttgatttgtattgtgatagtgtagattatttgagggtttatatacgattgaatcgagaatttctaaaggtttgacacttaaccacttgagtttattgatacctgggctatagaagaaatggattttcattcttaggttttaggttcactaatgagaatttgtaagaagaattactgtatatggctgacttggctttaaatttaataaacagttggctacccgtacttgagaatttgtaatgatgcttagggatttaataagtattataagaaagtgggtgtaaactgattaaacagactcaagaggggtagctcaaatggtgagcatgtagttttctctcacaagatatgaggtttgagtcccttctgggcactagcataacaattgctatagtttcctagcttctaatattgtagggttaggggatcctactttaaaatgatactaataaaaaaaagtgattaagcaagatttcacaatcatacattcttggttctatttgcaattgctctctccctctttgatacatatctacatgtaaagaaatgagtttctatttatctttgttgggatagtggggtgattaaagattagactcggaaagataaaatttggctgactacttggttgagtgcgtatcttgtatgtttctttagtgtatgtaatagtactttcattatatgggtcctatcctaggtagccaagtaagccaaactatgtggcattatctaagagttcgtatattcgttggtttacatttgaagaaattcttaaaaaaactgaatattaaaataaatttatcgttactttttaaattttagttttctggtagattgcttttttattcttttctaattaaaaaataatttcaaatttagatatttgtagatttttttggttaaaaaatttagatattggtggttagttgtaacaataagtatttataaaactattctttagtatccactaaatcatagcatactaatttgtggtgttatacccgaaattcagctggtacttcagaggatgacatatgtcaaccttggagtatacaaatcaacaaatataatggcaattatgttaaagaatattaaatgaaataactcattaaatgcaaagtcaatagggtatatttataactcatagactgaataatctttaacgagacaaggatgtacgaactattgattcacgtattgatgagaaatcattttgcgtcagaggacacagtcatatggaggacatcaataatacttagcgaggcatgtacctggcgatacgtagagaaatgatgacgagacgtgtttgctgttataacacttagcatgtaaagaccgcttagcttaaatttggaaattagcagataattaggatttaattatggaaattattattaattccaaattattaatttatgatgatttatttgaattcagaatgcatttttgtgttacatatagaaatttcatgattttgctttttcagtgccaggcaacattggaacgcggtgtttggttattagaatcccatcctagtatttttagtatagcgggaaagtttagttagaaattgggaatgtcgagattagtcgggattttggaatttcccaaaatacccttagtgccttttaagtggttttggtaagggaagggcaatatagtctttttgccattagtagtttgtcctttagtggacttagtttaattaataaattgattctcttttatgggttgtatgctgatattggtatgttaataagcataatctattcatttttataatttttacaagaaaataagaaaatttccaaaagattgcatttcactctcaagctctctctctctctttcgaaaccctcaaaaccagctagggttggtatgtttttctccattttacaagctggttctagtagatattaagggatcttaaactctaggtaagtctcttgtagttcactctttggtttcttgtttttgaagaaaatgaattatgcaggctttgtgagatttgttgttgtagttactgttagtgtttgttgttgttttcagtggttatattatgctaggttatgttgaattaggcttgaattgtgggatgttattaggtttgagcaagctttgagttttggaactcaagcttggctcttta

SEQ ID NO: 225307 - DNA, 3239 bp, Cannabis indica
tttaacatattataaatatttttaaccatatttttaattttattattatttattttatattttaaattgaattcacacaccacataaagtttgaaataaaaatttatatttatatttaacccatatatagacacactcaaatttaatgaaaaataattgagatataatattagtgactcatttaaaggatttttgaaagagagaacgcaatatatatgtaatattagctaggttgtaaggattcgtttctagggtgtagagatatggacagtcttgacacaaactaacacacacatccattaattggtcatgttggatttattctttctttgacaaaggtatcatataccacgcgcaccctaaagtgaaaatataacgattttggtgaaaagtttattaatatatagtagaaagctatttaagtttggagaaaaaaaaaagtaaatgccatctgtaaaaaggaatgatacagctgcatgacaaaatagagaggtatatatgcgtactttgtactatatacactaactggtccctactccccaaccaaacctaatcttaacttggacaaaataatcatgcatgtgtacgcacacgtttatgttatgttgttggattaatatttaactatatacaattgataaggatgatatagatttttcagaagtctatgcatcaactatattaacatacaaacttatatgatgagtgaaaaaaaatgaacgtacgattagtcatacctatatagctataaatagttatatatgattttggtttacttttactcctcattcattattaacagtatgggccggtttttgctttagagcactctcaatagttgggctaaaatagtttaatttgagacaaaattacaaaattgagcttccaacaagtgtgataaaacttagttattttacatattttttagctcaatgaatagtgtttaactaaatgtataaataactattcattaaactaaatatatcttaatattattttctttaatttttcaatatgtgtaatattatatgagttatgaatataaaatgaataaaatatactaaaaatataatatttaaatgatagagaaaaaatagagaagttgatatatgatataatgtaaaagtttgaggtaaaatagataaaaaataaagttttggtgttatattttaaagaatagaatagaaaaatattgggagtgcttatatatgattttggttttatataaatttgatagtcttctcattgttttatatggaggagaattatctaaattttgtaattaaatagtgtgtttttggctaaattcaagaaaaacaatatcattattcttagtgaattcaagaaaaataatagaatcaattaattaagaatcaattatatttatatgaactattaggtactagtggggtctagcacattatagacgtgtcacgttgcgattgactagtaatatactttaaaagttattatattaaattatataggacctgatatttaattacactaatagtaatattgatacgtaaaagggtgttagccaccactctatttatatgtatatatcgttgaagagtcattatggactctaactccaagcagatttttctatttacccaccaattatttagaagttgctacaaacacttagcattaatagagaaagaaattgactagacttttctagctttgggtctaaactcaagttaaccccaaataaatctaaaaatttctagtcttgcatgtaaataactagaattttctactcttcataatatagcaagtgccaccgacttttggcatgtatatataggggattattggttcccttgtggtgcgtggtgagttatgtaaaaatcttaatgcacaaagtgagtgcgttttagtgtcatcaattaagtcctactaagagtgccataaaactagttcaaaaatattaagtgttcttaaaaagtgtaagtaacttttaagtagtgtgagtgtcttgtaaataaatgtgtgagagtaatttggttatagtagaaagtttcagtcttggtgtaatttcacatgtatgtatgagtacaagaaatgtcatttttaccagtacagttcgttattatgctggtaaaagttattagaaatgtcacttttacctaacacagttcgttattgctggtaaaagtaacatttactagtgcatttcgtcaaactgcaatggcaaaaagaatcaaagttttaccagtcgtacatttacagtgcctaaaatctaacttttactagtacatttacgcgttgggaaaaatcttttttgccagcgcttttcattttaagcaaaaaaaaattctaataccaacattgatttgccaacccttttttgccaatacatcatggataaattctattttaccagcgcaataccaactagtttatatataactgagtgtgtatatatcaatgtatataaatagagaataagaaaaagaacaaaagaaagagagagagatagatttgggctgaagaagaagaagaagaaaaaggaaaaaaggacagatctggctggttgacggtagggtttaaaattaggtttaatttatttatttttaaaattttgattcagtttttaaatattcttgtggttaatttaatgttttatttaattttagttttaaaataatttcaaaatgaaaatttaataaaattaataatttgaatcaataagatactgccttgtagctaggtgagtatgtacgttaacaaaaaaaaattaatcttattatggtaaacttggttagcccttaatgaaaaaaaagtggtcttcttttcaaaaaaaaaaaagttgttatagtgcttgtattatatgtggagtgacacagtcacaataaatcattttatatatatatatgtgatttggttattctcgatcgtcagctactttggaattggcatttccctttccattcgctcttacatatctcttatctaaattaagttggaactttaatttgtcaatttcaagtcaaagagatagacttcgtatccgattctcgaactcactttctttttcttacttttgtaataactttatattatatttgatatatataatatttatattatttgtggggatgacgaagcgcattgtcgtctaccgtaactatacatagtgtggtatatatgccaaaaaattctaaatgaaaatatcaacatatgtgcattatcaattatggcatatgacgttatctcaaaaaaaaaaaaaa

SEQ ID NO: 225308 - DNA, 1612 bp, Cannabis indica
atttattttttccaagaatgtgagtgtgggatgaataactcatgcagatgtaagttttttttcatcatttatttaatatttaatacaaaagaatttaaatggaagataatcaactaaattttgtttattagaattttttatcaaaattgatgaaaatgcatatatttttatgtaccatatacataagtcttttaaaattttaaagtggtattatatatagtagtagaattatatattattctctctaaaaaaaataataacgcactagaattatattattttcttagtactaaaattgtatattttctttaaattattagaaaatttatatcaaaatttttacaataatagtgtttgtattaataattattagtttaacttattatttaacataaataatttatattatttaaatacttctatttattattttaatcacttattatatggaagcatgataaaatattaatttattacaaatttagttatatatttcatgtatatttaatttttgtttacctagatattgactctagtgacataaacattaatatttgatgcgtagcaagaaagaaaacatctcggagagtcataacagtcaatctaggaagagtctttagtcctgcgcccaggttgactacgggaattccaaaatagatatttgaatcccaccaaattatttccaactcaccatctttagtattctcaaccaagaggataaaagaatccaagtcaaatgcttggaaactaaaacgatacaaaacatcaccctataagtcaacccaggcattttctttgtcttcatccaaaacgaggaaccaaattctttcagcaaagaagtggatcaacatggaggccaaaattggaatccaacgcccaagttgacttggtgcaaggtccctatgcccaggatgctatatttttaacatgggccacatccaatagaagttcagatagagtcttccgggcatattctccattttcgtcaacaattaagatttgggtacttttaggaaataaaaagagccatttggaagccagaactgataccaacgccaatgttgacctagtgtggggctaacacccaggtttatactttgtcaacatgtgccattctgaaataggttttttcaaaaagtcttctaggcatattctctgttttcaccaataactgagatacaggtacttttgggaatcaaaaggaatcatttggtggtggcgctcaggttgaaactattgctgggcctagcgcccaagttgacattttatcaacctgggcaatttccagtcagttttcccaaaaagttttccagacatattttctttttctaaaaataacgatgatacaagtgatctcagggagcaaacaagatttttaaggagccaaaatagggccccaacgcgcaggttgacattcaacctagagcgtgtggttttgcttctcaaataaaaattttactctggatattcttcttattttggtcaaaagcggggtaggagacctcgttcgcaatctcgaatttcttagaagtatcaaaacgagcactgggaaactcctagagaagcaattcaacttttgtttcaaaggtatttcaagtcatgtctcacaccc

SEQ ID NO: 225309 - DNA, 2626 bp, Cannabis indica
gaacaactgatttgaagagggagattgggtatctagacatggtatgttacaccatccaaccagcatctactttgcatttagctcacatgcaccagccagaggagaagcggttggaaaatcttcagagataccttcactaaatttctaagcatacaaatcccgatcacatccttgattttgttggatagactcacactgatagaagagaagatgaaacctactagtttccctttttatttctcttgatttaggaaagtaattgaattttatttatttaatttttttttggtaaaccaaactgatgtaattattttctataaatagttgagccatttcactattaaagcatccaaaatcattcattcaaaagagcatttaagctgctaaaaccattgtcagagtttttgaggaagattaagaacctcttgcttcttttcccttaagtcaatataagtaaaaagggagtaggttattactacgatcacgggatcgaacttctataataatctatgtgttctctttgcttagtcattattactaatcatttctaatcgctttaattgactcattgtcgttggctaaaagcaaggtcaacactaccttacccccttggtcaagtagacaattcaacctcttcctctatctccactcaccctacaccctctaaaactgtcaataacaataccatggttatcaggtaaaaggctggagtgttcaaaccaaagaatttcctcttataagtaacactaagttagaacaaaccactgtaaaaaaattctcttgctcacaattactggaaacaagtaatgcaacaagagttcaatgtcttacagagaatttacacttgaattttggttccccctaatcaatatgtgaaaattatcatgaacaaattgaattttttgagttaaatatcatgcacatggtactcttaagatgtgtaaaaatttgttagtcagaaggtgtttccaacaaacacctagcctgtacttttttgaaactttcagtccttttctcaagcctcgcacaattagaatcattttctctcttctaactacaaaatgatgggatatttaacaagtggatgtcattaatgcattcttaaatggagaactaaaagaaaatgttttcatgtagcaaccaaaggttttactgatctaaactttttagatcatgtgtgcaagtttaataaggctctctatggcctaatgagatttaacaagctcaagtcatctctaattcaatgggggtttactaatttgaaatttttcccaagcttgtttttcacaagtactaacgggaaagggatgataaatctaaacctcgcacaaccttacaatatacatatcgacttcgaaagatctaataattgagaaataatacttgaaattaaatatatacattcaattcatacataaatatacgcaatgtgtcattgtttataaccacaaaattttgaatataagtctcacaattggtgatatgtgaacacacaaggacaattctagttggggagctcaaaaggaattgctgcaggcctcttgagttgagttttgatcctgaacaatttttcttaatttcttcttttcaaactagaaaaagttgatgtaaatgtctctatttagttacattttgttcagttttttttttaaataattttcttatgtgacttacaatcacatattgcagtatgagaatttatttaacgtaattaagctagttgaaattcaatttatattgacactaattaaatattacaaacattgtacataaaaatctaaatatatattctcaaaatttgttattagacttctatttatacatgttttgttacatctgtactcttgaattacatgagattatagtcatgttaatgctacatatttacatgttattttaaaaaaatgaacaaaatgtaatccaactaagatattaataatttgttatatgatttaataatttttttactaaaaaaaaaactaagtttatgagagaaaaatttacaagaatcatggttcaaaaatcatatttatttatgtaaattttgatactctcgtaaaatgattattcaattaagctacttcttcttttgattttttttttcttttctcagcaagctattttttatttatttttaaatatctcagcaagctattgattaataaagttagctatgttttgttatttcattgatttaatttttttttagagaacacgtatttttgttcggtggaagaaataaatgttttcagctcaccaacacgataatatccttttgtttggtagtcggtagatgtaataaataatctttctaaaaaaaacaaataataaattcacgcaaaaaaaaaataataataaataaataataagctggccaatatcaatatcaatatcaatcaatatatttatataaaacagagttaaaaagtgatgatgtgacattttatattttttttcatagtatttttatcattttgtgagagttttaaattttgtctaatgaaaaaaaatctactaattttgtaaaaactcccacattgtttagaagtagtgtagttttctatatccaaactataaagaagctatactttgccactttcattagtccaatcattattatttgcta

SEQ ID NO: 225310 - DNA, 5680 bp, Cannabis indica
cataatattttttagtttaatttctaattttttctaaaaatatttttatatttgtatattgaatttctaattatttctctttactttttaagatataagtttgtaaatatcaataagtttatttttttaataacaaaatcttagttttagtttgtttaaattatttattagattttcaataattttggtttaattttttaaaatatatttagattttttaagtaaatataatatttttttgagaaattatcctatatactatttttttaaaatttatggtttgggttgctccggtgatttctctagtagtttttatataggttgctaggtgaattttagttgcgatttatgttgctctgttagttgctatagaagtttccgtgtggaattccgtagaaatgcaaaaaaattgttttgaagtataaaaaatgaatttttttttttattaattttgattatataattattttttaaaattaatttttctaataaaataatgaaattttgtattgatcataattcagaaaaaaaaaattattaatgtgtatttttaaaagaaacataactcaacaaaaaatgacgttatattttaagaaattttttaataaattatatattttagaggacataattagagtgttttgtaagaatagcttttatgaaaatttttattagcaaaataattttttatggtcgtaaaaacgattatcaattacactgtgcaatcataagcgactattatgattgcataaagtaaattaagtgtagttattttgtaaattttagtatttcaattttccacagaattaggtagtgctaattattgaaatatttaatcactttttctatttctcctcttccctcaacagctatggtcatttcatgctcaagcatccatggcttccttccacagtcttcactcaatgatttcttcaggtaaattgatattctctttttattctttcatgtttctgcgtctctatgatctcttccactttctatctctttcaatatcaatcttaattttagtctagttttatttcactgtaattattagatctggcttgagaatccgattaggtctttaaaatctgatttcttccatcaacgaatgattttaacttcaaactgtttgttatgtgtgggtatttatgatcttgaagccattgagattatttgagggtgaattgtaattggtttacactggctgatttctcatatatgtctctacttcttgaacactctgtgcctatatctatttagtggtagcaaaactcaggaaattgctcatttttcttcactctatcatgtttctctcttttcccttaaacttttctcttcgtatctttcagcagagtctcccattattgaagcattatattaaaaggttgttgagaaatataagatggagattttgcttatctatttaatggtagcattttgaggctctttgttttgtgtgtgtatgtgttttttttttttataaaggtctttaacgattggagatttgcatggttgattcgatgtgtacatgtatataatcttatcctctatacgaaatggcagtcaagactcaagagagtttaatacttgagagttatgttaggataagagtctttaaactttcaagtgctatatatgtgattgaattttatgactaagatattcaaaaaaggggtattaagttaagatcatgtaatatcctatgtgttaagcattggactggggaatccatataagcaaagttgttttgatagctattgctacttttatgccatttttgttactttttgcagctcctccaaaggcctttttattctttatttttttataagagaaaatatagaaaatttgaagtttttgctttgttcttcttaattatgtttattgtttttcttagatatcttttaaaggtcttgaggttttcttatatttatgtgagattgtagatatctatgtgaatccttatatttgtatgtttagtatttgtgttttcctctgtaggttttggtgtactattagtgagatttaacctgagagagatataattccatcttttgattatttataatttgtgaactgcttctacatttcacctttgttctgacaataaggactctgagttaacaacacacaatcccaattccaaacaaacatacagattatttaaaaagacacacatttctgttgtttttaatccaactaaagcaaaggattagtctttgattataacggtttatttttttatgtgacactctatgttttttcactgttagtgagtgtattgctattcttgttggttgaaagccatggcaacatgtacttttcttatttttttccctttggatctgttatctttttgtttctatttgttttttagctttggtgtttaattccttttctagttttgccttttcatctgtgaggttcttctgattttttttctaaatctgcgccggtggatttttcttttgagtgattttgtttacttcttttgtcaattgtgtttttcatcttcattccttgctgtatttttcttgcttctggtttggtacaaggttatttactgaattattgttgattttcctgttagtgctaaatcattgctaatttttgtgccaaatttttctggctttgtttttgtgatattttatggctcagttttgtgttacagacttacagttcttggctttgtttattgccttttcttggccttgttttcggttacactgtatattagagtaataatttttttgaatgctagatcagagtaataataggtatagttgtctattacatcattttataggtcaacattttagtattgatgcacttttatgattaatggttttaccattacaaatggatccgagttttatgatataattcaaagagctttagtgaggtagtcttgtgcgttttttggggtgtgtaatgtattctaagagtcaactatatgtttctagcatataagcattgattctagttttaaattttagatcaaagatatttatagaaatcaccttttatgttttttttaaggtggttctgtttacttattgcccggaacataacataactatccttcatcttgttttctcatttttaattataatgcctaaagtctaacgaacgacattcctctggttagagaatttgatgaaacaatatctcatattaaaattatttgaaaggagattcttatgtgctagttttttgtaatacaggtagtttgtcagcttttcaggcagaaaaacctactcttttggtggaataagataggctcaaggtattggtctactattcaaaactttctactctaattcatcatcttttgttttagctttggttgacaatattgtgtatctatacgagctagattttttttttattccaatgcaaaagctatattgtctagtttttattagagctgtacataaattttcgtaatcctcccaaaccgaataactcgcctaatccaaactgaaaaactcgacgaaaaatacaaattgaaaaactcgacaaaattataaaccggccagtgggttaaaaatattatacaatgtagtacataattatacctcattaatggtacactagtaatttttaggtatcacaatgtaatatatactatttagtagccaattatatataatataattataatttgtttggataccaatttatatgaagttattaattttagataccaattagtatcaaattgcatatgatactagtaagtatgatttttttagattgtttagtatactattaagtgcttttgggtaccaattaataatatgttattttagatatgaaaatattattataattctatagatactttagatatgaattttttttaaaggatttggttatactaagttttggttgtcaaaattgcaaataatttatttgaaacatttttaggtgtagtttttttttttttttgtaatggaagttggtggaggaggaaaggaacaatcaccggttttactgtaattaacttaaattaatattactaaacccgtctcatgcccactttccagtgtcagatctgataacactcactggccaacgccaacgccatcatcatccccaaacctcgaggtacggaggtagaggtaccaatcatcaatctatgtctctctcctttgtttttttcgctttcatttgtcttctttgtttcaatttttttatggttttagaacatttgtgaatgaacgttacaggttcttcatcaagttttaattattctgggaacatttaattaatggagggattagtgggttcttctcaagtcacgcatattcctcctacacattgtagacaaagtcttgtaccttttgttcctgcactttcgttgaaatttgcaccaagttcgtatagatgccatttcaggatgaagaaccatcctaacaattcatttaacccaatcgttgcttcagatcaactactggaagaaacctcagtccctaaccaatacgataacacacagccatctaaaggttgtatataaaatcattttgagctgtgagatatttgataaattgaattaataaatgataaagttgatgaaaaaaaagagtatatatatattataattttatgtttctactctgtgtaagtactctgaagatttaattttcagttcttgtaggagtttggtcttattgatttcttattgaatagatcaacttgtgcattgagttttgttaggttttttgtgttgttatacaaggacttcatgaattgggaattaagaatttgtgctcatgagatggcttttttttcttttgtaaatgagcttcttggctgctttatatggttgcttattttttatatattatatataggggttcttaatctatggagaaatgccaatgctgtgtgctttgacgtggatagcacagtgtgtgtggatgaaggcattgatgagcttgcagaattttgtggggctggaaaggctgttgctgaatggacagcaaggtcagccattctttcttgctgcaaattcttacacttctcatagtcatagagattctcatgcctgaattttgttcttcctttaatttgttcttttcagggcaatgagtgggtcagtgccttttgaagaggccttggctgcgagactttccttgtttaatccttctcaatctcaagttcaggaatttcttgaaaagaggcccccaaggtagaagggttaccttcaaaatttgtttactctagctattataattgtggatgtctagtcttgcttttgctaaataagaaggaaatattcacattatcatttaaaaaaaaacatgcaagagaatctggtttatgacatctattatcaataaataatgaatgggggtcactggaatatcatcaaaattgcaatgtgtaagtgtatacatataagatgtgagctttaaattttgttgattggagtcaattgacattggaatgtatcttaaatagcatattatgtttctgccatggaacgacagtatttctattttcctagctaactatgtgatttgtaatttgacatcacatgtcataagacttctacacatatgttctcacattgtttttgatagtattttgtactatgtataaagtttatgtttcataaaaaaataacctcaacttacttctaaaggtagagatgtttgctaaacaaaatgtg

SEQ ID NO: 225311 - DNA, 2653 bp, Cannabis indica
actgttcttacggtgtaattctcaagattcagagtgttgtatgctctaccattggtgtttgtaaactgtctaattctttattaattagagcttgatgctgtttcttagctggagtatggccaaggatcatgttagatatcgaggacaggaaccaagataaaaattggcgttcttactcttgtttttttctgttctttttcactgtgttgtttaagtgtttgtgatttgttgttgttcattgaaatggttgttttgtaggtttcactcaagaatcttgttcttgttactgtcaaattttcaacaaattagagcaaaggtttaaaatccatattgagaagggaaaggttcaagattcaatcaagaactcatctgcactaagccatgaatagaacagcaaggtttgaactcgagaagttcaatggaacaggggattttggcctgtggagagaaagcctgaagggaatactcattcatcaaaaggtttccaaggccttgaaaccaaaagaagaactgactgagaaattgaagaaagaaaaacttgaggatatggaagaactggcctactatacaatcatcatgtacctgtctaacataattagaagaaaagttcaaaacataaagacagctcgagaattgtggagaaaacttgaagaaatttacatgacgccatctctaactaacaagattaatttgttagaatctttatatggttttaaaatattttctcatttatctctagatgataatcttgatgcttttaatcaaattattataggcctggccaacatgaattatgcagttgatgaggaaagccaagatgtcattctccttcaatctttgccagctgcataccaggaacttaatgctgtgatcaagtatggaagggatattcttacccttgatgatgttctgggagcactgaaatccaaagaacagcagatggccaaggagaaacataaggtcaaagatgaagcttacctggcttgaggaagagacaatacgaagggaagggatcaccacaagagagatcaatccaaggaccatcatagattttagtcaagatcaaaatcgagagggaaatatcacaaagaaagaaagtgctacttttgtgggaaagttggacactttagcaaattctatgttgagtttaagaataaactcaaagaagataaggaaaagaagcatgattctgcttcaaatgtagaagacacatatcattgttcatctggtggaaacttatatatggtttcagatcaaagaatcactgaagaatggattcttaattctcgatgcacacaccatatgtgtcctacccttgaaaactttattcattacaaaaaagttaattctggtcaagtactaatgggaaatgataattcatgtagagtaattggcatttgaaaggtgaccttcaagcactatgatggtactattcgaatgctgcatgatatgagacatatactagaaccgagaagaaacctggtttcattaggaacccttgaagattaaggatatagctacaaatcaagcaatggctagatgaggatagctaaaggatctctcaccatcatgaaaggttaaaataagaatagcttatacatgttacaagaagaaacagtagtggcttcagaagccagtattactcaacatcaagaatctgaaatggaaatatggcacaaaaggatgtgtcatatgagtgggcaaggaatcaaagaattgacaaagcaagggctcctaggaaatttcaaaccaaatacactaccattctatggagcatgtgtgttggggaagcatcacagattgaagttcatggctacacacacagttcaaagagaccattggagtatgttcatgttgttctgtggggctctcacaaagttggaacacactcaagtaaacactatctattgtagatgattttagtaggcatgtatgggtttaaaccatgaatgaatgcttagaaagatccgaagaatggaaatctaaggtggaaaactagtatgataagaaactaaaagtacttagagcagataatggcttagagtttattaacattgaatttggtttgctctattctgagtatggaattgttagacatagaattgtaaagcacacacctcagtaaaatggtattgcttagaaaatatgttggattttattaaataaagtgagacgcttgctgattagttctagttaagggaaaatctattggaaggaagctcttgttactgcatgttacttgattaataggagccctagtagagtcattggcctgaaaactctctatgaaatgttgcatggcaccactccaaaattgaatcaattaagaatatttggttgcattgcctatgctcatcataagtttaataaattagaacctaaggccactaaatgtttcattcttggatatcctaaaggtgttaaaggatataggttgtgtcaaattgaaaatagaaagcctaagattgttatatctagagatgtaattttcaataagcatgatttcatgcacttgacaaccaagaaagacaaagattctgatgttgtaggtattaatagagatgatttggctgaggtggtgatcaattttgatagaatataagtcccaacttaatcaccacacacaccaacagcatgttggaaattattttac

SEQ ID NO: 225312 - DNA, 4256 bp, Cannabis indica
atcgtttcatatcatttccctcaatcataatcgagtcacaacgataataatcatttcatattattcacctcgatcgttatcgagtcacaacaatgataatcgtttcctattatttccctggatcataatccactcacaacgatgataatcgtttcctattatttctctcgatcataatcgagtcacaacgatgataatcgtttcctattatctccctcgatcataatcgtggcactatcgaccataactgattcgtatttattcacttagctgctcgatcataatcgagtcataacaaatacatattattaatctcgatcttaatcgtggcactatcgaccataactgattcgtatttattcacttagctgggctcaaaacttttcttacctcagtccagatattaagcatgcatgccagcctaagtgaaaaataaagcttgaagatcccgggtcttatgtcacgacaacaatattcaataactaccgtaaactaaaatccgaaaacaaaatcctaatcttaaactggacataacctaacttccaaaaatccccaattaggctacacaacataaaaacatcttgaaacagatactacacaaaatcccgagcaaaaacagaacctaaagaaaacccgaaaaattccccctaggcaactggtcgaccggtcctcgtgcaccagaaccaatcggtcgacccgttctggtagaccagaaaattcgagttttcttcccaaaaattcataccaatcctactcaaaacctgcgcaacagctccaaaatagatgaataagatacaaacaatatttacaaaacaccagatcacatcaattcatcaaattaaagatcaaaagcacaataacatagaaatcaccttatcaaacctaccattctccaacctaaaaccaacagtcccttttctatccaagcctaacttaaacaacctttaagttgaacctaaaaaaaagtgttagtctcaattatcttttaatcccaaaagtcttgaaaccttactctaaaagctaatctaagtataaggaaattcaaaggaaaacaccaaggacttacctcttgagcaagcactcctaaccttgataaatcccagttgaactatggtggaaaaactccctggttgtggctgccccttagggtttcgaaggatagaaggaggaaggggaagactttcttctttctttgaactttatccttaattacatatatcaattgataacctaaaactatatacatattaatattaactcaataatcagcttgttactagaaagatacataaaaaaataaaatagggtataatgactattttgcccttccccatagaacttaagttataaaataacctagggcattttggtaatttaactaatctaccaaactgaaaatttaaaattccaaactagcctggtataattccaattccaaataattcatcttataccgtcatgacatctttgaccaccccgtcgagttccactgttgcctagcccaaaaatattttattcaaattatagtatctatgatacccacatattctgatataatctccctaattaataaattacactttatttattcttatttccctaatcaactcgtatttagtttaagtatgattataatcttactctaatactcacttaatcacatatttaataaaatatatccaattaaaatattagtatattttccaggatattacaactatcccctccttacaaaaatttcatcctcgaaatttattcaaataacttgggatacagctcccgcaactgggactttaactttcaaattgcctttcaatcttgttgttgtttcacagcactataattagcaatgtggtcttggttccacaccactttctcttttctgttcaaaatccatttcgattgttcctcatataacaagtctgtttgaaactcaatattcccataactctgtatatagattgcttctacctcatacttataaaacattaaagaatatgttgtaaactccagataaaacagggagtatgactagctgataagctacccgacctaccctttctagaaactcaaacgaaccgattaaccaaggacttaacttccctttctttccaatttttgaatttccctttcattggaaccacctgaagaaagatgaaattcccaacttggaatttaatatctctacactttggatcagcatagctcttccatcccttatataagcaacatacgaacttgaatctttaaactacatcagtaccatatttaacaatactctaataatcgttattatatgaaactcattcagtagattatacttatttcaggaactctcaaaatcaatcacacatacttgtcacagactctctcagcatttagatgtaaacttaaatctcaatctgagataattacttttaaagcatcacaagtttgaactatttccttgacaaatagattagcacactaattaaatttaatcatattctgctttgatatagaaaactctactgactttgtacacctgttcctacttactcagataaattcataaagccctaccataccttgacttgctgacaagttgggcatctaattcatactttgcaatattatcttgatacctaacaaaggactttcacatcatgatatatcttagttgttcccgagtataaaatgtatagagtagtataagacccatttagaactttctgttcgttaactttattgactggtacacgtaccctttctttatatcataaaattccttcagacaaaatcaaaaagtcctttaccgaacctgctccaaatctttctttgtacccctgtaattcagagtcaccctactgaaccatttttgattctttccaatagatcaaactacaacatgataccaacaagtgctcctgtcacgaactcaatctgtgctctggttatatttccagcaaactttggtgatatctctttctagttacatctacacctcttcgacctaaagcatccactatcaattgctttccaagggtgctagaaaatcttacagttatcatcttcaactaactttaaccattattgcggcctcacacttaaatccttctaagtgaagagaggtttgaggcccttatgatccgtataaactttgcacttttcaccagataagtaataacgccaaactttcagtgcatgaacaattgctgtcaatttaatatcatgattagaacaccattattcacactccctcaattgtccaggtgcacaggcagtaaccctcctggactgtatcaaaacataatataatccttgtttagaagtgtcgcattaattcacaaatttctccttactgactggcaacgttagcactgttgctataggtaacttctatttcaattctttcaacttaattccattaaggacatagacatccctcaacaactatctcgtagcaccatgttaattctagagaacctctaaaccttctcagtaaatttggggttagtaaaactcgtgtttcttatatttagcataaagcttatacttccaaggacgttgcaacaccatcaaaagatgcctctcatatgcctcctttgagttgaaagaaatcacaatacgtttaatgaaaacagctacgaagtcatcgagtacaaaaagctattttgggaatatccttctttcaagccttcaactggtaataaccagattgaagagcgatcttagagaagatggtcctttcctaaaattaatcaacataacatctatcgttgacaaaggatactcattattcaccgttaattgattcaatctcccagcagtcaatacacactcataaggttttgtccttctttctcataagtaaaatcggcgtactccaggacgaaatactcaagctagcaatttcaagcctaatatttcctacaacggaatcttcacccctttcaattctatagttaccatccaattcagaactttaaatacatgttttactcccagtatcaattcaattgaaaatcaatttcccgtttcaccaataatcttggtagctcttctgaaaaggcatctagaaacccttgagccacaagtttgtgtcccagtcccactgatgttccctttgcaatatttgccacactaagtaaaaggttggtacatccatcttataataatccttctgccttaaactccatgatcaatagattttgggacctttgaaccttgcccaaaaacatgaaggtcctcaccttctgatttaaaagttaccatct

SEQ ID NO: 225313 - DNA, 4705 bp, Cannabis indica
aaatggctagtcgattgggggaattttctaaattaatttttagattattcttgttcacaatctacagcactaaagaaaacacactatactcttgatcttattgacacacccaatataattgcgaagaaacaaataataaatgtttataaatatgacaaatgggtttcattttcaaacataaatgtactaaacaaagctacttgccaaaacggtactgtatgaaacataaccaagacaatgcaattaaaatttataaaccatacaatttgacatttacttttgaacattattgataaaagtggtgctaacaaagcaaatcaatcactagagactagaactacctgcttcccaatattgcgaccggtgaaaagccctaccaaagctgctggggcattctccagcccttcagcaacatcctccacatacacaatctttccttctttgatgcaaggaagaacgaattcaagaaacttggagtagaggtgataatactcaaaaaccaaaaatcctaccattcgaacacttttccacacaagattcatcagattacttacaccttcaggttgttcacgattgtactgtgagatcattccacaaactgcaattcgagcatggggcctgatgttttgtaaaacagcatcaagcattttccccccaacattctcaaagtatatatctattccttctggaaagtacctgtccaaaaacaaatcatgtaattgaaaattattttctaatcttgtacatagaattggcttatttctattaacatgatataataatgatggtttgactgaaaatagaagtggcaccatcaaaacaaaaatgagagaataatttttataatgtcaaaaactttcataaacagaaataaaaaaaaaaattgatcactctggatgttaggccttaatattagtctcactagcatagctaattagaatgagggaggctaagttgtcaagtccttagtgattatgctcaaatttgtgctttctaatgtggtgggctagttgggattatttattagtctaccttataaatactgagaattagtcttgtgagaggggcaattttgtgtgaattatttagagtaaaatataacttagggagtttattaagtttcttgaataacttggaattttacatttgctcttgctcttatcaataaactaccatttcatagttctttcaagaactaaattgtgcccaaattcgtataagtagataaataaaaaaattcatattatgcttttaaaagcatagacctacctcttcaaagttgcatcaaaatcaggctcttctttataattgaaagcctcatcaaaaccaaatttgttcttcagcaaatcaacctaggataataaataaataataaaagaagcaaaattaaaaaaagagtaagaaaatgtaagtggctctaacaattgatatcataatgaccagagcatataaaacctgtgaatttaccaagtatgatacatataaaatcaaccaacaaagaattggcaaaaaaaaggaaagaaagcaacctacaatctcaaacttaataaaacaaaccatgcaatagtgaaagaggcaaatcctctacctttctgtgctgctagatctactaagaagttttcaccataacttataactttaacttgatttgcaattacaaaaaaagtaatagataaacaaaactccaagtcatgattatatcgcaacagcttaaatttaatgaaaatgattttaccaagttatgcccaatgcaatttctttaaaggcatttgatttaaagtttgagttgaccttgcagtccaatgagaatactgaatcaaacatctctcactaagaatataaattatattagagatgagttggaaaccttttctttgcttccagcactcccaacaacatagcaacctaagatctttgcaaactgcccaacaagctgaccaactgctccggatgctgcagatgaacacatattcccccttttttggagaacaaatttcaaagaaaccagcataagcagtcataccaggcatacctatatgagaaaaaaatacaaattgtaaaaaaaacttatatcattctacaattaaactggcactaaaaatgatatagaaaaccctaactttagcatctatacaaacagggtaatataggcataaataaacataaaaataagtctaatgtaaaacactgatcttaatttttatcactatctaaccaatatgataaaagactaacaaataaaataattctataatatttattgcttaaagcaaattttgtcgctattaagtttgataaggtgtagtgtatgatgttaattagttggtagttagtttagttgagtgagttgttatttttctgttagagagtttgttatgtaacaaactcattcctctttgttcaacactctattttcatgtatttattgcttttttttcattattctatgagaattaattagatttcattcaatttttccttattcttccaaaacttaaatggtatcagagccacgtgattcgtgacctccttgttctttgttcttctccctccttctcttgttgatccttcttcttcttcttacttctttatttttccatggcaagaggatgaagtgctcaaactcgaagcattgctcgtggagcttcagatgactttattcatattcttgcacttgatcaagacaacagattatcttcgtatttcctttctaatgttgataatccctcaatgatgcttgtgcctaaaattctcacaggatcaaagaattacagctgatggaggcgttcaatgatggttgactcctggcaagaaataaggtcaagttcatcaatggtaatcttccagcttctggaagatgatgaagattacgatccgtggagtcgttgtaatggcttagtgattttgtggatcttgcattttgtttcacctacgatttttgatggcatcatgtacatggaagatgcatcatacatttggtatgagttataggagcaatttcatcaaaagaatgcaccaagaattttcagggttaaacgatcaatgcagactatgacttaaggtatgaatgatgttacttcatattacaccaggcttgagagtcttagggatttactggaagaatatagacaaaagcttgtttatacttgtggtgctatgaaaattatacaggaatatcttgatgaagataaggtccttgagttccagattggtttgaatgagtcatctatcaatgttcattcttagttcttactccaacatcctcttccaaatgttaagaaagcttatgtagttatgattcaagaagagatacatagaggaatcatcactcctcatactgaaaactctaatcctcctaatgaaaatacaggtcaatttgtagggtaattttcaaggagtggccttaggaatagaattaataacataactatttgcacacactatggagttcctggtcacactgttgccaagtgttacagagttcatggttatccaccaaatcatcgattacatgaaaggtttcctaaagaaatccctagcaaacctagaaattagcaaagttgatcatcaacaaatttttcaacaggaaataattggcctgaaaatgtacctaacaatcaagatttatcttcacaatgtcaaaggttaatgggaatgcttgcacaaaggctccaacctcaatctcaaacatcctcatctcaatcatctacatccccaactcaaactaatcaatgtcaaattgatcacaatcatcagcaacctactgttttcaagattctggtaatgtcacttccattcttaaaactagcttgattattgacattggtgccacacaccatgtccgttctaatccttcattatttacttctctccagaaaaaaccacaaatcaactatgttggtatgccaaatggtgtaatgccaaagttacatttgttggagccgttgaactccataacattgtggtgtatgatgttctttatgtccgtaactttcaattcaatcttctttctatttgtgctctatattattcatctagttactcttttctctttttactaaacaaatgcactgtctaggacattaccacgaatcaagtgattggatgggtgaaaggatcggcaacctttactaccttcatgattaaactgtttcatctattctttatgtagttaattttgaaatatgtgatgaaactttgtggaatcatagacttagtcatgcctcttgtgtaaaaaattattctctgaataaaatcttgcagcttcagtattcttcctatcaaaactttaatttttccatttgtcacttttccaaacaaaggaaattaccttttgtctttaatcataatatttctaaatagtgtttttatttgattcacatagacattagggaccttaccatacacaaaccactaaaggtttcaaatattttatcgccataattgatgattgctctaggtacaattggattcaccttattaagaacaaatccgatgcaaaaactaccataacaacttttatatagcttgttaaaacttagtatggtgtttaaattgaaggaattagatctgacaatgctaaacaactttagtttcttgagttgttatccaccctaggcatcatacactaccattcttgtgtgcaaagactaaaaccaaattctattgtggaaagaaaacatcaacatttgttgaatgttgctag

SEQ ID NO: 225314 - DNA, 2585 bp, Cannabis indica
tttttttagtttggtttttgggtgaattatgctctctggttacgattgtatatcgtttaaatcattataataggtttttgatttgatatgggtgttaaatctttagctatggatctagtgtttgatgggttgttttcagatctgtagtatcacatagttttgtttgaataacttattaatttatagattttgatagtaaaggtgattgctttaacctgggttgaatctctaatttgtttttttatgacgtttttgctgtgtacaattgtattcttaactgagataaatatattattatataatctatgcacgtttttgctggttgaactatgacaaattttaatttttggactatattgctggtgttgaaagatttttagctaggttagtggaaagtttattgctttatcaggattagaatctgaaatatagttccatcggagttattatgcatgtttttgatggtgtagatggtgttcttatttgggttagtatggtttttcaatttggtttgttttatgcatctttatatgctattttgctatcttatgaatcttactaagatattgttatcatactagattttatgctcttatttagttttgtgtggataagtgctgaccgatctgaataatttatcattaggtgacgagcttctctctgactcctttccctacaaggagattgagaatggtgttctttgggaggttgaaggaaaggtatgtcactacaagtcctttttgggagtcagtttcgagctgttatttctatatgaatctcaaattaatcattcattctatggttgaaaaaaaatatactatatgacaattatagctgactttctgttggatatggttgttttatgcagtgggttgttcaaggtgccgttgatgtagatattggtgcaaacccatctgctgagggtgctgatgctgatgagggtgttgatgaccagactgttaaggttgtggacatcgttgacacattcaggcttcaggtatggggtgacctttctttgtggtccattatatgatatgttattgttacctatatgtatatatattatgagtggtatctaatcaggatgattcatacaggaacaacctccttttgacaagaagcagtttgtgacttggatcaagaggtacattaaacttttgacccccaagttggaaggagagaaacaagaggaatttaagaagggcattgagggtgcaaccaagtacctgctccccaaaattaaagacctccagttgtaagtgttcattcacttttgatagttattatcatgtgtaattgtatattgtttaccacaccatacacatgctaatacttttcgctcatattcgcagctttgtcggtgagagcatgcacgatgatggatgcttggtattcgcttactacaaggatggatgtgccgacccaactttcctctactttgcccatggattgaaggaggtcaagtgctaagaaactgagttttagtggcttcaaagtagaagcggtttgccacccgccctattagtttcaactatttgctcgttcgtctatcttacaaagcttttttgttcttttagtccttcgtctggtttagttccaagtgttgtgtcagttactattttttatttaaactcgggtttattgaatatgtattggtgtttttggttaaaagagatgaagatttattagcagaacatctaattgtcctcataattaatgaaatttatctttgaaggcatcattttgtgtctcttttaaatgatagctttgaaagaaagctataccataaaaaatgattagttgactaagaaaatatattgaatagtatagataatattcctttatggggcataaaatgggcaattttctgtctttatagtaaaaccccttttggtgttcactttattctgtctacagtctaattgcttatcctgtccttatgccaaggccagagccagattcttcctctcattaactcatataataaataaaagagcagtcgagttataaggcgttttgagattgattagcgatattttataagtgttaggcagctgtggtcatttttataatgataagagtttaatttgtaaatgaagcagtctttcagtctctaagcaaaataaagatcatcaatttaaaaaattttcttgatctatgaataaataatatggaagaagaaagtgcttcaaacttgaaagcttatcatatatttaatggaccccaccttccctcaatttgtttattggcatattttctaagaatattcttaggtactttagtaactatatgtatgccacaacttgacatgtttaatagttattttatttatttttaaccagctgatgaggaggaaaactactaaatatagatcgatgatttcttttcatttaccacgtacatatcacatgtgttaatatttttgtcctcaaaatctttgttattgctattattaaatttttctttaaaaattaaataaaattctctccattcaacttgatagaaaatttcctttgaattactaaaatcatgaattatttcacaaaaacatgaaaaaaaaaatacaaaaatacaatttcacgaaa

SEQ ID NO: 225315 - DNA, 4616 bp, Cannabis indica
gaaagataggctttcccgtccgaccctcatctccggccttctgcgtcttctccgacaaggctgcgctcttccgcgttttctccggttgatcttcgcgttctttgtttctttgtcatctgtgctgttgcgacggaaacaagcgaaatccaaccagaaatcccagccaccatcactgatcttggaaatgttcctgggcatttcaatcaaacagttcagtttccctcaaccaagaatccactcgaggatcctggaagcccttattttctccaccatggagataacccagggagtgccttggtgtcacaaccactcacaggtcaagaaaactacgtctcctggtgtagagctatgcagctcgcaatttcagtcaagaacaagattggatttctagacggttctatctctaaacctcctatttcagatcaaaatctatataatgcttggtatagaaataataatattgttatctcttggattttaaactctgtgtcaaaggatatttcttcaagtatactatatgatgaatgtgcttctaacattggaatgacttgaaggttcgtttcatcagaaaaatggccctcatatttacaatttgaggaaggattttatgaaccttaggcaagaaaatcaaaccattagtatgtactttactaaactcaagaccatatgggaagaactcactaattacaggccctcatgcacctgcaatggctgtacttgcggtggagtcaaaaagctccaagatcactaccatatggagtatattatgtcattcttaatggggctttcagactcttactctcaagtccgaggaagtatcttgatgatggatcctttgcccgaagttaatagagtattccatcttgtgactcaagaggaacatcaaagaggtgctaattctaccctcaatcctagtaacacaaatcaagccatggcttttgccttccaaggagacaagaaagcaaaccagaaaagtgagaatcaagcaccaagaaacaatcaacagaagaggaataaacccttttgcacgcattgcaacattcttggacatacaatcgagaaatgctacaagattcacgggtatccacctggttttaaccggcaaaataagtccaaagatgctaatgcgaatcaagtgcaaactggaggtgaaggagacaccaacacacaagaatctcatgccattcttccccaattgtccactgtccagtaccaacaattgttgaatttgttggcttctcaacaaaccagtaaccatgttaatgagcctagtacttcgaccaacaacacaagtattatcttatctaatatttcaaaggttcctttatataattcttggataattgacacgggagcaacaaggcatatatgctccaatatcaaattattccaatgtatatataaggtcccttcaactaagcttatattaccaaataacaactctctagttgttaatcaaagtggaacagtgaaccttggtaacaatatcattctgaacaatgttttatatgcccctaatttcaatataatttcactgctaacggtttcactatgaaggacagggacagcaagatgacgattggaagaggtagtgcggtcaatgatctttatgtccttgacactgcacaagaagctcctcaaatcctatctgttactgctgaaacttggcacttgcggctcggccatccttcacataagcgccttaatctactcaaaaacattcttgattgtaacactgctgttttacacaataaagaaccatgttatgtttgtcctatagctaaacaaaagaaactcccttttgttaataaaaataaattttctgctagaatttttgatataattcattgtgatatttggggaccataccacattacatctcacacaaattacaaatattttctcacattagttgatgatcactctagattcacatgggtatacttaatgcaacataagtctgatgtttcctttttaattcctcaattcctatcttatgttaaaacccaatttaatgacatattcagaattttcaggtatgataatgctcccgaattggtttttagagatctttttcttcaatatggaatcatgcatgaattcacttgtgtcgagacacccgaacaaaatgccattgcggaaagaaaacatcaacatttattaaatgttgctcgtgccttgtattttcaagccaagttgcctataaaattctggtctgaatgtatccttacagccacgtacctaatcaataggaccccaactcctcttctgcaaaacagaactccatatgagttactcttcaagaaccaaccagcttatgctcaccttcgatcctttggttgtctcgcctttgcgtctaccttaactgctcataggaccaagttttctcctagagcacgaacttgtgtgtttatgggatatccccaaggaattaaaggatacaagctctatgatttaaataataatcaattttttatttcaagaaatgtttttcatgaaaacatttttccttttcaaaaattgaacacaaaaaacaataatattgatccttttgctcattttgtcttgcctcataccgtgattgatagtcattctgctaatgagttgtctgcaggaaacacaaacaacaccagctctgctgccccgatgcatgattcaggtgaaaaggacatggagcagcaagtaacacctccaactgttgcaccagcaacaatacctgttgaagatttacctgttgcagaaactgctgaagcagatcaccatgtttccactggtgcagaaacccctaatgttgacaatcaaagtcagtctcaagttgctctacgcagatctcaaagacagtccagaccaccatcctatttgagagatttcgagtgttattcggttattcaggactcttcttctacacctcatcaccttgataaatttatttcatattcaaacttttctaacacatacaaagctttcatacttgtagtgtcatatgtcaaagagccaaaaacatacttcgaggccatacaaatcgttggatggttaaaggctatgcaatgtgaattaaaagctttaaccgacaacaagacttggactatagtgccactaccccctaacaagagagcgatagggtgtcgatgggtttacaaaataaaatacaatagtgatgggagtgtcgaaagattaaaggcccggcttgttgctcaaggatatacgcaacaagagggattagattttttcgatacttttcccccgtggccaagatggtcactctgaaattattacttgcaatttcaactatcaagaattggcatattttacaactagacgttaataacgcctttctcaatggagatctcaatgaagaggtctacatgtctataccacaaggatcaactcttccttcttctcttaatgcaggttgcaacatggtatgcaagctacataagtccatctatggcctcaaacaatcctcaagacaatggtataaaaagctgtccgaagccttactacaagaaggatttaaacaatctcaagccgactacaccttgttcaccaaaggagctgaagacaacttcattgctcttcttgtgtacgtagatgacatcataatcaccggacccaacatcgacatcctacaacagctgcaagattccctagatcacagattcaaacttaaagcactcagcaaccttaagtactttcttggctttgaagtagctcgtgctcaagatggattgtttctctctcaaaggaaatatacaatccaattactagaggaatatggatacatcaacagtaagcctagcaaaacaccaatggatcccaagctaagacttgacaatgaagatggagaagccttggataatccttcccattattgccaactagttgggaaacttctctacttgactttgtctagacccgacatcaccttcgctgtgaattccctcagtcaattcatggccaatcctcgaacaactcatctccaagctgttcaccatctacttcgttacctgaaaaacagcccgggcaaggccttctctactccaaaacatctacattacatctacggggattctcagattccgattgggcatcatgccccgtcacaagacgatccacaaccggcttttgcatttttctaggagattgtctcatctcctggcgcacgaaaaaacaacccaccatttcaaaaagctcagccgaagctgaatatcgcgcattagttgcaaccactagcgaaattacatggctgcagtacttgttacatgattttcacatacctcagcctcatcctgcctttatttactgtgataacaactcagctatacacattgccaacaatcctacctttcacgaacgcaccaaacacatagaacttgactgccacttcatcagagaaaaaatcaataatgctgccattcgattgattcccatcaccagcaaacttcaactggtagatgctttcactaaacctctcacatccccaattctgaactctcatatttccaagatgtccgtttttgatatatacgctccatcttgagggaggggtatcaaagaatacaattactgctacttaccgccctatttttcctttgttactgatctttgtattcttg

SEQ ID NO: 225316 - DNA, 1908 bp, Cannabis indica
tacgaatcattccagcatgctttatccttatttcacacgtttttttgggaagagatcgcccatcctaagattgttctaggttaagcacgcttaactttaaaattctcaactgatgggttgccgaaaagaagacgcttcttactggcttttataagtatacccgtcaatctatttaagctctcttcaactatgtagtctcgtacctacacaatcgtataatcatcacatttaaccttcctaggtaatagattgaacatcttatccaatctttctacttgcagattacgagactctgattgttacaaatttatatattagtgctaagaaagattaatataacttccagaactctgtggtttgcaatgatggcatggacagcaagaacacttgttctttcaatgtttttattcaaagaaagtggttcaacgggtttagaagtgattgggagtagctatgtggcctcttgatgattatgcttggctgaattggattaagtctacaggtcaacgtagtgtgttggaggcattacctacacaggaatgtttgtatctttgaaaagaaaatttacttaatcagctatgttgataggatgactaagcacgctcttaagggtagaatcttgcttgttaataggaggaaaatcactaagaaagagctggatttgtttgagtttatttgcgaaatgtaagaggtttttcctgttgctggtagcgctgctgctcttttgattggtagctggtttgtaatgttgctttgtttagcaaatttatattttttaataaaaaaaaattcaaatatattattacaagcgtgattatttttatataaacgtagtaaatatctatttaaaatatatttttaacacggtaaactattaaaattttctaaaaatttataagtagttctaaaaactagaacctaaatgagcataaaaaaaaaaaagaagaattgtgttaaaaactccttttggctgcagaaacaaatgaatggtgtactaatacgactttttaggagagtacgatacatttcttccttctttttgagatgaaccactcgccacataaattgcaatggtttccaccattgcaccttcaaccaatgaccatgttatgtagaagtaatcagattaagcaccgtaatatatcaaagaaatacaggaaaataagagtcgttaataaaatcatctaatataagggtcgtaaaatatgtaggcttgtgctagatcatcctaagttcactctctagtttgactacagagtacagactcctcaaactggttcttaagcctctgcaacctaatttacacattaaaaatgggcttagaatgcatgtaagcattcatataagaagaaaactaaacctagtagatttaggataccttcctcggcaagaagatcctctatttcttcctcggctaaaagatcatgtagtgacactgacattataaagtagggcagcatatggttgggttggctggattgaatgcatttgaatgagccaaccccataatatcatggtagacaaatttaacccatttaaatcatttgtattgtgtgacttaactttactaaatacattaagagttggtttgggttgtaacccattttaaaatttccgttaacatgtttataatcaatgattcatagtaaaatgttatgaaaagatcatccaatcacaccaaaaatgaaaagaaaaaagttatataaatggtttactggttagtacttatgaactacccaaacattacagtagaacataaagataagtctcaaaattattacattcatccatctgcaataaggaatagtttatcaaaattattacactcatccatctgcataaagaaagaaaatatcagagagacacgcataaaggaacagaacagtttatctaacaagagtttttccc

SEQ ID NO: 225317 - DNA, 1382 bp, Cannabis indica
ttccatttgaaggaaaaaaaaatgttctcaaaatttcacgaataggccaaccaaaatcattttttttttatgcaaaccatactatatatatcttttaaaaacaatttttatagtgcaggattgtactgcggagggagaaaaaaacattagtaattctttaatctcgtgaagaatcatcatggtctattattaattgaaaaccactaaatcgtagctaaaccaaacatagatagcagtcgactctaagaaccattaatggaaaattcaatatgattaaaaccgattccattcattttatttatggaccaattatgattaattgaatttcaccgaatcgtagctaataattataatacaaacaaatggaacgttcgatcttcaagtgtaagaatgcatggcaagtgaaaattcaatattgaaaccgattcagtgatcaatagaatgaaaactaattaattgatagaaataattattagctaatgagcatgacaaattaccaaaccaagtgatcttctacagcaagcacatacaagcaacacgactgatcatattcatatgtgtgtgagtatatatattgcaaaaacagattattaatgcagtaattaagaaccaattaaaataaatgtggttaaattatattatttaagtaaattgttgattgcattagaagaaagaagaattctaaccgtacgagtatcggtagctagctaagactgatgaacagagtgagagttgatccactgcgcttatcgaatgaattgccggagagaggaataattgataatacggagttcaaattatacttttatgttttatgtagagagagagagagaaacagagaaattgttaggtaattaaatcgatttttttggggacaggtgggagtgaggtgctccatcactcttttttccttacaccattttttgaccccaatcatttggagggaatttgttcttctaacttttttataattattaattgaaaattatacaatcaaaaaaagctaacggcacacattttttggactttaattaagggaaatgctcaaggaaagttatagtgactagcactcttagaagatgtgatatgcaatttaagtctcacttattttattttattttattttaatgatgattataaaaaactgttaacaaaactactacctctcataaaagtattaggtaccatagatagttctttgagtattgattttagaacactatactggatgatatggatatatttgacatctttaaataaatgattattattaaaaaaatactaaataataatatctaaaaatacattcttactatttttttatattataattattatgttataaagttggaagattttaattatttaatatgtattaaata

SEQ ID NO: 225318 - DNA, 6937 bp, Cannabis indica
aaaaatttatagggatgatattgtaagcataatgaatactctcgtaaataaaatttgaaaaaaaaatattctaacatatgttttcggacgtagagattaactaagaggttgtaacaggaaattaacggtaactaataattaattaattaataatattatatgtttgataattagggatatatagttctgctagtgcaagcccaccgttcggatctaagaccaccaaagtgcctaagcataacacaccaatgcgaaggtgcatcagcaggggaagcagcaatcctatacacagggctgtatcttatggcccttggaacaggtggagtcaaagcagctctcccagctttaggtgctgaccagtttgacccaaaaaaagctaagcagttgtctacttactttaactggttcattttcagccttaccattggttcaatcttgggtgtcactttggttgtatggataagcacagataagggctgggattgggcctttgccgtttgcgctatagctcttttactttccatctttttcatttctttgggcaaccccttctatcggaataaccttccaaaaggaagcccactccttcgttttctaagggtaatttaattaagtaatttatattcttttaaggataaataatatttagtatttacaaaaaagttacccatcaaattttttattttattaaataataaattaaatttatatttttttaaaatgttacaaaataataactgagctcaatttttgtctactgtattattggacaaagttgttactaattggctatcgtgtgttataacacttgtggttataacacatttaggtcaactcagagtcagtcctaactcaattgggcctaaaaaaaattaaaataaaataacatttttactgtacatattgaattttttaatttttctttcttttttactatgagacagaatttttttttcaaaaatattgtgtgttgtgttaagtttcatgtgttgttccatcgttgttttttagttgttctactgttatttttaaatattctgtttagtattttacggttgttttatcaaaaaataatatttttgtaaaaatttataatttaaaaattttcatggcagtaaaattataaatttttatccaaaatttaatatttttgtgaaaaccacaaataaaatttaaaaaatgagcatttgcatcactcaactatttttttctataagggttcatatatacatctataaatgctttgagttctcgatttaggtggacctagtcacgagcttaacttatcttaatccaagcttgaacttgggtcaattctaaggtttgaattataatttattaaaatagaggtccaatcagtaattttaacaaaaatataggttcaaaataatatttatatatttttttattgccccaaacatcattgtgtataatcacattttattgaatgatcaggttttcgtggcctcttttcgaaatcgaaaacttcccattccagaaaatgcagatgaattacatgagatttatcaggacaaagaagatgataacttacatcatgaaatccttcaaagaacagaccaattcaagtaaacaatttttttagtaagagtttcaaatttaacattgaaaataaaaaaaaaatgtaatgtttttgtgataacatgacatgttaatgtttgtttgataagctaggttcttggacagagcagctgtgataagaagaacagaagatgatgataatgatggtagtaattcaggatcagaatggagagtgtgtacagtaactgaagtggaagagacaaagatcctaatacggatgctaccaatcatactaaccacaatcttcatgaacacatgcttagcacaactccaaaccttctcagtccaacagagcgtaacaatggacagagatttcattggcttcgaaatccccggaccctcagtcccagccattcctttgctctttatgttcattctcatcccattatacgacagagtctttgtcccaatagcaagaagagttacgggtattcccaccggcattagccacctccagcgcattggtattggcttagttctctcagctatctccatgacagttgccgggtttgtagaaaagaagcgcagaaacgtcgcgattcagcatgacatggtcgatagccaagatgccttgcccataagtgttttctggcttggttaccaatacgctatatttggggcggctgacatgtttaccctggtggggatgttggaattcttctatgctgagagctcggcgggaatgaaggcgctgagcaccgccatctcgtggtgctcgttggctttcgggtactacttgagctctgtggtggtggagattgtgaacaaggttagtgggggttggttagcaaacaataatctaaatagggataagttggaaaacttttactggttgttggcagggttgagtgttgtaaattttggggtttatgtcatgtgtgcatcttggtacaagtataagaatgtggaaatgatcaagaaagatgatgcttctacttaattaattcccctaggaaattaaggccttaattatgatataataatcgaaataatagtaataataattaataagttttgtttagtcatgtttttattaatgtgtacttgttttgtgccatcttcacttgtataaataagtagtttgtaagtgtggccaaaacagagtggtcgttttattatactagctagttagtgtaactctttaaatagacattaaccactaatttaaaagttcagaacacattcatatatgtatgatttataagctttgctcccattttttacatatgtaaaactttgaaaattaatttgtagaaatttaaacttagagatgctttaacaaaaatttagcgatcagtttgcaatggttctatgaaaatataatttttggccaaaagaaatagtaaaacgactcattaactatggtgttgttgcgatgataccatgaaagcatgatttttggctaacaattatgtgtaaatgatgcattaacgatgatatgcgttgcaatttgattaacttttgtaaaataactattcactcggatgtcaatttgagatattggaataaaaaattattattttattttggtaaggagaaaataatatagttgagaaaactattttattgaattatattttagctttctattacttattttgttctacgattcccttatcacattaataaatttgggccatcttgattggaccaaccaatgttgtggatatacaaataataattagggttcttataaaaatacttattttttttatttttaaatttttactgtcatgcttttgtttttacttttttactgtactaagtttttaaaaatacaattttaatgcttcaaaaattacaaaaatactttatttcagtaagataactaaaaattaactatagaacatattaccaacaatatgaaaacaactaaaaaaaacaacaaaaagacatctacaaagtaacagaaaaataacaagacatttgccttgttgtgtagtgaatagatcattctcaagaacacaatgcagcaaccaaaatcaagcaaactaaccaacacaatttaatcataaactgtgctgataaaaaccatcaacttaaagaacaatccaaagagaaaaaattaataccaagagttgataaacatagacctttattgatgttgaaccagtacaagagtgttgaatacaaagaaaaaagaatgagaagaaattacaatgaatctcaccaatggggaaccaagatcagcaacacttagttcccttatacatccctccttttcactctctttcttactaaaactgaatttacaacatgactaaaaatgtgtgttacaaggtccatttatagtatgcaaagttagctgtttgttgagctaactaactcaggcaccaactgtcaaaacagttggtgacacatcagtaaaagataaaacataaaatggctgaactaaacaccacaaatccaccttagtttagtcattttaggttttaggaagaatatgatgtgtgtagcagatttgaacataaggtagaaatatgcacttgcagatgttgagtagacttaagcaatgtttaagcttggttaagttgacactttttgtcaacatatcagcagggttatcatctgtgctgattttcttggcttgaacctctcctttagctacaaattctctaataaagtgaaactttatgtctatatgtttagaacactcatgtagcataggatttttaatcaagtggagagcactttgattatcacagtatatggttatgttgctggagtttaagccaagttttgctgtcaaacctttcaaccaaagtgcttctttgaatgcttcagcagctaccatgtactctacctctgttgttgaaaaagcaactacctttcgcaggttagatttccagctaactgccaaaaacagtgaacaccaatccagttagagatcttctagtgtctatgttggcagcatagtcactgtcaacatatcctgcaacttcttcagcaacttttgtttggttgttgtagattattcccaggtttagtgtgcctttaatgtacctgagtatccatgttgacaggcatctaatgtcgttttattattatcatcagtccttattctgtcgttgttgtgtattaatgtcgttcaatttttgtttctttcctagttaatttcggatgccaattattttccaaacacctctacgttttttttttaagaaaaaccaccgtacaattatattgggtgggcatctaattcaatccattttttttttttgagaacttttacatggtagactgtattttatcattttattacccttatactattacacgatagaaattacaaaagtactgtacagttatactgtttatactgtcacttgtcattttgcttgccctattaatttttttaaaaaaattgttgatttgatgttcatgatcaaatcatgccaatgttgacaggcacttaatgtgcagcctgtagaccctggcagacacatggtcggccagaccctaacaagcacatggccggccaaaccttggtaggcactttatacaccagaccccaacctgcacctggcagacgcttggtgcgcagccttcatctaggacaacaagccaagctacgatttaggcttcaacaacctacgaaaataggggagaaatataagttattttcctgttcttgagggataattaacctatttactatttattattttattatgaatgtcaaaccaagccaaattgcgcaacttggtaaaaatacaaatcacaaccacaccgtgatgtgtgtcaaaccacatttttatggggtgtaatgtgatgtgagcagttttatgaatactcctaatttttctccaaaaatttaaattttttaaataaacataatcatttatttgtttaatttctaacttttttttctaaaaaaaatagttttatatttttattgaatttctaattatttttctttattttttaagatatgatacaaatataaataagcttgattttttcttcacaaaatcttagtttgtttaaattatttattaaattttcaataattttagtttgattttttaagatatctattcataaataaaataaagtttagaaatattaatttttgaataatttaggttttttaagtaaactaaatatttttttaataatttaatatttttatcaaatttttaatattttttttaatttttttagaattaatagaatattataatttttaaaattatttttttaataaaaaaaagtaaaattttgtattagtcaaaattcagggataaacatactaacttttaacggtaaaattaagaaacaaaacttaataaaaataacataagtatatgtaactattatattttaagaaattttttaaacaaaccttatattttaaagaacataattaagtaatgtcaaaagttgaagtcatcatttaattaagtttaagagagcccaaccaagcctgctcaaatggaaaggaatctaattctaagggagagtgctttgtaaatagttctcctatatatgacaaatgcagactttttatatttgcacaaaaaaaaaaaaaatagtcaaagaaatatcacaaggcaaacaaatttattcaacacatatgcattagaataattaagataattatgtatgtttatgttttcgtacgtaattagcttctactaagaatattattaaaggacaaagcatatatatatatatatagaagattaattaattaattaattaaactctttctttatttttggttattttcctaatattacatgtatatatgtaatatacgtaatagatgataagtccctttaaccaaccatgtatgtttataattgttctaattttattacctatatatgttgtttagaattattaatgatttaatttaatataagtatatatttagccaacttgctaattatattactttacttttctctccattaattaatgaacccaaacagtgtgacgccattttgccgtcttcaccatttgaaattaattctactctctcacagtcccatgtacatatatttaataattatttttcattttattttttttaaaaaaataattggaaaggcttaaataataatatttttctttataaactatcaaagtaaattttatttttaatttatgttccgcagcgatcatgaaattatgccatcattgatgtaaaatttaaataatttataaatatatatacaattaaaaaaaattattaaaattataataccgcatattcataaatcaacataaaatatatataaaatataaaaatataagggattaaaattactctcaagccttcatatgtgtatgttagtattttatacttttttttttctttattattaatatg

SEQ ID NO: 225319 - DNA, 3885 bp, Cannabis indica
atgttcttccagggcaaggaaaagaaagtttacaaactcaataggtccatttatgggcttaagcaagcttcttgctcctggaataagaggtttgatgaaatcatgaagacctacagctttaaccaaaatgaagatgaaccttgtgtttaccaactcaaggataatcaagtggtagtattcctggtcctttacgttgatgagattttgatcattggtaacaatatcaagaaaatgactgacatcaaggaatggcttgacacttaatttaaaatgaaggatttgggtgaagctgcatatgttcttggtattcagattatcagaaaccggaagaacagatcccttgctctctctcaatcatcttacattgataaagttttagagagattctcaatgacaaacaccgaaggggcgactatgccttctaaatatggtatcccttgaaatataacttttactataacgtagtcgtttatctttatttaattttattgtaaaattagtgaaatggtggatagtagttgatgaattgatcaaaattaaatattcactttttttactttaatgaataatagaataaaaacttttttttttataataatttatatttttagttttagttttttaatcataaaaataaaaaagtaaaacgtatttaatttgcataattttatcaactatcatctgtcgcgtcatttgttttacgataaaattaaatcaaatatgtttcacgataaaagttatatttcaagatgtattattaatgaatcgtatatttggacaatttaatagtataaaaatatgatgaattaccccatatactatttttttttcaaatttacggattgggtttttaaagtgattgcaccgctagttgcaataggagtttctatacgactttctattgcaatttaagttgcaactctagttgcaataagagtttctacgtagaatttcgtaaaaatacaaaaaaaaaactgttttgaagtgtaacaatgaaaaagtccctaaaaatatttagatggaaaaatattaattattttttttaacatttatcatcatatttcgagtatacttctgttctgcattcacgtgtttttttttccttttttcttttagaatccgaatttttctacaagtttctgcgctttatctcaaagacatttacaatttagacatcgataggcctcactcactgttataaattttcacgtacattatagaaatctatatgcataaaggaatattgcaaataagttaaagattttacaataataagattttaatagagaacagcaaattagcaaatgtcatacaaaggtggtgcttagataattcccactaaaagcaatgcaaatacaaaacgagggaaccgaccagaccaaaaacactaatctccaaaatcccacaatatttttgctacataccccaatttccaaggttccaattcaacggtttgcgataaatagagcaaaaagataaatacaacagaataagaaactaaagaaagaaatgaagcaaaccacgcaggagaaaaccttgccttcataataagcaaaactattacaagatggcaaataagagcttgaaagagaaaaataaaaaggctgcaattccagaagtagttgaaggattcaccaaggagcaagcatctgaagatcttcccatggggccacctataggagccaatcccggaagagaaccagttgctggcactaacgaagaccttggtgtcaatgctccgacaccctcagactgaggagaaggtgacggtgcaaatattgaatctctaattaccgatgaaggcggtgctatgaggggaggaaacttttgtggacctgaaatcgtgttttggaacaaaataaacaagtcaaataatgagatactaatttcaaacaaagagcttaatcatgttttgagacaaacaaaagaaaactagttatggcaaactaatttgaaacaaagatagcacaccaataaagagaatgtctgatgtaaaatgaaacaatttattgtgttttaacaaaatctgctgagtgttaacaagacaagtcgtttattacctaactaagaaactagtcaggtccaaatatccactaagccataactaatcaccttcactagcgaaatgagaagaaaagggacagaacataaactgaatgtttaaagagagacaaaaacaaaaagatctgagatctctcagaaagtaaaacgaaccaaatagacagacagaatgtgatcaaggagaataattgtgaatattctacaatagtataatgataggctagttggttatttcttttatgctatttctattatgatgtagctatataaacttaatgggtaggaatgtaatgagggcattataattgaatatcgaatagtaaagctgagagtgttttctcccatttcaggttttcccctttgtcacggacatggcatgagctttcctcactcaatccaatcctctacatcataatgtttacctggacaacgaggctgaagagaagtagaaagcctgcggaatagaaacgtaattataagtatgttccatacaaatttaaatcataaggagagcaattagcacagttatgaaaaggtagcatacgttgtgataatggtgccatttacaaaaccaccatatttacaagaactaacgttgcaaccagcactggtctgctgcgtcgtataatttccaaccataaggttactatttttacattgcatactcgaacatgaaaccgctaatgaagcaggcatgcaatacaaactgcattaaaacatgtaaacaagattatttacactttatttaaaggtgatatatagtactataattaatcagaatcaataacaaagtccttcagttacttgagacttcctggtccacaactgcactgaacacagtggctagctgaaatggcatagctcccatttggaacaattaagccaaaatccgaggcgcccttggggaagtttgaggcacaagctgcaacaattaaaaaaaacagtaaaacacaaaatttctatgtccattcacaagctaagctaagatactttccataaaatgaaacaacaaaaatctgaaaacagagaaattcaaactaaagcttgccaaaatcacaaacatcaaaccacttcaccattaagttccaaatacaatacgaaaacccaaaagagaaaaacgactaaatccacattgaacacacaaaaatcttcagaaaccaactaaaaaaactcaccaggcaatggaaccgcaagtatgtcaccagccttaatagaggtacttcccatagcattaacattcatcaagtccgtaatggtggtggaatacttggcagcaatggctgtcagcgagtccacaggcttgaccacataagacaagtaaatagcaggtaaagagttatcagtgccattaaaacaagtacaaggaagaggcaccacaaggttctgtcccacatcgagaacagacgggtcagagatcgaattagcctccctaatctgatccgcggagaccaaacccgagtaaactgaatcagcaatcgacgagagagtatcagagggtcgggtcttgtaatgggtggagaccgattttcggatcccatcgacacaagaacaggtaatggggactttgaggaagagctgagatgggagtatgtggttctcaacgtcggggtaagaaatgtcgatggcattggcggtgaggatagcaatggggtccacttggaagagcgaagccacctctgagactttgagctcggtgtagacagtgtagccgagcatggcgttgcaagagtcggagttggaacagggctcgattgtggacttggagctcaccaaaacaacattagctaaacttacacaaaaaacaaagaactgggttttgctgag

SEQ ID NO: 225320 - DNA, 2872 bp, Cannabis indica
aaggttcaaatcccactaactacactttatattttctttttaaatttatttacgcccccctcactttaaattctgggtccgccactgacaatgttatgggaaaccaaaataaaaataatatttttcgaatgaaaaaaaaaacaagtaaaaacttgtaaaagaacaaatccgtaaaaattttacattttggattattgggttttaaaaagcagcaaaacaactaaatgaatccaaatgacaccttttatttaattaatttttctttctcattaggggcttcaagtctccactctccaagcttcgactcttatatgtattatttaatggaaactagaatcgtatatggcggcttcttaactcacttagaccctttcaaatatgttaaaaaaaggctattgagagaatggcttagctgacctaaatcattattaggtgccgattatacaccggctaacaaggtaagattcaccaaaggtccacaatttttttatttttgaatactatcgagtgggatgagaaccccttttatccaatttggctaaggcaagtggtcttgccagccaagataatatgttaacaagtggcttttgaatgatcactgtgattggttgttagatactggctgagtttgagttgcctatctattctgcttttgtcattttggtttcctgttgcctggtttggaaatttcttttgttgttgctgcttactcttgccttcattattccataaattaaaaacattgagaatgttttatttatttattaagagaatttattaaaaaaaaaaggcaatttcatagtagacatcctcagaatttacgagtatcaagtatcaaccatgtgcacagataactataataggttcattcagccaaactcataacatggatgttgtcattgttgataacttcacaaccaaattgagctgacccaaatcaatgagagtatttgtgtactttatttatttacataattaaattagttgaagcttgttaagccacaagccttaataggccaaaatcttatctcttatattgttaaagcacttccccaaatatcaaaagagggttattacttatgagtatctcatcaaatgagattatatcttttcatgtctatgtaaatctaaaatacactgtacccaaaaaaaaaggctatcaacaattttataaatacatttatgtattgtcctaactgaaaatgaatgcatgcttggatttgaatcaagaatttcaaattagcagcttcattaacaatacaatgaaactaataaattaccccaaattttcaatatttaccactaaatattaatatatatgtgtgatattgtcccatttcaacaattgaggtcattacagcctagcaaatctctcacatcctctgcctctctcaaagtatcatcagcttaattatatattacagaattaattttaaaaaaaatgaggaagaggagattagattgtatatagagaactaaagaaatctaagaacaaacccatcacgacggagtgtttgaacgccgaacagtaatctgggccggaaggggccgacccgtacccgtaccaccgcagctgttacaagccatcctacccgacccggaacatgtccgacacccgacatctccgtcggaccaccgcgagcaaaagcaggaaactcggccggttccgttgcagctgggacacctcggaaatgagccgccggccatggggttgttctggtccataactgatttgaccaaggctgctccggccaacacgctaagcccagttgccaactgtgtcaacacaatcggacccattatctatcgattgatgaagaaaaaggaagagattttcaaagagagatagaaagataactctaagcaattaagacgaagaagaaagagagaaaattgtagaaaaagattttattgagttttggtgatttttttctttaatttaatatttattgagtggaagcgaaaaataaatataaagaaataaaagaataagacaataaaagtggtggtggaattgtacacgtagacgcgtgcattggtggcatggtgttatacaactcaagatttaagaggtcggaaattttggaatgtagtattgtagacagtcaaaacttattttagtagaaagaaagacaagaagtgctttgttttcttttcttttttttagcctcttatttggacggtcctgattcaatcttcaatcatcgtatggagttttgtaattctgtagttgtttgtattgaaatatcttccgagtgacaaaaatgaagtggatacattttcatatcttatcctttattttttttttaaagtaagaaaaatgaagagagaaaaagataaaagattaattattcaaaataaataaataaatatcaatttctcaaatagatcttttgtaggatattttggatggaggagattgagtctgtatttactctttcaaaccatgtttttttcatgcgcggcgcccccaaaaatgacgtgattacagttttgactcaccattatgtatgcaaatggaaatggtcatagaagctttatgaattaactaaaaacccacgttggttaatgctactttgtatttcagttttgaactttgttagtttgttgattttactttttcttcagtaaatacatttacttgtttcgttgttcaagttttgaaactcatacaatgtcattgaaaactaacatattaatgactttacattgtaattgtcattatcatcatgtattataatcctcattaaccaatgtaataattgcgttgttaggaaacattagttagtatacttcaagccattacactttgtacaaccatagcatctaaagtaattcaaacagatcacattaaatcagcataaaaattgta

SEQ ID NO: 225321 - DNA, 3667 bp, Cannabis indica
tgttttatatgaaagatggttatctcacaaaatgggtctcacttaaccaacccaatatcaatataacaatatattttctcccacctgtgtgcttatttcatgtctaaaaccctaacaaatcttggtttacttgagatttcgatttaaattataaataaaactttattccttcatgtaaagacttgcgaattttgactagaatctctattaaaatttggcaagaaagacttgtgtaaaatactctagtaaaagaatttcaatattagtgactcgtgtactaatattcattaacgccacaatcacataaaattttgtcttttgtactttaaaatcattctttctttaacttattcttttattaattcgattttcaaaaaaatggataaacaataataatataagttatacattattattatttcgatataatacaaaaaatttcatataaacaccaaatatatctcaacaacctttacaataattagttttatttaatggtaaaaattccttatttgactctttgttcgaaaataattccatttcataacaattttgacttcttcatctactttaatttattttcaaaaaaaatataattataattgaaattatagctgttaaataaaaagataaatagcgatataaatacttaaaattttaaagttgtaagtgtcataaatcttagtttttattttgtcaatactgattctctgttattgtcttaaacagaacacatataatatccaaattctagattattgaatttatacaaaaatatgtaatatcaattacttttaaatgctcttttaataaattcaaaacagagactcacaaattatttacaaatattagatacttatgtccctaaaaataaatattacttatgtcacttacaaactttaagtacttatgtcgttatttacccaaaataaaataattattattaatcctatgatgctacccatttttttttaataaataaagtctcaacttagaaatctacacctatagtgagactgtgagagaggccttgaatcccttgatcctacttaattttttttacaaaaaaaaataataataataatttacttaaaaaaaatttataacttttcttacaacttatatttttggccgtatttttttttttttttttgtttacattttagcaccctttagcttgatttctagtttggtcctgaatgtatgaatgtgacatagtttctaattaaaattaatcaaatttgatctatttttgatagaaacaaggatccaaaataagaggctcttttagtactattttgaatccaaaatcacatatctatatatattatatatagctaggctggcattgggatgaactagtatttatggaattatttcattcatatccatttttctacctaattaaatcaccccaaatcaaactcaataaattactatgtacccatttttcaaaacgaaagcaatgtactaggtttttcctaccctaaaatggacaaataaatagataaataaccacaaagactttgtgcaatatgtaataataagaaccatagaatggtccaaacaaagccttaaaagttatgcccacaactaaataagggacatttcaaactgaaattaatcaatgatcccctcaaagacttcttatatatacatagatattttctttgataataaagattaaaatatatcaacattaaatagatcatgtgattagtatcattaatatatgtaacgttattataaaccaaggtagataatttatacatacaatgtgtgattatgtagttatattcactaatgtcacttcactttaagcccctcacctaataaaccctattcaataaaaatgaaccgacctaataataaacttcatttggagactcatgtcacgtgactttaataactcaactataattttcacattaatatatcacaacaaaatctttctcattattaagtaattttgtctattgaaacttcaccataattaaatgctattttaatttgattaaatttatagatagaaaggtaatttgttatatttgtctcatattatttatgtataagcaatttataagattattacatcaagtcataatctcagtcataatcttgtaatagaattttgttaatgaagtattttttgcagttaaatccttttaactatcactttatttgtatttaagtttaaattttaatggtaaaatcctttaaactacactgttagtaaatttaaaatatcatttatttttcacagttaactaccaatataaattgctcatgtgtacactcttgtacacgtgacatgtctatattggtacaccaatctatcgggaaaaaacttacttcactggcttataccattaacaaagttagtgcacttatatttgacacaatacaatcaattccaaattcatcatgattatatatgtagactaaaaaactaatatttttttaaatatactatttttaatatttatttataatttacggtctaaattttattataaaatataattttaaattttaaaattataaaaatactattttacaaaccaaaataaaaaaaataattaaaaataaagaaaaatcaactttataataactattaataaattataaaataacaaaaaaaaaacccaatctcacgataactatagaacaactaaaaaaagaatatagaacagtttacttactaaaatcagtatttttgtaaataaaaaagttcaaattataaagataaaaatttctccatgttaatgtatttttataattttttttttcaaattttagtttaatatgtaaaattttgaaaaaaaatattagtagtgttcaatattattacgatatattatattattattgatataattaagtatcatttttaaattttatataaaataatctgaatcacaagaagaagaaaatcgaggcaaactttcaactaacaaatttttttatcaattcaaaagatataaaatcatattacttttgagaaatgttaatttttcaaacaccaaataacaattctctaacacaaagtaaaaaaataaaatgtgaagagttaagatgttgtggaagaacccaacatattatgaaattagatagatatatatagcatttgtaccataataacaaagtcaattttaagcctttgatttctcttaattggggacctatatcacatatcacaagctaaacatttatttttctcttccttactttgggattctattctactatttgattggtcacactcaccctcaccctcaactataatttatatacatttttgtaagaaaaaaaagaaaagaattatcatatattttatatatatagctaggtcattagaaatttagaataatgaggtagctaggtcacatggattgtcgttttctgtttctgtgtatagttagtgatgatgatggtgatgtatatgaaagagttgctattaagctttttcaaaaccccaaccaccccataatattagaaagaaagaaagagagaaaaccatccaaatctcacgagtcttttgatgttgataggtggaaattgactgattaatttagttgaattgttttctttgagtttttgtaaaatgggtgctttaatttctaatctttttcttctttatctataaaacttattattaacttgaaag

SEQ ID NO: 225322 - DNA, 2177 bp, Cannabis indica
aataaattggaataatttataatacaaaaataatgttcaaataaattaagcataattataacagattgtttgaattttattctcaacatgttaaattaatttaaatttttcaccaatttgtaggatgtgttaaataattacaacgtatattgtcatataaaaaattaagacaaactatctagttatcgataatacgaaaggaagcattgatatatctatttgtagaggatgcaccataaaatttctcaaaattaattatgatcgtttaaaaaagaataagaacactgattgtgacaaaattataaaatgttagcagtttgccttttaatttttgtgttgtcaaaatttttgacaactaaataaatgtgaaaaaaatatagtcttaaagagctaaagaaaggtgtaagatgataatttttatgtgattcgtgtgttatcaaactatagtccacgagtcaatataattaatgttgttaaggcttacaacaatgtcatatgttgatgtgacaagtgcatggacaaaccgatgtcttgaaaaagtgtatgttataatagttgatgtgtgtatctccatgtttattttgatttcttaaaaagtctcactctttaccttttgtacagaaagaacaagtttcagtgttcttccattttaggcaaatggaacaactggaacactcactgtatagaccacacatgtttttctcctctccaagtcaaaaaacattcaggaataattggaacactcagtcttcctgaaaggttagttcatcctggaaataaggaccttctcagatggtcggaccatctttcattagagaactcgaccaggattgaatggtctaggatcaacctatacttgattcatttagactttgctttgtggtttgtgggaaggttccaagtttgtcggcaccttcttgtagatccctccaatctcgtgctacgtcacttgtggacctgtctccttagtggcagcatgtgtcttgctgatttggcagacaacaatttgagtattcgaaaaaaaagacagaaatagaaagtgagtgagtgagtgagagaagattatggttcttacccttattctatcttttgctcggtattaatttttggatgttttatggtgcagtttaaaaatgaatgtaccaatttattgcatgttttagttatttagaacatcttttaaacttttaataattcacaataatttacaatacataaagtagggttcaaataatatatttcatactcgtaatagaagaggtatgtgtgcaatagattatttgaatcttgttttcgattttaattttttaaaaaaatttcaggatatcttaaataactaccttgtacactgtcatataaaaattaagattaaaatggtatagggtgcttctacaatacaccccattaaaatgggtgtactgatacaacccctaactgtttcggtatttataagaattttttagtctattttttcatagtcgtgtacgttatagttatttaagacattctgtaaaattgtgagaaatttagaataatatacaatatagaaatcaatgtttcaactgcctatttcacacgcgtataaattaaaaaagtcacacgtgcaacaaactctttgaacactgttttcgacgtgttaaattttttcaaatttctcaaaattttgtcagatatcttaaataactataatgtatacgatcgtaaaaaaattagactaagtattttttttatataccgaaataaattagagtgcatcgatacactcattttcctaaattttttattatttttcttttgaacagaatacattaatttattattttatttcacataatatagggtgattctacaatgcaccccttaaaagggatatgctgatgcatcttttacttgttttggcattcaggaaaaaaaaattagtcttttttttaatattcatgtacgttatagctatttaagatatacttcaaaatattgagaaatttgaaataatttacaatatataaaataatatataaacagtctattttacatgcttattttattccaattcgcccactatctatctctccctctcattcgatcgaccaccaccatcctcgacaacaagccactaccacgtccctctcctttgctctttctccctccacccctctatatgctctctctctctctct

SEQ ID NO: 225323 - DNA, 4995 bp, Cannabis indica
taatagttggtgaatcattaatatgctctaacttgtaatatattaatcagctgtaacatgtaatgtaatcaattttttatattaggaaaagcgttatatattattggatgataagtaatcttccaataatttgttcttatgaaatagttagtataaaaagaagacttggactttaaaaggcaagcaagatgttgagataagggagtgtcaaagttaaagcccattataaagagcacgtattaaagcccattagattaatagttcttgtaagcccatgtgtccagaatcatctacattcaacatgccgttagttgagtaaccaaaatggaagtgatcctcacacgccgactttcgttggcgcgtgatgagtcacgctgctgacattcatatgctacaatatttgagattttttattattattattttgatggcaatacaatatttgagattatcatgagtaaaaagcatttccatgtgatgcaaaattaaattatagtttacttagtagatgatataaatttgagctatttgttttagcctatttgtcggattattttttaaagttatttttcttttgttgttattttttagacaattttacgcttgttttttatgttattttaggttctcaaggtaagctcattgttggtcgcgacgagggtaagatataatcgtggcgaggagctttggcagaattgatattattgactcactacatttgccgcggtgagactatatctgtggtcatggtgacacctccgagacaagatattttcatcttttctcaattttaagttataaaagtgagttttaatagcggagtttcgaatttttaagagactaattcagaaaagaaccttataaataaaagaagaagactcttggagcgagcgtggtaatctgatcgagttcttcacccagtttctttctcttctttttattctttatgttttattttgtttttagtttaaacataaatttgaatattgagattatggactaattattcaatttagggatatgagaagagtttaagttaatttataatctatcatcatataggaggaagaagaataatcaattaacattttctcatccataattaaacaacctttattgttatcttgaataatctgtcaattgttactatcccctctcaaagattatttttcaaccaaatagaaacaatgaaacacaagtctaatttagtggtaatcaatttcaattcatgtgggtacttgagacatgctctttcgtagtttaataatttttgtaacagacacataataaatattgtgctaaatttgttacaatatttatgatacaaaatttacatcacattattttgtatttatcaaatttttattattttattagtatatttatgtttttttttttcaattataaattatttatattatcttttttattattatcttacatattttttttttgaaaagaatcattattttattaaccttcaacctcagtttttaaacaaggcaacaacttgattgggacatccccagaccaaagctacgattagaaagtgaactaaaaacttatacaaactcataagcaactaggttcattgaacgtttaataaaaaccaaagcaacatgcttcaactcaacaagcaaagaaatacaatcttaaatgattaaaccaaaagtagaattcatttgaaatgggttcctaatagcttgtataactagcaagcaatcagattctaaggttgtgttctgccatttattctccttgattcaagcaattattttgtttgccacatgtgacaaaatttgacagaaaaattaatttacaatactgtgaatagttcagagatcatttttaacgagttaaaaagttcaagggcacaataatacataaatcataattcgggaaaaaaaatatcctaaatagctttaattatttatacaaaatatttatatagtaaattttgttgcacttaacaatttattaaaaataatttatatataaaaatactcacaatattaaatttttaattagtttaatatttaaattctattttcataaatagttaattataaaagtatataataattaggtggggtttggttagagataatgaaatagaattaaatagaaagaaaataattttcattctatttttttttaagaaagtaatcaaactttattaactttcaaattcagcaaccaaacacggaagcaatttagttggaacatctccatactaaaaatacgatcaggataagaaatagcagctttagcaatcgtatgagctactaaatttgctgaccgtttcacaaaagaaatagtaacaccccttaaattcacaagcaagttttgcattccattcttttgtttggttacatattaaaaatattggaatatcattctaatagaatgatctttttattattttggtagaataactattccattttgaaatggaaagaaagatcattctaatgcatgatgagaataaatttaataattttatatcaattttttatacattttaaattttattccattctatttttattcctattctcattgtcattgtcattcctattcttatgattattcgtctcattccaaccaaacgtcacctgcgctcgcaagattatcgagataagtaatgagttaagtagtgataaagatagacgcataaaatttatggcaattcataccatgataatagaattagtttttatttctgataagaattaccaaaaaaaattaactaaatatctcaaatgtttagaagaagaaagtagaaaaatgctctcaccttaatttttttttagagagtcaccttaattatttttagttggtagtcttcatttcttttttgaatgagtgaagagagcgtgtagaaaagtgcgcgtgagagtagcgctcactcacttactcactcacttggttctagaaaggtcttttatcgtttgataaaaccttggtttctttctttgctagggcatactaacactatcagaaaagggttttatcttcatcgtcttcactctcccaacccaacctaatcttttacgccaagctcctatttttatttcagcttctaagttctaaggtgtttcttccttctaattttctctattcagattctttcttgctcaatttttcttcatttcctccgttaataattcaatcaattcaaggtttcatttctcagttttttttttcttgaaactcaaaagggcttgtattaacttttacagttttcctttattgacggttagcagactctgaaatggcgactgctcagctcaccgcttcctcaatttcgggtaggagtttgccttcgttcgaagggcttagaccgtcttccgttaagttcgcctctgctggaaatgtcaagttagtcggagttaatcagaggtctttcaggggtctcgtagttaaagctgccaccgtcgttgcacctaaggtagttttctttgcccaaattgagctcgttaccggtagtcttttgtttgaatttttctagtgtaccaattttgttcacccatttgtggatttgtgctggtaatttttgtatctaatttatttctgctgagtttgttggctttgttgcgatgtgcatgaaatgaaagtgtgctgtgtgaaacgatgtacgtgatgttgagcgtgtttgaacaaggaaaatggtcttatgaagagtctttatcattaggcttacatctttttccacattaagtatggtttatgaaattgtatttatatttcagtgccataggtctacaactttgagggtttcatatcattaattcaatagtgaatacgttgtgcacgatctgaaatatgctcaaattgttttttttcttttgtatattatcttacatgtcaaatgtgatttcaaatttcagtacacatcaattaaacctttgggtgaccgagttctcgtgaagctcaagaccgcagatgagaaaactcaaggtggaatattgcttccaaccacagctcaatcgaagcctcaaggtggagaggttgttgctgttggagaaggcagggcagttgggaaggcaaaagtggaagtcagtgtgaaggtaattgatttgcttataaaattttgataaatgctttctttttttgagtaataaaagactttcatttgtgacccttgaatgcttttttcaagtaggctggcagccaagttgtttactccaagtatgctgggacagagttggaattcaatggttcaaagcatcttatattgaaggatgatgacattgttggtattcttgaaactgatgatgtcaaagatctcaagcccttgaatgatagagtcttaatcaaggtttgttacctggcaactagactcatggaaatgatatgaggccaaagggtctcttttcatatgattatttaatcctctgaagagccatcttttattaaatgaagttgcattggaaaaatgtactgttgttggtgtacaatggtaatgacacacttaaaatttgtgcttccagattgcagaggctgaggagaagacagcagggggcctgttgttgactgaagcaagtaaggagaagccctctattggcacggtgagtattggttattggatattctttaattacttgtattagttccctcttggaagttggaaatgagtttgttgatgatggttgctgttgttttaacaggtaattgcagttggaccgggtcctttagacgaggaagggaacaggaaaccactttccgtcgcacctgggaacactgttatgtactctaaatatgcagggaatgacttcaagggcaaagatggtgactacatagctttgagggcgtcagatgttatggctgtgctttcgtagtttgtctcagatgtctctcgataggatttgctgcacaccttgtatcgtttgaattttgtggcggagttgagatttttcttctaaaggaacgttaattttttaatgtagcacaaattatagcacatttccaatataatggtagagtttttgtgcc

SEQ ID NO: 225324 - DNA, 6593 bp, Cannabis indica
ggtgcccttgtttgttcccacaatatcccctgttttgttaacttatattattattattttgggttttcatgtttttctttcacatgaaacattagtaccattactaccaccaccaccacgatcatcatcaataatctctgaaagaacagtgttttgatcattatataattaatctttatccatataaatattaattgtgggagtaaataggagtatttataataattattaagagagattaattgtactagctaattaataatcatgatggcatcgccttcggagctctcgttggaatgtaagccagctcacagctattcaatgctcctaaaatcgttcggagaacaccaacaccaacaacatcatcatcttcagcaacagcaacagcaacagcaacagcaccaggtacctcagcacgatcacacccacaaacttgaagactatcttaatcgcctagaggaagaacgtctcaaaatcgatgccttcaagcgcgagctcccgctttgcatgcaacttctcaccaatggtatatttatatattcaatttgatctacatctacatctacatgcattgtttaattttattaccatagatatatgaaatatattgaagaaatgtttttatttctttttttggcaccattattattatttgagagcgttacaactaaatatatctatataaatatgtatcacttcactcttctaattagagaaaattcttataatatgattacagtaactaatttataatgaaatggaaggttcgaataatctggatatatatatatatatatgaaacttttcatcttctcatgataaatttggtaatattatagctgtggaagcttcaaggcaacaactacaaacgtatagagcaaaccaagggccaataaggccagttctagaagaattcataccattaaagacttcaagctctgaaggctcagcagatcaaaaaatcacaaacgcacctgataataaggcgaattggatgacgtcagcccaactatggagccaaactagtagtaacgatggaagcaagccacaacccacaaacaacatcaacaacagcactaataataatagtgtaactacaaaagaaggtgatattagcttcaacgtagtgagcagtagtccaaagctggctctagataacaagttgtctcagaggcttaatggaccagctggtgcttttcttccgttctccaaagacaatattaacagccgtacaaacaaccagagttttaggccgctgcctgagctcgctctttctgcttccgtggcggatcagaaagacattattgttggggaggagaatcacaagtgcagttcggaggctgagaggagagaaaactcaggcaataataatggaaattgtggcggagtgattgttgaaatggggaaaggaggagtggctggaaataataactgtagtaatattaacggatcagatcatcatcatcaaggtgtacaaacaattaatactaataatactaataataattccagctctacttcaaataataatcaagctcatcgaaaggcaaggaggtgttggtctccggatttgcaccgaagatttgttaatgctcttcagatgcttggtgggtctcaaggtaagtaatattagtttaattaatcttttttataatttattattgatatccttttttagtattaccatcacataaattataataattaaagttagttattattctactgtgatggaaacagttgccactccaaaacagatcagagagctcatgaaggttgacggtttgaccaatgatgaagttaaaagccatttgcaggtactatatatgatttctctctctcatgcaacaaaataatatattattcatggtaaaaacaaaaaagaaaagaaaaatacaaaaagaaaaaggaaaaagaaaagcgtttgtttgatgtaccgtttcaaaagaaaaactcagggagacaacgtcccattctgacaatacaaaatcatatatcagtgattttgtttcgtttttttctaatataattatatttatttatacagaaatacaggctccacaccagaagaccaagtccgagcccacaagcagcaggggctccagcgccgcagctggtggtactaggaagcatctgggtcccaccagagtacgcagccgccgcagcacacagtggggcccaaacaaccctctacagttctcacgcggcttcccacgcgccgccgcctcactactgcgcgtctcccgtgcctcaagactctacgcctcgcaagctcatcaccaagctcaggctcaggctcaggctcaggcacagggggtgcctcaccaccagttacaccaccatcacgcgctccaccaccagcttcaaatgtacaaggccacgtcacagacgcacagctcgccggagactgacggccgaggggctgctggcggtgatcgatcggagagcatcgaagacggcaagtcagagagcagcagctggaaaggcgagagcggcgacaatggaggggagagaaaagggttggcggcgctgagggaagaaggggaagagagcaatggaagtgagatcactctcaagttctgatttgaggtatagagtataactagtgttaggatgataatggggtcttgtgtgttaatttctcatgattgccctttaatgatctaattttattcttgatatatatatatatatattattatttagttagttagtagagatcatatggtacgtataccaaaagagcataacggcaactaagaatgtctatttgttttgttataaattcatcttttatgtctcataagatgattatccttatttgaggaaaaattattcaaaattttaatattattattatcattgaaattttcttcagtacttttgctatttggacataccttcattgtttgtatatgccaattatgtctctataactaatttgatataaaacggcacattattatcctatatatatacatatattataaaattgagtaaatatatgccctcaaaggaacggtgtgattttattcacaagagaaagaaaacactataaaaagcgtacatatgttgttagttattagtaaatcacactgtggatgaatgtatatatgttactgtatgtatatgagtatatcccatttatatggccacatggtatgtatgaatatcgtacgtgtatatgtatatcccatatggccacatggtaacatggtaagtaaaaatgttttacgtgactttgaaccatccaccgacacgattacaataaaaaaataaatattaattatacagaaaaaagaaagttagcgataattgatcatataataaagatgagatcgattggaagtcctagataattaatttattggaggaactgaataaaaactaggagaaaggggcaccgaaagtgagcctgacctgaatgaatgaatctctttccctctcgttactaccatcccatgcctactttcttacttgcttttttcctttctttttgtttacatgcccacttgactctctaatttcgtaccatttttctcttaattaaccccattttgtcccgctcaccattctcttttcttttcttctaatttataaaaagagtttaatctgaaaactcacaataaaaataataaaaagtcctcaattatattatctaaaataaatgatgaaagagaagctcatttatgtgttaatatttatgtggatgaagatttagtcgagtgatggggtagcagcagtcctggatattgttgtgccttcgtgggcttcgctctttatttgttttttgagttttgtatggtttttagttggaacaatatgcatgttgtgttcgtgtcctttatggaccttggcttatgcttgtctgatcttttctttgaatatatatatatataggtcacatatatgtggttttattgattcggtatggagtatcattctctaattgtaagattttttaaaagctaactattgttcttgttgtccatttggggatcgattggtcttttctatcacctatatggtgtttgtggttgcccaatatgcatgttctatgttcttggtttatatatctgctcctctctttaaagcatttttttcttttttctctattgtaagcataattacttgatctgtataggttttgtcgcttctagttttaaccattgaatgatatacgtaatagaggtgcacatatggttggattaaagatattttaatgggttaataacctaataactacgtttagataagttataaattattaacttttttcattgtacaacccaaccctacttaatacaataatatagagggtgagttgaattagatttatcagagataattattttagactttaatatttatattacaaacttgataaaattatttaacttagtgcatacaacaaaaaaaaacgatgcatataaatatatatatacatatatgtgtgtaatataatgcttaaaagaaagttaaggtggtagtgatatcattgtgtgagtagcaaagttagtaataatgattgattctcacattaattagctttgttagtagaaatagtatgataactatgaactacatgttagtgatgttttttggttattatttcacattttaaagttatcacaataatttatttatgtatgaaaatgtaatatgtatatttatatatattttgtgaatgtaaaatatatttaatgtatgaagatgtctcaaatttttaatatctcttaagaaatgagttagtttgggttatatagagttaaagtgcgtctaataaccaataattatatggtctatcactttttagctcagtgagtcatgacctgcttttaacataattatttactacaaaaaatagattgagttggtcgggttgacttaatggtttgacccatattttgtgcaatcctactagaggtgttcatccaatttaatctgcattattttgttcatagtacatctgatccgcattaagtgcgaattttatttttttgaatccaatctaatatgcacaatagcttaaaaccaatccaatccaatgcaatctgcaaaagtacggattggattggttattttgaatttgttattttttaatattaaattatttaatatttatgaaaaaaaaaatatttttttttcatataactagcaacaaaataaaataaattattgtttttttttatgtctttcatcaacaaactaaaataaataaaataacaaataacaaattcaaaggaagaaaaaaaattgtatgtataaattaagaaatatttaattttgttttaaattgtatgtagaaaaaaaaattatataagaatagaatatacatttgatatattaagttttaaaacataattatattatatatatatatatttatattacacttttaaataatttttttctttacattaaaatgtcatttgtatatataattttttttataaatatgtgtagattaaattaattcggttacttttacatattaatcaacatctaattcacacaaaagaaataacagaggatgaatgaaacaatattcccattactgaatcaagagagtaatagctctttaattacaattctatgatagtaagttaggaaagaaataacagaattcagttaaataaagtgtacaagttgtaactaactctactaattgtattccgctaacaaacattcttgcttaacaccctccacaagtttaactgggaaagggagaccagacttagtatgtctcttaatagtgcaaatctaaaagtatgcaaagccttgatgaatatgtcatctatttgatcttaagtgcttgacttgaagttgattgttgaagatcttttctcgcacaaaataaaggtctggctcaatatgtttggtgtgcgagtgcagaacagaattagtagacattagaactatactctcgtaaacacaccacaatgtaggaataggttgctgagcgaaaccaacttcagtgagcaaggaggagccaaactaattttgttgcagcattagcaagactgcagcattcaactttgattcgaacgagtgcaacaatgtattctttgacagactttgtgaccaacagatcctaaacgatccacaagaattttgatttgaagaaggtacttattaacagagagataacctttcttgcaatattggagatggttggtttacaaattaattttagtagaagtttgagtgacaaaatatacctctaaagttttctaaacttgagctgagatttcagtggcaacgattcgagtgaggactccattagacataaaagagatgagccaccggtatagcagttgatcctaaacttcccatcccaagaaacgtggattgaattgaccaagaatttgagcttcttgattgagaaattttggtggaggatttactaaatcagagataaaatcataaggacgatgtcctcaaatggcaaagagaacctatggacgccacaataaaaatgtgatcgtctagcttgacagagactgagaaaaagcaaccggagtgaaggctaactggtgtggcaggttgaatcgccatgaattcagagaaaatgggatgacgaacacaaagat

SEQ ID NO: 225325 - DNA, 2356 bp, Cannabis indica
tctggccccaacctaaaggccagccgattctccaaggctttcacctccacgatttgctccgtcgaaggcactgcgtgcatgtcgtcgcaatctccatcttgcgaaccaccgacatcatggccgcccgccgacgaaattggagcctcttcgcctccagatgccctatcagggtcttgtttgcttccttttccctttgcatctgaagaggatcaaaaggaactaccctcctagcgagggcaaaacccaaccgaaggagttcttgacgaggccgaagggagagacctaggctggcccagcctcagttgggaataagggggccgggagcggtcccccattccccccatttcgaggttagacaccacgagcttttgcttcttcctggcggaagaaatactgcccgctgtctcagaagggctggttttctccggagtagacataatgtacctgtgagaagtcggcacaaagaaaaaaaaaggtcattattcgaccccaaaatttccaagtatgacactgctgaaactggtgtcctagaagcgggtgcgccgtcatgattccctaaaaaactcttcacaatgaataaacgaagaacttaccagttgatgagaggaggttagaattgaagatttcattgcaacgtcgacaacttgaggatcggtgttcggcgataataacagtaaaatgtgactgggaagaaggcaactcaaagtttttgacttgacaagcaagaagagtgaaaaatataatggccattgaaggtaattatgggatgcctaggaaggagaaccttttgtaagaagtccacacttcaattcgccccaaaagacatccaatgattggatgtgaggagctaaaagagtacctcatctcccaacaaacggctctcatcattgcatgcatcgtaaagaacacagcaaatgagaagactgcctaagtccaattgccgccgttttgagcttcctaaagacacgcgcccagaacttgcgcaaaaatccaaaagttagcatttaacacgctcacaagaaaatgggagaaatcatgcctcccacatcatgacacttcagtttggaggctgaagacgtaatgcattaaatgacttgtcataagtcccacgtgcgcaaagatttctcaagagatggcgctgcaagctcccagaccatggtatgtcccaaaagcttgggggtaaatgtgatctgtattttttccaggaagacacagggacattgattaaagaaggctaaagagtcattgagccgcccaagtgcttcacttcgcggtccaggaagataagaacattaacctagcagaaccgatctctgcgtgaaaagtcttcctgggtgcaggccacgagagatgtccgtgagctaacaattctctccattatagaggacaggaccctttgtcccccgcaaagaatatggatcttctaccagggtgcatcagtccagggtacgcctttggcccgcgaaaggtcggtccccgcatggcaggctacggacccaatgacagggattcttagtgtacgatgttagaggtcttcccccacgccatgccactatgcagaccatgcgtgtccttgtgtaatttgccaaacgattcaacaactagggatgaggaaaattcaaatgagagtggctctaaggtgacacgcgtccaaagcaccgccggtacagccagtacaatctgacatcggtaaagaccacatgaaaaatatgccacctaccaatccaatggtggggttcatccctatgaaaatccatccaagatggcccaggcaagtgaagtcggcctataaatactcgaaagaaagcataaggaagggatttgatcccaaccaatttttctctacttcagcccttcatcttgaagctaaagaccgattctccatacacattactgtaaccccaagattaattctagaatattcctactaagcttcatcttcttcaagaggaacacggtgggaaggagtaatagtccatcatttttttatttgaataaacaatcaccaaccaaagagcctaataaaatggactcgtggactaaggatagttaacgcttgaaccacgtaaaaatctcttgtttgttattacttcatttataccttcactactttcttaaggtctaaaaatattcggttgtcgaaaactcggtaaacattatataatggaataacataattcggttatatccatttattttatattatcagttaatttaaatacattatcttataatatatttaattcaaataattaaaaaataattatcattaattttatttatcttattaaataaaataatcaaaataaactaatcaggcttttatatgtcaccctacatgtatgggactaagccc

SEQ ID NO: 225326 - DNA, 3853 bp, Cannabis indica
tcaaactgcaactgcactgcaagatcttaaaaccacaaaaaccacaccacaaaaatgcagtgcaatttgagcggtttacactatcataattatcaaacattaaaataaaaatttaaaaatcaatttaataaaatttaataatataaaaaaaatcttgttaaaattttaacatcataacatatatactaatcgtctctaaaaaataatataatatacacgtatattacatatatttgtttttatatcaaataaaacaaaaaaaaaaaataatattgtaaaaaagtgataacttggtaatatatagtgcggtgcattttgaatcgcggttattaaattcaaaaccgcacgacgcagttcggcaaaaatacaaaccacaattgcactgtaaaagattttaaaccgtattttttacgcagtgcgagcggtttatacggtgtaagttgtttgatgaacacccctaataatactttattcaaaaacctagactatgtgatgaatctaaggcatgcaaaccaagaaagataataatcaataatgtgaatgaagaaagaaatcatgaagggatcattacttacatgaagatgcagagaaaagtgtaacaaagagaaataaaactccaaggaaaaatagcaaattacaacaatcataaaagagctgcaaattagttagaatccaagattttgtcttctctttctcatctcttttttcttgggaagcaaatccaagagtaatgcacatgcatagaaaatgaacaactagtgtgcagcattttcctcatcacataactttgtatattccttaggccccaacaatgattctaactctgagggattgcttggcttcaccttgatcatccatccttcttcatatgggcttgtgttgatctaattcatagattcaagaagaaaaaatgagtgacacaatcaaaacattacaaagagcattgctatcaggcaccagtggttagcgatatttaattgtaccaatagcgattatcttgaattgaaaatatgttgttttttagtagatgtctgctgatgattgaatgggaaaacaaatcatcatttattaaacaagagagagaacaaagggaatagctgtttggctgcaaggaaaacagaggaaaatggggagtaattaccaagccaggttttcccttaaggctggagttaacttcaacaatctcaccagagattggtgaatttatgtcactgctggctttgacactctccacagctccaaagctgctaccaccagagacagacacaccagtttctggaagatccacaaacactacttctccaagatggtcctgaaatccaaattgtataaaacatcattgttaagcactttaaacttcaaatttcaacactttttttttctcatttcctggccaaactagtgcaaaatatactgttttcccatttatgagtggttagaatgaattttagaaaagttaatttccattttgaacaaacaagtggaaaactataatgtttcaattatttgccagccaattccttactgaacgtgtaacattcgagtcaggtttgtgtttgacatttgcttgtaataattaagtctcaacacgacacaaacacgagcacgactcgtgaacacgaattacacccctaagtatcactatataggacaaagatataagaatgaaaaactttgagggatcatagctctagaaaaatgacagaagaaactaaaacaaaaatgaaaaacataaaaaattacattacataaaaggggttttagttgaagttaatactaacctgagcatggtcagtaatgccaattgtagccactgggccttcatgtttgacccactcatgtgaagttgcatatttcaaaccatccaaaactacagaattttccaacaaattagataacccaatttccatttccacttatagaaactaaaacaagacaataaacccacatacaatatcacaaaagtagaataaaaagagcaagaaaccaactaatatgagtcaccattgttttggtaatataaaaaaagaatgtagagaaaacccaatagagtaaaaggttaaaaataccggttgagaaggatttggagagagaaaatgtagaggagagatgaggtttggaagcagaagagagtttgagagcattggctgtagaagaagcccacattctcagtgccattatttctctcttcttcttatttctttctttgtgttttattttagggaaatgttgaagagaagaagatgatgagtttatatgattgagtgggttttatttatcttggatgaatggtgaccaatgaaagcctcatcctaaaagcctctccaatttcagacaccccatttttcatatttaatgtccccctcttttttcttctttttctttaatgtacataaatttagtatttatttatttttttttacaaataaatttatcacatttacttcatataaaaataataaaaaataaataaataaaagggaccttatcttctttatattttattttttttttacgaaattttacatagaaaccctataacaactaacagagcaacgtaaatcgtaaccaaaatctacatagtaacccatatagaaattattggagaaatcaccggagcaacttaaagcgtaaaattaaaaaaaaaaagttaaaaaatagtatatagagtaatttctctaaataaaatactatatctatttaataaaactacggcaaaagtctacactataggagaaagaaaattattgtcaatattttttaaaaatagtttttaaagttatttaaaaactttgaatttgtaatgaataatgagataaaagtaatttaaaaggaaatgattagaactttcaaaaattatctcttgttgctccctctgtttctatttttgtaatatttttaaaaaaacaatgtaaaacactcatactttttttttaatgaaaggagaaaaaattctcattaaattaacaatcacaaatacaaataaagtattgatgcaaaaatttagacagatatttgaccatgtttgctcgctagattggtgaggatgtaatgagagttaagtataagtaagagacacaacaaatttatagtggtttactctccgtgacacgacgtgaatagagttacgcctacttcgagtttatatttctcacaagaattacaagaattggctaaatgtggggtcgaaaattccagagagagaaaatagcgagagatttcaagaccttatgggaacttagatgaatgggaaaaaataaactagataagctatccttttataaggactgtgattctattaaaataataattaaaaataacaaaaaaattgaaaaaaattattttgggttgatcttgatcattgatgatgatcaatggtgaaaattgtcaatttttggactttgaatctctcgtctgttggatcatttttgggttatttactggaagaattgcaactttgttgaggataaattttggacctgaaatattcagaattgagatgtgggtgtgatacacaacttgatagatctttaaaatagctttgaaactcaagttcagttgcatcaattagatcaatatcgagtgatttatgactattttaatgaaggttattcaccaccttacggctaggttgacaacctagcgcccaggttgacattctgacatcaacttggacgtcgggtgagtgccaaaacgtcctaaagttgcattttttgatgcctaagtgatgtgttggcaccacttagtcaaatttaatgttctggtgaagttgttcaccagttcttgaagatgtcgctgttttgtgaaatcgagaagactcaaaactcctcaatttgtcgatattccaccttgt

SEQ ID NO: 225327 - DNA, 4875 bp, Cannabis indica
tattatatacaaattgatcttcgagtttattattaatttatctaatatgacatcttgaagcttgaaaagccattgcttgacattgtcatctcgaagttgcttgtcctgagcatcattgaaaaaggcaaaggcaatggaaatcgatatgagaagattatttagagctgtagctaaaatcggaaataaaggataaaactcacatcaaacatatatacttttgaatattatgatgctaaaattacttttttgttttttttcagaaaaaagtgatagaggtcacttgtcttagagtgttcccacttttggcagaggaaaattgtagtaacaaaggtctattaatatataatcataagctactgcatataaagctggaatagatgaagctattaataaatggagaaagcctatggagatatgagttgagaacttagttgcatgattataatccaacacatgacattagtgaatttaataaataaaagaatcaagcaaaagaagaaagagaataatgtaccttacatacctacagacatcactgcagaatccaatgtcacatatccaatgtgttgaatcttaggccaatcttctcctcttttcttacaccgttgctttagcaaaggacatttccatattcttaattcagaaagggaagtaggtaggagttcttcgggcaagcaccgcagcctttcacaattaataatatataagaaagtaagggatgtgagttgttgaaaggccttgccatttaggctttcaagcttactacaatccgaaaattcaagtttcttcagagtggtcggaaggaacccctcatctagaaaagaatcatcttcccaacccttgataactaaggattccaaagaggagagtctatgcagatcccattgcttacggttctcaaagagccttttgcacttacataattcaatcatctttactttggagagtgatccccagtctagaagtgattccaacattggacaaccccttatccatagataggcaagagaggaaagggttgtgcctatgacggtctgttgagtagttctcgggaccaaacccaccatttgttcacaattactgatactcagacattccaaggatgaaagataaccaggtaacccaactttaagctttggacaattcttcaaatgaagtgatttaagaagagggaataatatttgaccttcttcttcaagaatagcaaatgaccaatttttccactccatcatatctgcaatccttaatgattctagacatctgaatagaagaagaccttgatcatgaggaatctcatcacctattgagatcacactatcacatcccttaattgtgagatctttgagaaatgccagcttcccaagtgggggtaaaatacaacaattcttacaatcaataaagctgactgatactaacttagaaaatgcagagtctacaatccagtcagagaatgttgtacctttgtaacattcaatctcaagatgctccaagtttgtatgtggccgaagtgcatcaagtatgtccttttctttttcttttactgaatcatcagctacactgccattatcatcccacctcaaagtcagtttagaaaggcacttcttatccttcatattagcctctgaagcttctcttgcatccttgatagtttccaaaccagaaatgcaccgtaaattcccaagttctccaaccttattcattttaaatcctccgctatttctatcaccactcaaagtgacatgggataaaaaatacaagtgttttatgctactaagttcttgaggaggctctttcagaggtacacgatcaatatctagatatcgcaagttgattaaccttcctatcttcttgggtaattgacgaagaaaattacacccaaataataataaagtctgtaaattgtataaattacaaactgaatcaggtaattctctaattgaagtgtcagacaagtccaggtacctcaaatgctttagattaccaatggaatgaggtagcttctccatataacgttgacttaaagaaagaactcttaaacaacttccacatgtaagaaacatatcacactccatactccagtaatacctatttgattggaatgatattgctagaaaggtacgcaagcccttggcttcatgtaatcccttgcctttgtggactttgtaatttgccttcttcaaaaatgacaagtgtcgtgtatttgctggaagttcaagcaaatcattactcaaatccaacctaaagcaaaagtcatttgatacgaatatggccaaatcatgtagcaggtcatgcatttggagcaatgatttttcttatttgaatattgaaacaatgaccttgacaaaagatcttcaagaggtaagtgacgatagctcaaccataacgctggaagaatggaaccctccttcttgtacaactccttccatgtggcactcataagtatatcttcccatttcttagaatttcgttcagagcgcaataatccaccgagagattttatagctaaaggaagacctttgcatttttccacaatttgtctaccaagtacttccaaatctttgcacttagtatcgagattgtcattgtttctaaaagcatgtttgacaaataattgccaacaatcttcatttgataaaatccggagatgatgaatatccccagtggccatagtagaggcgacactttcacttcgagtagtgactacaattttacttccatttgctccagaatcgaaacaactcttcaaagagtcccacaaagtataagactcattccaaacatcgtcatgaacaaacataaacttcttcccctgcaatgcttcctttaatcttcttcgaatttcatctgggttctcgatttcacatttgttggaagtgaccccctcaaagatctctctcgttatctttgaaatatcaaactcatctgaaacagtaacccatactcttagctcgaaatgttttctaacacgaacatcatcataaacaagttgagcaagagtggttttgccaacaccacccatcccgacgatcggaatgacagaaatagcatttcccccaccaactgtatcatctctcagcagcaaatcaacaatggtctccttttcagcatgcctcccataaacatcggattcttcgactaaaggagcaggtggcttttgagtaaaattgttttgaacaccttctctcaagccaagagcatccttttgagcaagaagatcatctactttaacaaggatctcagtggcatcactctgtacagctttttgaaagttaaacacaaagggtggcatggatctcagttggtgaaacattttggttgcgcgactgccaggttgatcacgtttaatcttggatcggagagcttcatagtccatcatgtccaccaagtcgttggcttgatagatggcatcttgaagcttgaaaagccacttcttgacattgtcatctctcagttgcttctcctcagcatcattgaagagtgcattagctgataagagcttagtgttgagcttgtccagaagcttcagaatgggcttattctttccctgaaacagctgggatatttgctcagacaccaatttctcaaacaagaactcaagtgaagaagagaccaaagcaccaacaaccaattcagcagccatagtgtgcaacaaaaatcaaatcaagcttattttgagcagcaaagaaagaatagtattggatggatgcagttggtttggttataataatttgttgactgactctgtattgtaaagtgtgttgtgttattactattgcagcaaattccataagcgattgataatatatatataaaaaaataaagggcatgtgagtcaccgaccgtttctttgcactttgtttaatacaagagtagtaatgcaaacaaaacaactgctatcatgtgctgtagcctcttcccctttagattttattaattttatcatatataggattccattttcccaatgacaaacttggtatgtgaaacataaaattaagaaatactattgtcttacaccaataccatcactaggtaacaccttacaatttatttttaattctttgtaatagtttttaaatgaagatatacgggatttgatattaaatagtaccaataacgatacacctcttaccaattttacatttaataaacacaaaatgctcaatgtaacattattagaccattaaaatttgttcatctcatggatggtacaaatgcagaatcttttatgtgtttatttctgtacttaatccttgtttattcaatgctcaacacaaaattgtgttgtctttgacaactgcaaaatggggcaattagtaactgaaacaagcagcctcattacacatttaattcctcaatactactcatacactcaacctatatacctacttcagccatgaccaccccagcaacgtcacacacacttgtaatgtttggccacgaccacggtcatctcattgcttatgaagatatgaacaatgatcttcttctttcagattaggagtactggtaggctagtgaaccagagattttgttgtttactgtttagactgacagtgtctgctattgaaacctgtaagcactgcctttcttcataattatagagttagacaaaacaaatatgtaagagttgtactttattaacgttttcatattcatattcattggttttccaactaaatctgaatttaattgcatgacaataatccaacaacgctacagccttaataataataaataaaagaagcaaaagaagaaagagaataatgtaattgagaaagagagagatcaatgtagatgcagacacagcattagttgatatgttcattcaccatcatctaatgttactttgtgatgtgttgaatcttaggccaa

SEQ ID NO: 225328 - DNA, 2831 bp, Cannabis indica
gggcacaaaacccaacagaagggtgtagcatgtcatcaagagatgaagccaaatgataactagttttgatagtataaaaactagtatgatcatgatgccaaataagggagtcttcactggaaaaatagcttaatggtagggtcattattcgttccacatccaaaggtgaaaaatattggtttggaagatcagaattccattgacattcaaccatcattaagcttgccactaccccatttaatggacatgtatatagagtcaggtaaaaggaattatagccaggtatccattgatttaaaccactcttaattcttctgccctcgccaactttccaccataaaccagccattaaaagttcccaaccccataatattccttgccatgtcaaagaaagagagtgttctagttgagcctcaaggaaatgatttgttgaaaagtaacgagatttcaatagcctactgagtagagaattatgagtttgcaaaatcctccacgcttgctttgctagtaaatattggttaaaatactcaaaagaatggaaacccaatccaccatctatttttgttttacaaagtaaattccagtttcgccaatgtatttttgaacccgtagcattagatccccaccaaaaattggccatcatagattcaagttgtttatagaaggtgactggcagacaaaataactcattacataggtgggaatggattgcaccacttccttcaaaagcacttccttccccctgctgattttttttttcattccagttgtgcatcagctgccatatcttttctttaacaccgctgaaaagttgtgttttatctcatcccgtatagggcaggtaaacccaaatacttatcatgacactttcttatcgacattgaaagttgtttatgaaaaaatacatgtgcagccaaagttgtgtttggagaggaaattacacatttattcaaattgagaacctgcctcgaggcatgatggtaattatctaaaactctcttgacggtgaggcatgaattctcattggctcgacaaaaaagtaaatgccatccgcgaagagtagatgggagaggggaggcgcacgtcgagtaagagaaaagccatttaacaatcccaatcttttctcattttgaagtagcctaggcaaaccttcaaaacatattagaaacaaatacggtgagagatggcatccttgtcgaagaccccttgttggtagcaaagaccccattaatccaccattcagctgaaaagtaaagctattagtggtaagacaacccatggcaagagaaatccaattctcagcaaaacccattttcctcataacctcctctagagcgtttagtcttcgggacattagggcttattttgtatagtcgctaggcgacaaacttttatatatgcacagtgaaactttttgtaaatattttgtaaaacaagatcccggtttattataagtacaaaattttaaagtctattgataattaagtaaaattttaattaatcacgattttcaataaaccagttgattagcaacgagctgcacagttaagttaaaagtcacgttaactttggtattagagccgccaggttgtcttccaaagatcgtcacgacatgtacaataatcatcagcaattagctcgtctcacggttcagtaagtctttattgctttagtagtttattttagtagtatgatttaagaaaagcctgataggaagcatgttagtagcctaacaactgaataggggcatgttttaaatttccaaaataagcggtaattaataagctattcttgatcgcgatttgacgagactagttcttggttacgcaggttgttctagtagtatagacaccaggccaaacactaggagtaagggtaacttggtcaaatctattggcgatcagggagttcagattccccaaaatttttgaggctaaggaaggggccctagaggcaaggcacgcggttgaggtgatgtaacccgccacaggctgcctaagctaccccaggaatgggaaaataggtttgcagaaatgcaagcccaaattaatgagcaagatgaagaaatcatacacttgcgacaaaagggtgctcctgcgatcgctgttccagaaatgcaagtagatcctgccactgttgtgcaggcaggaccggttattgcaatgaatcgtatggaaccactgtatgaaaggttccacaagtaggcacctccagtctatctacgaggtcccgatgtaatgaaagtcgagtagtggctgactgttattacaagaattttgaatttcatggtcgtcactagtaatgacagagtggcctatgccacattccagtttcaagaagatgttcttttatggtgggacatggtgtccctgacttatgatgttactacgatgacttgggaaaagttccaggagttgttcaatgtaaagtatttcaatgaagcagttagaagtgcaaaaagaaatgaatttactcagttgacccagaaagagaatatgactgttacggaatacacaacctagttcgatcgattggctaggttggcctcgggaatagtgttggactatgttttaccaggatctagatttactaccatgtatgttatttaacatcctaaatatgaatttctaaaataatgtaaataaacacatataaagtttaggaaaccttacagtgggtgcagcggaatattaatggctccttccactcatatctctaacccctaatatcctgtctgttgcagagtatcactaagatctgagcggaatgtccttcacttgattctggattcttcatagccttacacactgtgattgagataccacttgatg

SEQ ID NO: 225329 - DNA, 1925 bp, Cannabis indica
gagtgtttgagtctaatttatcttatcatcgtgtatgttatacttgtataggatcatttcagtaaattttttaaatttttttaatagttacattgccgaaaatataacttaaatattttattgcatgcatttcatatatgtgtgataaacaattatttgaaccttatgtttgactttctaaattattcgaatttttttgaaaaattacatgtaacattaaataatttaatgtgtatgattatgaaaaaaaatactaaaaactttttttaaatatcgaaacaaataaaaaaatgtaccaaaatactatttttaagaggtgcactataattttttttccctactatagtattatttactatttgttaacattcatacattcaaaatggattgtattacatttgtatttttgtgttatttgaactgaagtttcattttcaaagcactaattaagatttaaaattctacttttccaatattaaactctgaaaataatctactcttaaatataaggttatttaaaaagtaacttcttttaataaaatatttttttaacatttcgaaatgattgcaggacaaaccaacattattcaaatcattcttcaagtggttgaaaccaggaggaaaggttctcatcagtgattattgcaagagtgcaggaactccttcaatagaattttctaactatattaagcaaagaggatatgatcttcatgatgtagaagcatatggacaggttttgtttgatgtttagttactagtatcttattaccattgaaaaatgctaacataacataacataacataacataatattattttgttatgataatttcagatgcttaaggatgctggctttgaagatgtcattgcagaagatcgtactgatttggtttgtagaaacacacaatattgtttcgagatttattgaaaaagtttttgatgtgttgggagatttcttataagttaccaattgcttcatttctttttttgtatcatagttcattgcagttctgcaacgggaactcgatgttgtcgaaaaggaaaaggaagaattcataagtgatttttctaaagtaagattttttaacactcaaaatgcatattgtgatcgtactttaagtctgatttgtcttagctcaagatcgaccctaaatattgtgtacaattaatgtgttaaataaatgtgatattattgatcacttcttttttatgtaactttcttttgtttgattgaataaatatgtaggaagactataatgacatagttggagggtggaaatctaagctgattaggagcacatgtggagagcagagatggggtctcttcattgccaataaaaagtgaaataatatttgaaaattgccattatatttatatatggttggtttgaatttataaatttctaataatgtttgtactatctttctatggggtatgtacccataatgcttatgttttccgtgactgggtaaatgtttttattatctgttaggcttagtttggtacgatatgttatattgtattgtattatgtcgtacaatattatattggattgcattgtattgtattaatattatttaatacaaaactatatttggtattgacttgtattaataacttgtgtaaaattatattatctttaccataaattagctaaactccaactccgacctccgtctagatccgaggtttgggtctgggaccgggggttcggggtcgaggaacgggatcaaggtatgggtctgagtctggatccaggattcgaattcgggttgggtccaagtacgagccggggctagggtcgggtcgagggctggggcccagatcggtttcaagttgagggctggggttggtatcagggccaagtccaaaattagatacctatagagttctaaaaatataacttaggtatttacactgcaaa

SEQ ID NO: 225330 - DNA, 3645 bp, Cannabis indica
ctgtggagttctttcgtgatgggctaccgaaaaataagatgcaacttgttgatataggtagtatcaatcaatccatttaagccatcttcaactgtgtagtcccaaacccacacaatcttagaatcatctcacttgaccttccccagacgatgtgagattgtacagcttactcggaattttctcttacggatcacgggactactgactgtcacaatatgaataagtcaaatttatgtggtctattttagaataaaatttaagacttaaaggtatgattatcataattttaatatattgatactataaagataatttctaattaaatgtagggcgaaattagaaatattcattaaatattactaactattttgataattggtaatataacttgtaaaggttcccaatttgcaatatcactccatgtcatactgttgaatccccgtcgatggtaaagagagattaaggctccacaaaggatttttgagtggaaatttcaaagatgatacctttgtataatcaattctatatgattcggctaatctttgattattgattatttgattctcacgaattatttagccctaaattcatattaaaagtattctaatatgagaaaaatggaatttgtcgtattcatagtgtgataataatatagtaaataaaaatgagcacccgaatcattttcctgtcgacaatgtccggagtcttaggaaaattaaccttaacaaacaaatgtacgttctcgaacaccccaactccatatgcttaatttatatattcacacatgcatcactattttcatgcattgaatacacaaacctttttctttttaatttgtttcatacgagattaaaagctgtctcaccacttttcttgatctcacaattcagtaaaataaataaagaaattctatacacacttttatataactggctaagctaaactaagcataaacagttcataattaacaaacatgaatatgcaatttacaataagtacagttctttcactagtgactctgttatggcgcacagagttagtatctacaactaagccttgcccaaactgtggccgtacagtagttcccttcccactgagcaccgaaccagagtgcggggaccagcaatacaaggtccgatgcgagatgggcaagctctggttcgacgcactaaacagctcctcatacgagatcactctcatcgaccccccagctcatcgtctagtggttcggcctccagggctagcgaaagacagtattaaaacgtgcatggcggccgatttccgaagccacgggattcagctgaacgacactcttcctttcaacatttcggggagcaacacggtggtggggatgaactgttcatccgaagttctcgaaatttcatggaactgttcgtccaatagcccatgtcacgattacattcgaagcaaggcaatgaaagagtgtgggagtttgccaatttgctgtgtttacaggacaggtgggtcggttaatgagtttaggattagagccagagagcagcgttgctcggcctatgaagtatttgtgaatttggatagttcgatgcccgtgagtaagtggccgatgcctggcgtggagatcgagtgggttccgccgggagaatcgatgtgcaaaacgtcaatggattgccaggcttcggcgaattcagagtgcttggcggatgtagttggacagagaagatgtttatgcaaggccggatttcgatgggaccccattaatggtgtttgtcaaagtgagtgcaaaactattcttaattagttctcttcgtattattagttgagtaaatggcttataaaataaagattggttaaggttttttatattatttattaatatgtggaacttgatataaaaatttaggaataactagtttaaaatacactaataaccttaatgtacccatcagcatttctcttcaaacatatttaaaatttctaagctatactttacgtacttatataatctttcttcataggttccaaaaaagtattttaatatgaaaattgcttttctttaatgccatgtaggtgattagatattgtataaactctaattgcattggtgaaatttgtcaaattaaataatgtgaaatactaaaatttctaatattacctcaatgaatttattctatcgcataggtgtaaatttatggtagtttcgcaaccataattatcatttacaatctcacagtgtaaaatttatggtagttttgcgaccattggtaatttataatcgcacaatctaattcataattatttctgtgatcataaaacgttattttactaataaaaatttttgtaaagttatttcgctaatgaaaaattttcatagagactatctttacatgagcatggttattaggcactagtggtacctaaaactttttagacttattgttagtttgtgattggctagcgatactctctaaaaattattacattatattatatgagattcaatacttaattttaccaatggcaatagtttcatgtaaaaaaatactaggcatcactaataccttttatcatttctatttttacaaacactctggtcctataaagcgcaattgaattttagggtattatcttctattaacagaactttttttttctttacaattaaattgtatacatttattacctacaataatatacattaaatattagttttttatatttttaggtaggaattatatagcttataatttttaattgtaaagtttagttacattattttttatatatataaaaatatgtgcatctcaatcattcgatatttgttgtattatttttcattttatgtgcttaaacatagaaaatatatcgaatctgtatagtaatttaataaactttgaatgtataattataaatttccaactaacggtcaaccaggcccgcaattatatggggttggactaattttgactctcaaaattttcagacactttaatattaacaaacaaatactcatgatagaataataagttaggaatttataaagaaaagatcttggcgtacacctgcatgaggatcttcgtcactgtttaactttcattattaattaatcaattttgtcttcttttattgcagatataaggtgttcgaaaggaagaagtagttattgcaggaataagacaaaaatcaaaacctcgttaattggaggtatgctagctcagtacacagtgtcataaattatttatatatattattattattattgccattaagtacagtataaggtgtggcatttaataatagttaatagtttttataataattaaattataatatcagaattggtggtattagataccagtaccacaagtattgcctttatactctcattctctattagttaaattatgagaaatgctgagaaggcacaagaatcttatcactactactaagtactaaatcttatattaataattactagagtaattaagcatagcatatatcacatatattaaattcataattattataaaaatttaattaccacccatttgtaagacgaaaggtgtctttagcaccactagtgcataaactaggatctaggaaggaagttataaattactcgaggttaatatacatttcactgtaattaaaacttaaaaaaaaaaa

SEQ ID NO: 225331 - DNA, 1542 bp, Cannabis indica
ctcgaatctaaaaccataacaaaaagtcaaatgaaaatttcatgttttagaataggctactttagttgtaacatgttcacaagatctagatttcataaactttgatgaactcatcaaccaacctggttcggtgatatgtaaaatggattttttttatgtttatgcttcaattactcaaaatctcacactagcatttctccttgcaattcttttttctaagaaacgttataacgaaaatgctttttgaagtggtattaacttattatatgcaagcatcatttatgttcacataggcattatgtctgatatgaaaatcatatacagtatatttcaatttaaagtgtattcaccaaccaaatgtgatcgtcaatgatggagaatacaaagacatgatcatgatatggcttagactttctgtgctcctttggaatcccaaatatttgggaaagaacatacaaaatgttcagaaataaccaagccaaaatttacattttcaagttaaaaaaggcaccacactcaatagccatacattacaagaagcagagcataagtcctcaacttaaccacactcaaaaattaaagacaaaatagatacatgcatcaaaaaagagcaaaacagtgtctacgtacataaaacagtcaattttcctcaaataaatgttatagttgatttaagctttattataactaagaaattctaacactatgcttcgtagaggggagagaggttgatggagaggagagacggagggagactctctagctattgaatatagtatcaatgtttgttgtcttaacactaatggaaagagggagagtttaagaaaataggagagtatggtattgtaagtagaattagaagggtggaaagataattatttattaaaattactatattattctcttcaaatatatgttatttatttgttatgaagggtatttagtatacttattttgttattttcttctttcctttcacttttggaaggattggattttgtacatttggaggaaaattttatccttctatttttcccctcctttcttcttttctccctaccaaacacatgatttattctctcctttcaacattttccttctgcctctttttctactcaaaaatcgtttccaccaaacgtagtgtaacaaagaaactagataaatttgggaaataaatactcattttgttggacaaaataataccaagttaagatatggtatttgaaagaaagaataatgagaaaataatatgggaagatgaatagcataaaagatattataaacaaaataataccgaaagttaaactatatatttgaaacaagaataataagaaaagaatatggtatgatgaatagcataaaaaaagtaagaaaaatctaaaatccatagaaaatgggtgaaactagaaataaaatgggcccaactaaaaaagcccaaaatcaggaaaaaaagtctaaattccatttctcattgggaattttgattttatatacttaaaaaattaaaaaattttattattaaaccaaaaacctaaaccctaa

SEQ ID NO: 225332 - DNA, 2904 bp, Cannabis indica
attttgcagaatatcttaaataattataatttacatgacaatgagaaaaaatttgactaaataattattttggacactaaaatagatagagatgtattgataaattccttttaaggtagtgtattataaaatttttccactcttttaatacaaattatttgatttaaattatttttattttttaaaattgtactgacatttatattttcaagaatctttaaaataatacaattaatatttatattttcaagattctataaaataataatgaattcacttacacaataattaatttgtaccatcaaaattaaaaaaatgtttttcctaaataaaacaagtcttcctacggtaaaaaatttctatatatattacaagattgaaactttttggaaaggagacaaatccagttccaaaaagccaaccaatcatggaactaactaaacataattgtctaatctcttcacttagttctgtacaacaaaccctaagtgatagtgaaagaatcaataatttttttcttcattagtacaatatattttttttttaatcttttctaccaaactttcatcaattaattttgatgcatatatttcttgcatcagtatattgctcaaaacataagatactagtattctaaggtcatctccaatgggacactaaaacactaaatatagtgtagtttcttaccatatttactccaataggacactaaacctatctttatatatataggtttgtctacagtgtcccatcaaatttagtgggacactgtagaccacactatttttttttagaaaaagtttttaataattaaataatactttaaagaagaaaaagtaaataattatatatatttagtattaaaatattcttattatattaaaaaaataataaaataataaacaatataaaatttggtgtaatttttagtattgtggttggaattgaaaaaaaatttagtgttgaaatagtagttttttggtgttgatttaacactaaatttgagtttttctattggagatgccctaatgggtattaatagtgatgttggatgactctgagttatagttgttgttgcatgcacatactacataggccttgatataagtatacataggaaactagtacacaagtacacaagtctacaagctatttcaaatgaataaaacagtagcttaatctatcacctgtttgtctcggccataatttcggtaacttctgaaagatctagtctactcaaacttgcaatgtctgcctaaaaattaacaagttagtcttaatgaaaaacagaatttaatataatttcatctcaatgattttcaagagctgatcctgtctcgaaaaagtaaataatagatcgaaaggcagcaatcttttaaaaacaagaattaatttgaccaaatcccaaatgaaaaacaatcaaggtggtaaccttgcagacaggtagagggctagcttgtctctgaggttcacaccatccacgtcagtggttccgcatatttcttgatgataaccagagtcgtggttggaagacaaagacagtgcatcttgcacctcatcttgcatatcaatggcaatgttatgaagcaagcagcaaaccagaatgattcttggaagtctgtgtttgtcaggtctccacattactccatgaatgatcctccatgtgtccttgagtctcgccaatgctcgttgagcaaccattcgagttgcggaatggcgcttgttgaactcaatttttgattctgggaggtcttttccttcatatgggattactagatagggcagcaaaggaaatcctgaatcaccaattatgtactcccttatttctaatccttttgaaatctccactttcttcccattcagcctctctcctttatcactaagtttgtaaaaatttgagttctgaaacactaaccaatccttcattttcccaggccatccagtgactatgtcccgaaatttcatatcggcatccactactgtctgcaatatcatgctgtggttcttttcatggtcaagccacacattaccggctgggtctgaagcaggcaaacacattgtgatgtgagtggtatcaatgacaccacagcagttagggaagcctcttattttctcaaatttggacttgatttctgtcatttctgcttcggtggaaggccactgtaggtggtgaagtccccgttcttccattgattctacaaatcgccatgtcacttgagagacagttgaatggttcacgccaaacaaatcgccaattgtcacaagcgaatcaccagagctcagcctccttagtgcgacagcaacttgatcacataaagacaaagattttccatttgcaaacacaaaatgagctgacttagccatcatatcttcctttacaagtgaacatatatagtcaaaagttttccgagaaatcttgaaaacagattcaaacttgtcaacaccttttgatggacattgtagacctgccatgacaagaggacaaaaatgttttttttttattatccatagctgtagtttttttactcttatatatgtatttattcatgtatgaatctacaacgcatgccaaagagctaatgccaaagtgtatggaaccatcaaggtagcctaattatgtttaatgcatgatcagtcagaactcattttggaaaatacacaccaaaactcaaaatatgtctgcatattgcttagtagtggtgataccatataatttctgggccacaaaaacgtaaatatatgctctcacatctcctaacagctaaacttatagtttattttagcagaagataatctagccttttcggaaagatcataaacatagtctggcaggtctcccaaaggattggttttgggtagatgctggtaattggccaatgagtaagaaataaaaataactaaaaa

SEQ ID NO: 225333 - DNA, 4228 bp, Cannabis indica
aattcactaaggagtaagaaagacatcctaccggagcgccacatcactacggcggcggaggccagaagtggtaatttggtacggttgccatatggtggtggagccgaaaaatgatcaagggcttcaagattcatggtctacatggcaaaagctgaattcagttcacgcacttgccgatgagcgaattcattgtggctctcaagctaggtattgtaaaattcagtttgagtatgattcgattggattgtgtgttgatttttatgaatgagataatctatagccgatcataagtaccttgagtcctcgaatctagtggcggttcaatttgcaacggaggaggaagagtttcactaggatcagcttcaatatcgtcttcctctgcttcaccacctttcaccctccgtttcgtcattcccttgacgttttcgggtgtatctttcgtaggagtgaaagatgctggtgggaactcataaaagtgtctcttatagtaatcatcttcattggcggcttaatgatattcccattcaaagctcgaatgtcatgtaggctacataattgtaatcagagcactatgagctatatatgcgagcattaatggtgcgcatttgagtgacgaactcaataaatttgaatttttctttataaatgttagctttctatatataactcaactgtatctgattataccattatatgtaataaatattctgttcaatatttcttcgtgattattccatgcagaaaaaagtataatgtttgtaatgattttacctaccatatgcatctcattaattaacttaatttcatgtacgtacgtaataagagtataatttttcaaagtttcagaattatcttccatgcggtacgtttcaatcattaatatatagtttctgcaaagtaagttatataaaaaaaatatatacacacgtcattcatcatgagatatatatattattggagaaactgaaatttaatttagctggacttatcaaattatatattgatagtttaattcatagcattgacttgctttatttagaaaacattacacaacacgacatacataacatatatataattataacaacggatcattcaagcgatataatcaatcttaatggcttcaatggtaactttcccaataccactccttggaactaaagtgaccttgacgctatcatcgtcgtcagcaccgatgtcctccaacaagtccgatatcccaatattaagtttcatttggtcacatgattggacaccaactttgctcttatgtaccactgtagagaaactcccagcaaactccgccttctgaggtccagtaatggcatcgtcatcctcatcattaatgtaaatgtcaaacttcacaggctcatcaatgttgtaatgaattccagaaacaaccaaaacctcttctttaaactccttctcgtacctgctccttgacttctcaggcctcttcacaactatagtcaccgtctcactcaacgttaacggaaacctgctaattggcgttatgttcatgtcctcattattcggaggtggatccttaactggtagtgatccagaattattagtcttcttcgtcaacattttctgttggtttatcttagttggtcttggcttggaccttagccaaggaagatcaacctcttgataaacgtaccctaattttttactgtcgagtgagtctccaactctaacacgaaccagttgagcattttcgtcgtagaagaggaaagtggagttgagataatcttggtcgtttatatcaactctttttgcaccggggatagatttccaaatattccacattcggtcaacgttagcatggtgactgtaaaacaagggatctctcccagatgagtagaagcttcccatgtcttcccaattctcccttctgttatcaccacaccatatatggattgtattgtgaggcatgctctcgatgctaccttgtccgggatcagggcagtcaccattcttatagggttctccgaaaaacaacaatggaattttagcagaagagaccatctggcggtacataacacttagattgattgagacttgttgtgcttccgataccggaggctttggatttaaaatttctcctgcagtgtagtcaagatcgaccattgttggcggcaagtgacaggggtttcggtttagatcgtaaagaggggaggtctggtcgacgaatatggacgggatctggtagccagaagggtgatcccagttccagaatggtaaagcgaaactgggatcgtcgattaagcttcccaatatcttctcgtaaaagtataagtaccaacggtgaaagggaaagaagagccacgagtggtgaacttgaatgtaatggtcgttaccagaattcacttggtcatacgcgccattgcagtaagcacaatgaacttttgcttgctgaacaaagcttctcggatcgtcctcgggcagagctttcatgagcgctaaggctttcttgtacttggctatgtcatcagggtccatccattgagctgctggccgaattctcaaagttctaggcggttgacaaggtctgaaatcaacaatcttatcgctatatggagggcaacatttgacatccttcagtttttcagaaggcggatccagcaggttgtggcatttcgataggtccggggcctgcaccggtcctgttgcggaggcgagcgggtctagggtcaggccagccacgccgtagagtcctcctagaccgatcaacatgtctctcctgtcaagtttgctagggtttttcttgttactaccttgatcactggctttgcatgcaagtctacgtacaaagccaggttgattaggtttagtgggaaatggggttcgaatggttggagctgaaggagtggtggtcatcaccagcgggtgagtgagagacagggaagccatagctattagctatatagtgattttggtttggtttatggtgcaagactgaacggcatgcactgcgtctttataagggcttcatgaagttttttttttttccttacttcctaagtgggtggagttttaatacgtgggttttgtaagtaggaaaattatttatatgtattaattaccagtgggcgagcccctaccaggcatgggctgctttaattttattttatttatatattgacaaaatatagcataattaataaaataggaaaaaatctcttctattaataattagtcttcaaagtattttagattaacaaaaataagaataattataaatatagctacacattttaataaataaaattcaagtagttgttcactccaaaaatccaaaatcactactacgtactgatgaaaaattaagcccgttaactaaaagttaagctccgaatcatcattttgacttattttgagaaagacgatccaaattaatatatttctaaaaaaactacacacaatgattttttttttaaaaaaaaaaatacatatggaaaaatatttcaaaactctaatgagttatgttaattaatactatcaaaatttaaagaaatatatattttaaaaattttaaaatgataattattttcagtgtatatgtattatttagattatgtgtattaatcttaatatattaaagtataataaataaataaagggagagaaattaattaattaaagatactagattaagtaaattatttgtctattggaaagttaaaagtactgtgcaaccaaaacacaaaaaataaaaagttaatcaataaataggaacaacttcattcatggaaaacaataaaaaaaaccagtacttttgtcacaagctgttcgtatctggagaatttttagcattttaacattgctgtcaaaccagtaagtgtagcactcaaaccagaccagcagattctacttcgtggcaaccggagaacaaattaaaaatgaattcttcaaggagtaaaaattgatattggtgtaattattcgtgattcgaatggacgtgttttagctataatgtcaaaaccagcactaggaaattttaagtcgcgggaaatggaggcaaaagcaatgttcggtcttcgttgggctgagcaattgcatcttcaactagactatgtgattgtttgatgcttgtcaatgcgttaaatggaagaacatcacaatatatattcgatgtttcactttatttatcctcttaatgcttgtatatttcatattagacgggatgctaactaaccagcttatggattaattggttaagcaa

SEQ ID NO: 225334 - DNA, 7691 bp, Cannabis indica
aaaaaaaaaaaaggaaaaatggcaatggttgagataaacgaccttttaattgtgattagtaaagaaaaagaaaagaataatcaaatatatacgaatgagtaatctaattaaccaattaatttattagagaatccagttctatccacgccacccatacaatggtaaataaaatattaagaaatgactacattcaatgcaccaaaagtcttctctaatcgaatctctctgttcaaatgttgaacaatacgaggagaggagggactgggacacctttttctacttttcccaggtttttatttggcatttaaccctactcacactcacacacacttccacttccaacctcttacccctcctcctgcttccaaacatctcctacttggattggatggctttctctgagtttcgtccgttggatgagaagacccttgttgattacgtaaaggctgttcctgttctctcctctaagctcgggggcaacctcgacgatttgaccattaaggaagtcggagatggtaatctcaatttcgtctacattgtaatcggctcctctggttctttagtcatcaagcaggttagttagagttattgcccaatgggtttcatttctttttcaagagtttctggctgaacactgtttgttgatgccaattttagtattttctttgatgggcttttcatattgagaatttgttgggtaatactttggtatggagtggaaattaaagagttttcatttctatattcttagcttgtagttttattttgagaaaaagaaaaattaaatgttattaatattgtaattaattttgtaaatgagagttttagaagctttctggatttgtctgtgtagagttccaaaggttgaaggtgtaaattatgcaacttttgtgtgaaatagatgaaagggaatggtgtattgcttctttgcttcaatgagttgagtcattgataatcaaatatctctctttgaaatttactagttttgaaagtttaaattgggcttatttaccagtagagcatggaagtaaggaccctttaaacttttcgattttatttttatgtttctttttttgtaactgtaaaaggctctgccatacatacgctgtataggggagtcatggccaatgacaaaggaaagagcatactttgaagcagtgacattaaaagagcatggtcgctggtgcccgaataatgttccagaagtttttcatttcgaccgcaccatgtcgttgattgccatgcggtatttggagcctccacatataatcctaagaaaagggttgattgctggagttgagtacccactgctggctgaacacatatcagattacatggcaaatactcttttctacacatctctcatttatcggtccacaacagagcacaaaaaggctggtattgagttaaacttcataattctagttttacttgttttgaaatgtactctgtgttcctcaaattaacttatctagttggatctataggctttaatagttgctagagtctaatttgaacattatgagaaaatttactcttactgtcttagccatttttccatctaggatttgtactctctacaacatttgtgtttttcttttaaaattataatatgtttattgttgatatgtgtcttgaaattaaatgtagttttgtggcccttaatgattcttattgttttgccatggactttgctcatatgcttcttactttctgcagttgctgaattttgtgggaatgtggagttatgcaggctcactgagcaagttgttttctctgacccttataaagtatcagaatataaccattggacttccccttatcttgatgaagatgctgaggctgttcgaaatgatgatggtttgaaggttgaaatcgctgagttaaaatccaagtaagtacttttgatcttagtagaaaagtttcctacataattattttttttattgcaaatatttatagagctgtttttcgtataggttctgtgagagatcccaagcgctaattcatggggatcttcacactggttctgtgatggtcactcatgactcaactcaagttatagatccagaatttgcgttttatggaccaatgggttttgatatcggtgcttttttgggaaacttgattttggcttactttgcacaagatgggcatgctgttggtgaaaatgatcgtaaggtatgtctctttgttcatctcttgtttattaatttcaaatgtcctagttcttcatgaaacaacatctttattatggttgaattccaaatttgccttttgttatttatctgactgaataataattctttgagctttatgtttgtagaagataattgttactttgatcttttggcatgaaaaactatcattttttaaaccgatttcttcatttctttgtaattgtactgttttttgttttgccttcatgttccatcctatgctctattaaagttctggaagtagtaacatcacatggtgttcacattaagggagttgaaaattttcattgcataagccaatggaaagggacttgataatagacaaaactgtaacagctttgaattattgtgaatagacaattgatcattgaccttaagagaaactttgtatataatgaaatatgttattgaatatggtctatagaattgagtaatgccatgggcatttgtggtgtttagtggagtggttgatgttgtcttggactgcagttgtcttggtcggggtgtttgaaattagtggtgataagtaaatgatatgaacctggctaaaccacccatttgcttcacttactctaggaaaaagatgaaggaaaatggcttagggtttagcttaggcagcaggctgcgagtaagttaggaggggaatattcagagagggtgagggtgcgtagaatgttctgaagcgaataaagtgtacgagagacattgtaaggagaatcttgttgagtgaatatcttggatagggtactgagtatacctccatacattgtcgatattcttcaacattttctaatattttggtcattttatctaatgatattttttggggtgttttgtattatggtaagatacatatttgcatcgaattgtattattcgttgaagctggaaatgttttgacatatttgtaaaattgaacacaggcagtaatagtcagtaatagtgactcaactggtttcttttagaaactcaaaaatcacatcctttcccttttttttcttttcttaaggttcacccaatttttgagagatctgaaatttctaaatgattcagaattacaaggagtggattttgaagacaattgaggatacctggaatcttttccgtaagaaatttacagctctttgggacaagcacaaagatggttccggcgaggcatatcttcctgcaatttataacaaccctgagcttcagctccttgttcaaaagaagtattttgaagatttattacacgacacagttggatttggttctgcaaaaatgataaggtgaggaaatatcacatagttttttcaaatctttcccacatatatttgcatactctgttatgttccaacgacttctaaagtgagttcactttcatataaagttaaccttgtcttgattaactattttcatatttgattgttttggtagaataatctgctagctattaatgcttttaaattgctctgaacattttcgttcatccattttgattgataggagaattgttggtgtggcacatgttgaggatttagaatctattgttgatcctagcaaacgagctacatgtgagaagcgtgccctttgtttggcaaagatgctgctgaaagaaaggcgtaagtttcacgacatttctgaaattgtttcagctgttaggaacgtccagtaatgactgatttctaagtattagggaaacaaattatatgataactggcatgaaaaatatctgtctttgtggaaatggtttcgagtgcccgatattggttgtttttactgcacaatatgaagctttgcataataataaaatgtctgtaccttgtgttcttgcaatgccgagttggcctgatcctctttgggggggaccataggcaaggcaatggaaacaaatctgatttttggtgggtgtttggtttgattatctacttacagtattgtcttttatgttggaataagaaaatccatacttaccattagtttgttggtgcattgcttttacaaatataatatttgttgtaatcagaccaatgaatgtttacaatgcaatttttgagttaggctgtagagtcttaaagtgtacatatttgattattactttgcatgatagtgaactaacaaaacacaagcaaaggcaggcactctttaatttatgggacgttcttatataaacaactttataacatcaaatggttcttgcaagggatgctacctatattgccacattaaaactaacatactaaaatttaattggttatgttttattataaaacttaattaattgtagtagtatcatagtacaacatccttattccttaaattacttaaattcagcatatccccatacttggtcttgtaatcattccacaacaacttaataaagaaattatcactataaccattcctcattttcttgtccagctcaactacaaacccgttcctaatccaagaatctagttgtaacatcataccctttatttcacttgctctatcaaaaaccaaccacagatgaaaccaggtagccaagaaccaatctatcaaaataacaagtccaaaaacccagtcgtacgcaaacccccagttacacacaacaacctccagtcgcacacaaaaaccccagtcacacacaagaactcccagtcgtacacaaaagtcagtcacacacaagaacccccaattgtacgctaaaactggtcactctcaaggacccccagtcgcacaaaaactagtcggaccaaagaccaatcacacaaaaactagtcgaacaaaaaccagtcgaaccaaaacagtcgcacaattacaaccagtcggaccaaagacccaagacttggagaaaacactgtaccaaacgttggagaaattaatcacaccagccttaccaaagggatgatcacttactgacgttcaccaaagacaacaaagaaatgactaacaaaagatgaaacaggataaaccctaaccatactaataggcagacgtcgatattttcttttttacttggaggtttttaataagtaatacacacatctaaaaactaacacccttaaatcaattagttagtttttttattaagaaaataaatatgtaaatttaatttattaattaaaatataacttaaataattatttaaagtatcaacaaaattaaataattatttttttataaatttaaatttgaattagacgttcattcaatcaattaatcatattgaataataaatttattatttatattgtttagaatatctaaacttatttacttatttaataaaattattaaatatattttcttataaataatttaaaattaaattaaaatttatatatttaaaaaaatataattgaattgtattaaatttaactattattataattatttaaattaataattaaataataacaaaattaaatactaatacctagtaaatataaataggtcaactaaaatcgaattggtcatgttttattataaaacttatttaactatagtagtatacatattataacatccttattacattactcataattacttaaattcagctaatattcccatacttggccttgtaatcactccacaactgctcaatatttttccccagcaactcaacaaagaaattatcactataaccattactcattttcttgttaagctcagctacaaacccattcctaagatcattacaataatccaaaaacctagcagtaacatcataccctttgtcccacttactcccttgccctggcttaacccaatgtccaggtacatacccagacttcaacctcacaaaatcagcaattccttctatcaaccacccgggagtttgccccttaccattccactgccaaatatgagtgttctcatgaaaaagaacacccgagatctctctcttgagatctccagtgtagcccttgatgtaccttgcgctaacatggatctctccattggtagcgaaggctacaccgtctatgtcctcgatgatcaaggtgattttgggcacattctttctgtctgcgtccgtgttttgttggaacaacctccatatgaactctgtggctgtggttagagtttgcttgctgtattcagctccaatatcgttgttaaatctgatgccaccattggttgtttcggctttgttgatgacctcgtattgaacaactgcatggatgttgtcgaagctagccacggctaggataattactagtaaagaaagggaaatgaaagggtgatcagccatggttggttttgtttgtatatatgtatactttgataaatatttgatgtgttgattgagatcaggtgcctcatatatagggaagaaatggtaggttggaaatggtcaccaaagtagcttgacatttatgtttggacttttctaattgcctaatactttttttttgataaaaaacttgataattattacaaaacagaatgattttgtttggatataaatatattatatgtgttctttatttttacactttatagtaatattattttttatatttttacgaaaattcacacaacaacttatataactaaaattcacacaattaaaattcatatagcaactcacatgaaaattaccaaagcaacccggtcaaactataaatttgaagatgaaaagttaaaagatagtatataagactatttctctataatataaggaattaatttgctgccaaaaaaaattagaattgaatgaagaattaattttgtgaggctttttttcacattggatttaatatattaataattttaaattattttacacacaacaatttatacatgttttttgtattcaacagtaatataactaaatatttttatatataactaaacactgttttcagatagggtaatttctaatttttacggagcgtaagataaaatttaaaaaaatgggtcttgagaaataaaatgaaattctaattttttttttttttaaattattttcttttttcagaagccttatgagctaatgttaaaaaaattaatagaaaaagagttgatcagattcaaggaggcctcttgggcaatgactccgaccctgtcctagctaccctaaaatcagtcttgtttccgggcaatcatatttttcatttcaatatttaaattaatcaaattattttaaaattcttataccaaccaaagtataatattaaggtgttgtgaaaagtatgtcaaattagttgatatttcttagttattttataaatttaattggatataaaagttttatttatttgtttatttttagaaaaaaaggtttaagaaactccaccttggatgagcaaaaaactcaacaacaagaggtcaccaaaccttactaacagtagccgataaagcatacttagctaaggtgtgagttgccaaattaactgttcgacaatacaacatgttcgtctttttaaaccgtttgtaagaaccaaaattattaaaaatcaaccctaaagaggaatccaacaaaacatgattattaaattttgatatc

SEQ ID NO: 225335 - DNA, 4199 bp, Cannabis indica
taaaaatattaaaatttaacataatctcaataattatagtaacaatattataaataatatatattaatatctatatatatttaaattaatttaaaattggtgtttagttaaccaaaaacaaataatattaatatttatttatatttaaatttaaattaatctaaaataaataatataaatatttatatatatatttataaaatcaaccctacagacactgttggatttaacaaaatattctgttaaacaaataaaaatggtcagatagtcacattttatatattaagatattaattattattattattatgattattattttgaaatactttcaatataattaattatgaaatagatacattagctaataatgctccatttcaactattgattatatgatgatagcccttagatgccactgcgaaattattattaatattattattattattgtaagcatgagcagcatcaagtgattagagaaaatgatgtaagaggagaaatagtgcttcacctttatgtcaatcatttatgtattatatatgtcattattatactatattgtaacaataagattattagtataaatcactatttttttttattgtcatcatttgccatgctcaaaagttgtatttcttcgttaatatgactgagttttatatagggaatttttgtcataacacaattggagttttcggaggttttttttttttttttttagaaatatcatgagaataataaaataaagcaagtgatatcacgacttcatcacttatatatatatattaatttaatatatgttagtaatattagtaaactatattgtaaacatatatataataaagcataagcaagcaatatcacatcgtgtacagacaaacgttatttttcatatataaaaatactattttacttatatttgtatttgtacatgcatatatatacgttttcgcgtatgtattttaacctttaaaaaacaattcatataataagtactttgtgtttgtgtgtatagatatacatatgtgatgcacgaacaagtaaacggctatatcctatatattattctaaaaagataaaaaaaaaatatgtatttctagaacaagagtgtgtaaagaaaattcagaagtcaccatagatttcaaagttgacccagcttttcctttcctttttatttattaattagtattattattattattatttatcgtgcaatttggctccacaatcctccacagtgttgtttgagctcattttcttcaatttaaagctaaacctttatattttgtcaactcattctaatagaaggaatatacgacacttgtaaaatgacataaatatttatttattcctatatatatataaatataaaaatcaatgaatgatttgagcgctgtctttcttcatttgcaggcaaccaattaaaggggttttagggacatttcttagagctgattttattgacgactatcgtatataaatttagtcctatatataatacatctctccactcattaaatatcttgaataatttgatcctaataattaatattataataataaccttataattaatttctctattaattgccatgagcccccaaagtttcacttgaccacgctatctctaaccacagtactacgtactcactacgaatcaatgcaacttttattattattttaattaaatcccttttcttggtattattacattaattaatctctctatatatatatttagtttacgttactatacgtacgtaccacataccagtatagtagtatgaatgatcaatgtatataatttagagataattaatttatatataataattgaccattattaaatttttttaatatataactatggaaatactagctagatttttagattttgatccaattaatggagaataataaaaaattaatttaagttattatatatttagtttaccttttaaattaaaataatatatataaaatatttttttttattatatatatagtatatatatatataaagaatatgtttatataaaatataaattaaacgcaatttttttttctcaactgatagaataaattcggcttatataatataaaacttaattttttgtaaaattatattataaacttaattttttttaataagtaatatttaaataggaagtctctatcagcatgacatgataaaattggatattatatactaatatcaaacattaacccagatcttttataatgtagttgggttcacaattaacatagataaaaaattaataatttaattacttaaatttagtccttcgttaattgttgtacactatatagtttggctagagctcgtgtgtaagacacgtgtgctcgctacaatgatacatcaaacactttggcatgtttactaaactgtaattggaatcagaataatcaatggaagaaatcaatcggattaaaatataaaataatcggaaacaatattttattttgttgtttactaaactgaccggaaaggaaatcagaatcattttattttgtttacataatcaggataggtaatcggaatgactttatttgactaaattatcatggttagaacatgtagttattttttatttatatatttttgaagggcatatttgtcttttttatttttaattaataaaattataattaatataaagtaagttaaggaaaaggtattccttatgaaaatggggagaactttttcctttgttttctccttaatttgtgtggggcccactaatttctcccattccaaaatttagtaaacaaatgaatgggaatgaatcctatacaattgattcccaacatgccataatgaaatggtctaatttccatgatggcatatatatataaaattgttaaaaatatactctttttatattgttatgggtgtatttaaatagccgttttatataattttaaaaaatatcgttaatcaattgtaaagtggtacttataaaatgtgctgagcctacttataagaatgctcttttatatataaatatatatatataatacaagaataagataaataattctaaggaatcaaattaattaagattattatgttaaaaaaagtaattacgataataaaaatatcttatattcaactccttgagaaatgaagctataattatgattttaacttgtataactgatcaatatatatgtataaatataattatgtcagtttgtgaagttttcccttatacgttttcccaggtaataaaacctaaaaatcgtacacgaaaacgtacttgtgtgagtttgagtgtaaataagtatctataaggttacaagatttatatattatatatatatatatatatatatatatacatacattgtaattttgtttttagtaaataaaatgtcaatttattattttcctatgtaataattcctatattaaatgtggctatattaaatataaaagtattttttttttaaatatttacaatttcaaattttaaactcaattgcacatataaaaaaaaatattttttctatatattatcatttagtttacccaatgcacatatctaaaaaaatatctttctattattattttcttattaaacaataaaataaaaagtatttatgtttcttaaaaaattactattgtgatgtcgttacctattgcagttaccaaaaactatctttctattattattttttaaaataacatagcttaagtgtaggacatttctgaaaaaatgaaaagtattataaaattaaaaatattacagttaaactaaaattataattaacaataaatttaaatattattatgttttttatatataaacaacacttaaattaaatatttttaataataaaaagtgttgtttattgaataacataaaaaatactaattataaaactaaaattatacaaaactgtttaccgaatttttttcgaaaactaagtatgaaaatagataagcttaagaaagaaataaattaaagaagaagagaccaaaatttttacgtagttcgagtgttaatgaactctagtacatgagtaaatattattaagctagaaaaactttaaagtattttttacaagtgtttatcccctagttgaagaactctcattcttagttcttcttcctaaaaaattcaaaaatgtcccatttcatgaaagggtaatatttaatttatagggaagaa

SEQ ID NO: 225336 - DNA, 3904 bp, Cannabis indica
ctcttatgtcagggtattttgggtacagcacatataaaaagaggtatatttcaaataaatataaacttagaggcaaatttggttaattaattaataaaagaaacatttttcaacttacccttaatttaaactacctttcttttttaattggaaaaggtatctaatggcaacttgttgtgaacatatatgagattggaaccggcccttgattgattagcttctataaccgttcatttaatatattgtgtaagaaaatagtaaaaaagtagccactaattatattaatatttatgtttcgtttttagatccacaatggattttgtttgtgaaaatgatgataagataaccccactaaaaaaaaaaaactttaatgcccactaacaataatactactattcaaagtcataaaatattgactatagtgtgaaaatgcaaaatatagctatggaatatcgcattaataagccattgtgttgatactagaaagaaacgtgtgattacatatttgattacgaattcatctaaaaaatatttagtaagtttcaatatttgtctcatcaatttattatgctaataagatttgaataagagtgattctgtccatgtacataactaaggtatgaataatgacaaaataaccttttcttttacaataattaatttttgtttttatatatattttttattttttaatatagttaatttatttcaaatatgttgaaaatattcacatttcaagaacatgttagttttaatattaatgtggaataaacaaaattaatagcaattaaagaaattagaaattaactaaaacaacagaagaatgctataaaagattgttgtagcataaataacagaagacaactaatttaacgaggttcaatctcaaacgattactacttggatctaatctccaggaagaaccaccttgtgaccaatctttattgaaaaatattgttactcaaagttacaataatgatctttagatattaatttagtaatgttgtcttacacctacaattaactcgcaggatgttgtaatcaaacacacacaattcttgtacatctctcctcgctcgtcattttcttctcaaattctctctctagatcatcacttagagctaagaacaaaagacgcgactcatatgtgggctccaaaagggtggaaaaaccaagctaactaaccagctaactaactattttgacagtaagttagttatctcttagccaagtgtctaaaatctctcacaattctacctattttagtcacttgataaaactataaaactaagaaaaactacaaaaattaacaaaataaaaagttggtcactccatgaatcattgagtgcttctaaatagaggcttttatttccttctatcttcaatataggcatagcctaaaattttcccttgtatctagtttggtaaatatgtcagttggattgacatgtgtactaatcctcctcacaccagctatcttgacaacaataacatccctggtagtgtaactttatgtttatatgcttggatctctcatggattatgagatttttaatcaaatctaatgcactttgattatcacagtgtactgtgatgttgtctgagttgaaacctatttcttttgttaaacttttgatccatatagcctctttaatagcttctgatgtagccaatattctgcctcagttgatgagagtactacaaccttttgcaagttggattttcaacttacacaacctcctagagctgtaaacatataaccagttagtgttttccttgtgtctaaatttgtagcataatctgagtccacaaatccaattacttcctcttcattttgatctgtttttcctccatataccagacttgtgctcaaagtccctttgacataacttaacatccacttgagtccagtccaacaatgatctcttggattgacaatgtatctactaactacactcatacaatgagcaaggtctggtcttgtatagaccataactagcacatggaaatttctccatttttaccatttcagcttttattttgggagattgttcttgttgtagtttaaagtgaggtgctagtggtgtagaaataggtttggcatcctttgtgccaaacttctcaatcactttattgagatagccttcctaagttagagtgattgtatgtggcttgttcctgataatctcaatgctaagaattcttttcgctgcacctagttctttcatctcaaactcattattgacctcagatttggccaattgatagtggagtcaatataatactgatgcttaccacgtgttacacaattagaacataaaaataaatagacataagattctataaaggttcggtccccttagttagtaacgacctactctctttttagctgtattgatattagagataataccacttagatcactatagtaatgggatctgaagtggctctcttaatattacaatgtgagaaccagagttgggacatatcaagtgagaatagagcaatagtaggcatgagagagagagagagagatgagatgaactgagttattagacttaaagcttaaggcttaggatttaagacttagggttttagggtttgattaacgctctttatagagtagagcatacatccctaatattccttaaaaataggtaaataaagttattatctacaaaataaattaataaaaaaatgactaaattgcccctcaaaatagggaagttgctgatattttccctctattttcgtgggctgttaagggccaattagtggtttgacttgttgtccacggatgaaagttgcgcaccaaaaacttgccagaccaatggttggctagccatgcacctacaaagtgcatgttggccggccatatggtgtccaaaagctggtcagcctatgctggccatagggtcggacaagggtggctggccagccccttgaggtggctagttcgtcattttgtcgtccttcctaagtactcggaccccacgtggttgaagtactgagtagatggcttggccttcttgttagcgagctgtactcccacgcgacattggccacgtagacatgccacgtcaggtgggtaaaaatcgggatgacatttacccccaagtctctatgtagatgtctgtgcaaatagggaatttccagcttattcgaggctgatgtaaccttaattaggcaaatattagcctttaaaatattttctcttgactgctaagttaactgcattactcttctgtatgctttttagttacatgttgcatgacaagtgagaagaggtcccatagaagctatataagcttatgggagggaaatcacttcacatttcccagattgcaatgtctccttataagaaataacccttaaaagctcttccttctctctagagggtgacacccaatagtgctccatctctttcaggatttttgcaccattttgttaatctaaccttcccatcttcttcgtcaacactttctggtagcgggtaagctttcaaatcccgttcttcacttgtttatttgatttttccatggttgttatgaagtttttcttcgctttgaatattttctgatttatttcttgaccaaaaagattcaattttgaccttcattatgattcttgactctctgactcacgaagaacatgtttgagttcttgaaaaacatacactttaatccataacacaacctggccagccataggggccttgtttaagacctagccagccatagggtcttctcatggtagctggccggccatagggatttaccttaacgtctggctggcccatgcctgggcttagggtccctgctcggcccttgactgggtcatggaacctgttggatattttttaccaggatctagatttactaacaagtatgtttcattaacatc

SEQ ID NO: 225337 - DNA, 3590 bp, Cannabis indica
gattaattaattaataatttaataattaagtttgttattattttttttatgtgaaaaacaataatactcaataagtcgagtggtggttgaattaaaaaccatgcataacatttattattattggccatgttaaaatatggccacaaataatgtgtaatatttataatttgagctatcaaaaattacatttttatcttgttagaaaaacaatgtataaaggttcctttaatttagattaggaatcatataaatacatattcaaatatagtgtaataagtgctcatgattattcagaaaatattagtgataaaattaggattattcatcatttttatagtgtgaaattttcatctagatatacgagttccaacctcgttagaaattgacacgtggactcagttcccaatgaaaaaggataacgtgttaatgatatagctatctagagctaacctcgcatgattcaaacttgcaggaggatgcaaccgggacatggtctagtcgcatactatgcttgacatagtcaaaagataagtggaaccaagagaagttaatactgtccgcgtatatctcctatatatgatgagcaagtatatctcccatgtgacaagtaaagatcgcttctttacataggtttgatccgaatgactagtgttcgacgattctaataaactcgcatgttctaagttgtcaacgtaggatgttcaaatatatgtgagcaaggatgattataaacatttcttaaaacaagtagtccgaaaggcctactatgtgagtctaacaccatagagccttcgagctcacatgtttggaatatgatagacgatatgcgacttcctaagtcgtacacgttgccataattaagacaagaatagatgaaactgttcttatatttattctttaagtgtttatcttaattaagttgtgaagttattataataatagtctaatttaatcaattatgtaatattaatcgacatctactttctatataaatgggagatccaaatcaaataagctaagttgaaactattgcacaaagtggactaaacatggcgaactctgattgaaccactataattctcttgtctactttatattttggttcttgtttctgtccatttcttagcttaaattttaggtaattgctattctaggtgagtactcgtataactgttggtgagtgttcttgttttgctcaaatactcacacgttttagtgttgtctaaattcctccaacaatattttgcgatgtctgtgggaatgatttttataacatttttgagattttggacgagaatccatgtggatacaaaatagaaaaacacaaacaacaacaatgaaactatcaacattgacactatcaatctttcgcttatggtggaagagccactctagctgacgctgttgttggaggagtaggggtactaccacgaacccctcaatctgcttcctctattttcaggccacgttggataacttcaatgccgacgaccactgtgggccattttccaccaataacacctgcccacgtcgccaagggtatcattcaactgaaaatcacacaatatgtggcgatccaagaacagatgcatgcattgtaggcaaaaatgcaggaaaggatcaaactcttacccaacgttcaccacgagtccgaacacaatgtcacacggatgatcaagtaactaacgacactaggcatcgtaaggaccgtactaatattcattgtaatcacagagaacacttaggtgaaaacaacctagatgtggttgaatcagcttattcataaccctacacgtggaaaaggtcctgttattcctaaatcgaaccagcgatctagccagagggaggaaaggtcataggaaggggaggataactattgacgtaatctccgcagtcgtgcataatcgcatcccgaggtaaacgatcgtgagtctcagtcttcctcctcgagatctaacaattattatcctagaatttatacaaggtcaggttcagtttggacgaggcttggaggaaggtatcatgtgcatatgcagatcgcctcaatgaagcgtttctagcttgttcccatactctaagaaatcacaatgtagaggaggaaccctgtgatccttctttggccgatcaaggtatccccctctgtggatagccccctgcaaacatgaacaatgtagcaaataccaacaatccaccactcacacatgcagcggtggctgccccactctctagcaaccaagtcgcaccagctaacaatcctattctacaaggaggaattgattaagaaaaccttatgcaagctctgagaatggtcgagtagcagagaaagcccatttacaaattacatggaacatctcctttcacaaaggaggtgtgacaaactcaacttcgaaaaggcttcagactctttgagttattgaaatgaaaaggcgcgactaaccccattgattatcttggtaaatttaacactagtatagaggctgaccgggtaactggctaagtatcgaatactcaccgcaacttttgaggaaaatgtgcacgacaagttcagtcagttgctagaagcaacgatctcaacatggaaaacattcgtagatctatttttgacctatttccaggcgacaaggacttataaattttcctacacaaatttagaaaatatcaagcaagagaaaagatgagactttgtaggattatttcaaacattttaatgccaaagtaacaaaagtagagaaggcccccaaatttttgatggtttgtatgcttattataggggtatggaaaataactgatttttggaaggaattacaagcacgacatcctgatacgttagtcaagttctttgccatggcataagcccataaaagaattgaaaactaaatggcagacctcgagaacgccaaagaaaataatggtctctagtttctagggcgcgatcaaggagtttgcgatgcaaaagcttgagaggacgcagcccaagtcgtagctcaacgagacgccgaagcctaaaactgcaaagtccccaaataggaaggaaagttcaccaaagtgcaagggaagccctcaatttgataattgtacatagttgaatgttccccacgaccacatatatgctattgaagaacataaaggcatctttagaagattagctccaattaggggcaactacaaccaaaagagactcacaaaaatactgtaagtatcacaaagatattggccatactaccctcaaatgctggtttttgtaggatgagtttgaagaattgattcgctgaggatatttcagtcaatataagaaggacggagaggaaaatccccaagcgaatggagcaaataacataaaagaggcaagtggcttttagggaacctcacaacattttaaccatcattggtagaccccatgttggtggggacttgaagaaagctcaagattgatatgcaaaggaatccaaggagaagccactgccaaatgcgaacaacttaagtgacagaccaatgaaatttttcaaaaaggagtgcgatgatatcactttcatggaaagtgatacgagatgggtgcaccactcccacacagatgcattagtaatagtcac

SEQ ID NO: 225338 - DNA, 2494 bp, Cannabis indica
tttctttaggagttttttcattttcacacttcaaaaccaattttttttttttttgtgttttttacggaattctacatagaatttcctattgtaactagcgctgcgatctaaattgcaacaaaaaatcgtatagaaattcctactgcgactagcgctacaaccattttaaaaacctaataaactataatttttttaaaaataaataaaaaaatagtatatatgataatttccccttttctttattatgtttttatactgaagcagtcatacagtgcctcaatataggtaaaaagagaccaatattaattagataaactaagtattaactgtggttctaacaacctaacctaactatggtatatattccaactaacttaaccaaaaataaaactaacttaactgaagttaagtctaatagctagagactacaaagaatcttcattattcttgttactttagtagagaacataattataaagggaatagaattaaacctctctctacatagagagagacagaagaatataaatggaagaaaaaagctataagaaccatttatttggattgatcgatgggacacataaaaaatagaacttaattaatcaaggattaaaattaattatgtccaacatatcacaaacaggacaagtttaattaattatgataaacatggaataatagtaatgaatttattatactagcaataaaataatgatcatatatatcttttaattaactacgaggagtatattaatattcactatatatatatatatatagatagatagatagattacgatcataggattctgaaatctcactctacaaaaaaaatgaaggaatatatagtaatataatgtctactcttatcctgattttggaaaaggaaacactataataaatgaatatatttggaacttgttcacgtgcatggttgtatttgcaagaggatcgaatcatttcaacactctctctagctaggggccacgtacccactaccaatattatatgagcatggctattggaagtgcccaacaatttgtatggatagcgttttacgattagttatcgataatttttaaaaattaattaacctaaattatataaaacccgatatttaattacaccaatagagatatgataccgaagaaggtaagaacactttaatttaataaataataagaaaaagggtaattactccatactgttgttttatttatttattttttttttttcaaatttacagtttgggtttctaaactggttgcagcgctagttgcaataggagtttctatacgagtttccgtaaaaatgcaaaaaaaaaaaaaaattaattttaaagtgtaaaaatgaaaaagcccctaagaaaaatgactaacttattatataataaaaactaaaaaaatcttgaaaataaagagagacaccccaacaattaagtcctatataaaccaacccccatgggctagctctgaatagttttgtttactctcttaaaggtgttacatatatatattgaaagaaaatattttatatacaatatggggttttgctttgaatcgtctgtagttcagccaaaagtagcggaaattgaatggagagatgaccagttaacaatggctttcaaaacgttcgacaccgataatgataggaagctttcgaagagagagctgaaagaagctttcaaatatcttggatctcattgcagcagatttagaggtgcaagagctcttaaatatgctgatcaagataacgatggctttgttgatctctctaattctgagttgtctaaactcgtcacctatgccaacaactgtggggtataaagttgtttagtatatatatacacatattttcactaatacatatgtaatatatatatatagtactcacctagcaaaccctaggtttgatcttaattagtttgagagagagaagggtaatatgggtattatacgtataatagtacgtaataagtagtgcgatagtcgaaaaaaaaaggtggtggctaccaaggttcgtatatatagtacaccccaactgagccgagcgctattatcatgtgttgtaatatttttatctttatctataaagtgtgattatataactgaaattgttgatttaatagtttagtgttattttttttttaaagttacatgttaagactaatactgttaaataactaattaattattgtttttgaaaaaatttataattattttgcttacaatatctaaatttagttctttaatttattaaaatataattaaaataattatttaaaagtattaataaattaaataacttataattttttggaattataaatttatttattatatattattgaatattagacaatattatctcacataaatcaaatgtaaaataaaatattttatagtctcttttagtgacgataatttattttgtaacgtccccgcttcatgttttctggactgatgactgaccctacaaaccaacacgagtgttt

SEQ ID NO: 225339 - DNA, 2410 bp, Cannabis indica
ccttaataagggattcaacaccaggattgcgtatatcacaaagccagccccaacagtgctctgttccaagagacatgtcacaaagtctaaagtttcctaatgttccttcaatggaaagagaactaggatagaccttcggaaacagagaacgtgtgtgagtataaacaaaaagccttagtggtgtagcaaactagaaatagcatattttttaaagagaccaatcataagaaagaatatgggataagattaaattccgggttgctatcttcaaattcatattttttctctttgagagtaatataaagctccgtttcttttcttaaaaaagaagtcgcataagttagacagcaggtctaagtataatccaaattattagaaagaatgaaaacataattcctatgaagataatctttttttagtgtgtgggtgggtgcgggtttgggaatcaaaggtcagtatcaaaagtattcgaaaaagattaccttcagatccaacaggaaactttcctgcaccagcattgcaagtgaagaaccatcctccttgttaagatacacggacacactgtcgacattcatgtttaaataaaatacgacacgactttttccatatcccagcaatcctttaacaatgtcactttcttcattcttttccttgcttgtcgccgatttatcttctggtattgcttccacctcagaacttgttgcataattcacagagcttagatccaacccgaaaccaattaaagcaacaagagtaggtctgttgcaaaagaattccagcttggacatacgaacactcatctggaaataatgaaaaggaattgtaatttggaacttacactagacacaaaccagcaatatggaatcttgaactcggaccaataatgagcaatttaattacctgtgtatctataccatcatagtcatgcgaactaggactccttgttgagaagacaacggaaacaaaatctgtataatcaccaccctccgcctcataaaatatttcaccagaaatgcctcttcccataaccatatcctgttcttctatcaaggcttcagcagaatcaaacccagcagaggcagtatccaaattctgagagtgacaggctgcatcagatagagatgcaaattcaggcaaagcatccgtaaaagtatcatcgtcttcattagctgctaccagcatctccttctcgtgaagatcagtcattgcaggggaagaaaatgtgctgtcatttttcagcactgagcaagctaaataccgtggacttgcagaaagacaaccttgaagctcatccctaattttcaaagaatggagcttcatcctgatagtcagatccccttcacaatgaatcatgtgcacctgtaaacaatatgacgaaaatcataatggcaaaacattgcatgagttcacaagcaccatgtgtcactgatcaaaacttcacccaaaaaagttacaagtactaagaataaaacaactctttaattacaataaaaaataaatatattaatatatataaaaaaaattgtaacttcacgtaaggctaaatatgtttctagaaacatgtgcttgctgcctttcaatgtatgaaaaagtgtgatacagaccttcccaccaacagcaagtacgtcaagaataagagtctcatcaagtttgtcatcatcgtcatctcctgtctgcacaacattttacaaaaaaaaaacactttaatgagtaggccttggatcaaaaagtagagttcttaccatttcagtatgatagcttaagtgaaggattattttaataatttccctgcagaatctttcgcaaggtaaccaccacacagttgacaaataacattcaaagaggaaaagggtctcacctttccatatataaaaagctttgtttccactaaagctccattaacaacaagttcagctgtttttagactagtggtctgaggttcagtaaagtcagatacctcatcacttgtctctcccggtacactaactgatggaggtgccaaaaaaaaaagaaaattcattaaaaacccaaaaatgaagcatggggaaatataagaaagatcttaagccatacagaagcttgatacgtggctagtatcaatcccttcaaccaagtagccttttcatcctcatcacgaaacgcaattatccacgtactagaagcctccagagcctgatgcaaagataaaagaaaataacttcagagaaaaagaatgaaagtaaagtagaaaagatatccccagcaccctgcacaagggcatgccttaacaaaatgaaaatgtaactacctgaatattgttaattcagtttctaccaacttttcattaagctttaaatcattatgaaccacttcattaaaagttcaacacataaacttcacatctttttaattttatggaggattttttttt

SEQ ID NO: 225340 - DNA, 4810 bp, Cannabis indica
attcatttatcaagaatttgtttttgtagtctcagtttttttttttttttttggttaactaaagcagcttcacacgagcattctttctttatatttatgataacattaatgggcctacaaatatttaacacatcctcttcgagtaatgccacaccgttgtctttgtttgggccctgcatgcctagctggatcaggacccaccaaaattactttagagaatgatttatcaatttctcattaatttgatacaaattcccttttttaaaattaagatgattgattttaattgtagactaattttttatttttttcaaaaaagttaaataaattaggtagagcaataaaattgtatcatgtgtacaccgtatttacatggccaatccactatgacacttaatagcaaaaattagagtattactattggacacgagttaggtctaacaccttctagatgtgtcaccctacaattggttaacaatactctttaaagttattaaattaaattaaattatatgtgagccgatacttaattgcactaataatcatattcacacgtaagagggtgctaagtacctttgagcatttctctaaaaattaaatagaaatatgaaattgctaagagaacccgaattttttagttttgacatcaaaaattagattttaaggaattaattgctagcaccgttaaaattttggaggttttgctttgcaatccctaatcatttgtttgttttgcatattagataactaaatgcaaaagaaaacagatgaaggactgatctgtaaataattaaggaatatagatctgattaaaaataaaagataagttttgttttttattagagaattgccacgtgttaaagtggggattaaagtatagcaacagctgtgtgaaccgaacaattccagtccctttggcgttgaaaagccgttaatcccgccaacttgagatgtcatttgtcacagtaaaaaatataatatcaaaaaacaaaagaaaaaaaaactaaaaaattgaaataatagaaagagaaagaagtgggagagaggtcagcttcttcattgcttcaaccttccaactcttcctgcaaaccccacccctatagatatatatacatacacacatattagctggacacagaattcttaataatacccagttgcccattttgaccttactcttccatactaatcccattcagtcttgtcctgtcttcttttttttcttcttgcccctaaacattatatacaaaagagtctaagcaaacaaacatatatatatatatatcatcatcatcatcacctctctcattctgtacaaaactcccagagagattgatactttggcattatccttctaattaatacaccacagtaagttctttcagtcatcatcattaatttccttcattctttctttctttcctgcacatttctgcatatatcacattatatttactgttgaacttacattatatacaccatcgttgtttttagtttcttttttctaatatcagatgttgtgtctttgattctatgttttagctcaatttggttttttcttttttcatttactattattattattatggtcttcgtattttgggacttcattattttgtgttttgttctcctctggtttgctaaagtatgtcttttttttagtaacatatgttgcaattgtagaactgagttacattgtctttttgttaaattttggaaaataactaagttcagtttattttgttgcaaaggcgtgtgctaagttaagaaagctattatagaaaaaaactacactcttgaacaaaaatgtttgctgtgaaacacattccagaatgtgctttttttcccttaaaagttatcagttacctattttaatatttgtttctcggttgatcttatggaccagtctttgttgatagttctaaagtttttgtttgattcatactcagaaaggtgatgcctggactagttatggaggcctctaatagggacaatttagcgtatgataccgataccaatgaggattacacagctcaaaaggaaagctatgcatatgaagggtcaccaagaagtccactgagtccccaaagtcctcaaagtgactccatggatttggccattgatggagttattgacacatcaattgagcagctttatcacaatgtttgtgagatgcagagctcagttgatcaatctccatcaaggggtagttttctatcatatggcgaggaatcaagaatcgattcagaattgcgccatcttgttggagatattgatgatgaagaggtaactaaagaggttgtggtagaaaagaatgaggagcataatggttttgactcaccaaaaggtaaagatatacaatctcctgctaaaaagtcaacaaaaaagggcaagaaccaattggcaactcctaacaagcttaatgtgttgagagtggattatggggcatcagctaaatcaagccccaagatcaaatcttcccatggtagacctccattagataagaagtatgagaaaagtccaaggaaacctaatgtggcttcgccattgaacaagcaaagaagttcagctttacgcagggagaagcttcagaatgtggtggcagatcctcaactggatgaaatggacaacccggaacttggtccatttttgcttaaacaagctaaagatatgatctcttctggtgaaaattctcagaaggttcttgaagtggctcttcaggcgttgagattatttgagaagtattcaaatgagaaaccaagtttggaccaggtaatgtgtttacatgttttggctgcaatatactgcaacttaggccgatatgatgaggcaaattccagttcttgaacgctcaatcgaaattccagttctagaagacggccaagaccatgccttggccaagtttgcagggtgtatgcaattaggtgacacttatgcaatgatgggacaaatagagaattcaatactgctttacacagcaggtttggaaatccaaaggcaagtcttgggagaaaaagaccctagacttggtgagacttgtagatatgtagctgaggctcaagtccaagcaatgcaatttgatgaggcagagaagctatgtcagatggctcttgacatccacagagaaaatggctctccttcttcccttgaagaagctgcagataggagactcatgggactcatatgtgactcaaaaggagaatatgaagctgctcttgaacattatgtattagcaagcatggccatggcttccaatggccaggaaattgatgtcgcgttaattgatcgcagcattggagatgcgtatctgtccttggctcgctatgacgaggcaattttcgcttatcagaaagctctcactgtgttcaagtcatctaaaggagagaaccatccaacagtggcttctgtttttgttcgtctagctgatttgtacaacaagataggaaagttcagggaatctaaatcacactgtgaaaaatgcactcaagatttacacaaagccaaatcatggcatccctttagaggagattgccagcggcttaattgatgtatctgctatttaccagtcaatgaatgagttagagcaggctgttaagttactgaagaaagcattgaaaatgtttggtgatgctccaggccaacaaaatacaatagcaggaatagaagctcaaatgggggtcatgtattacatgatggggaattactcagattcttatagcaccttcaaaagttctgtatccaagttccgtgccagtgcagagacaaaatctgccttgtttggaatagcattgaaccaaatgggtcttgcctgtgtccagcgttactccataaatgaggctgcagagcttttcgaagaggcaagaaacattttggaaaaggaatatggcccatttcaccctgaaacattaggagtctacagcaatttggctggcacctatgatgcaatgggcaggtaaattttgttatcaaaaacacatataaaagatgtcttatagttcatgttttcatttcaatcaagtactatgtttttattcatttttgttatcctacaactcttgcaggctgaatgatgctattgaattgctggagtatgttgttggaatgagagaggagaagcttggaacggcgaatccagatgtagacgacgagaagcgaagactagctgagttgttgaaagaagcaggcaggtctagaaacaggaaagtcagatctctggaaactctacttgataccaaaagtcaagttgttaaagatgacagtattgaagtaatgtaatgctgatgaaaatgtatatatgtttgtaatctatgtcttggtagattaggtgttttggtgctttggtatagattattgattgatttgcaaagttgagaaaataagagaataatatcaacggcaactaaaggaggagattcatatctcaattgtttaatatttatgttgtcaaagttttcatttttgtataatttgtttcagacatgcatatcttattgttctttgtattatgatctctcaaaataaagaaatggtatagcatcgttttcacttgttggtgcacccaaaatgcccattactaaacttgtcttagcttctagttgtattgtatgtttcttaaatagtaatttttcttaggactgcaatagctatcgttagattttcatttcgagagtcgtttgtttgtcaaaacgaggattaattaaagtataaacaaagtatatttgctgtctttatcattgaattagtacttttaaggttgacttataggacccaccctgtaaatttttccaacttactcaacctcacatgtaca

SEQ ID NO: 225341 - DNA, 3302 bp, Cannabis indica
gcaaaatttctagaacttttgcatatttaaatgaaggatttatattggattccagtagagtctcatcataagttgatcatgttctcagattcctttaagaaaaaaaaaaggtcgtgagaccatagcacaacttgtctttaatatatgtaggactaggctgggcaagtatctattcttggtcagttaagcttgtctcaagttgtctgccacaaacgaaataaactttttcagctttaacctaagacggcttggtaagtattagattggattgggttatcttggtattataatccctacttgcaaactccaacataattgttctaatatagctagttcttataggtacgtagatatttcccaacaactctcatccatttatgactatcacttcggtaaacatagtagctaaaaatcccaacaagttacctgggagagatattgtataattgtttgggtttcctcaatgtttttccatttcttggtgtaaacctaatattggttcagagtccataacatcttcaccattaagaataataatgaggcgaagaatgtcgacgattgatgagtgttgggggtcatatttattatcatgatgtcttttcttgtagtggtatattcatagatttttttctcgaattattctttcataaattaattaataaatcaatcaataaaagtctcaatataaacaaataaaattggtaacattatgatccatcgtaagttcaagttttgtttaaacatgggactacataatttagtcaaattccacgtatttatctcaattaccaaacatgctccatagtgtgctacaaaacaatccaagtccatcttagtttttgtttatttgtcacccagatttgtggctttttattaccaatttagattagttttgtccagaaagcattatccagagaaatcaaagtgttataaattattattaatagaatttctatcaaccatgtacttgtactggaagacatttaatcaaaatttctctactgctgcttctttcagcagttctaacactgtcacaacattgaaatcaagtaattagtttcttacaattgtacattttttgaaaatcatacacaactattaacagtttaaaatatacagttctttgtgctcctaagtcctgatccatcacatgcatggtatggggagtttcaagcttcttttcacttgataaatgagcagagacaagaggtgttgcatattgatatctacaatgtaacaattacaattgaaagtcaactggagtggataattatctgagatgaactagtaacctaaccaagtcgacggtattggctgaaacttgctcttcgcacaagtcaatacatcatagtaatctacatgagtgaagcaatcacggaaatctgtgaggagcttctcaaacaccctccattggaccttcatcgatcttgaatatggatatggaaggaaaacctgctgaaccatagcgatgagggaggatttaacagctagattgataatgacaaatagttacagaaaagctcctataaatcttcattttaattgttgaagaacactgcaggatatttagcaccacagtggcactcggccatggcccatgtagcaaaatgtaggatcatgtgcatcccatattttacaataagagtttaaccattctaaaaattttatagaaaaagaataatgatatttctatttatgtaatatgctcagttcatggaagcttttctataggtgacttacatcggcttcttgtgcaagacgtttaagtatcagaaatgtatgttcattttcttctaaattgtcaacaacggccagccagatttgagaagcaagctcatgagccatatcccttgatttaccacaagcaagaaactgatctgcaaaagcaaccacaatctaaatgataactgccattctgaattgaaaactgtgtaatttcaccattttgtagccaagtttttctttcccattagatgggcatgcacagacataatggagtaatataagtattctcacatgtatctaaaatatcagcataatgaattagattagatgagacataaatcaagataggtaaatctattaaatttctgtacatacgcataacatacaattaaaagatatcataattttcaataggagtacacatcagatggggaaaagggtgcctaaaaagatgcaaaatgcaagaaattggttgaaattttcaattataaaattaaaagcatcgaataagaaaattgaaactgaaattacaaaacacaccaattatggttccatgaagtattccagaaggaggtgaaacggttgaacgctcaagctgctcttttaaatacaaataagtatgtcccacaatctcatcaatttctccttcaagagaaaatatgtgtctgctaacatacagagctgcatatctcctggagaaaattgggtggaggttagaatcttgctgcctcgacaaattaatatcgtcaaagagttcaatttacataatgtttaaaatatattaggtgtttagcagcataagtgtgtacaataccacacaaaaatgcatatatttgttgagaaaaaaaaaatgcatatatttgacacaacctcagtagaatagagtcaacatgaattacaaaatacagagttacaaaagaggagacaattttatgattcattgttttgcatattctatactttctttaataaacagcatagagtagcaatgtggtgaacttgtcacgttcatctttattgaacacaacttcatgtaagacttgtcaatatcaatttaaataaaaacacgagcttagatttaagtgaattcgcaagaaccttagaatttgccatattgttatacacaataaccctgcatttgaataaaagaccaccaagtgattttgaaggggaactcatacatcaaaagaatgcttcttcaatccactacctctcattaaatgattaagatatgagtgcacacacacatgactaaggtgaaagatcaccagtccaccattagaatgtcaagggcaaagcacaactatagcacaaattaaattcaagcaaacaaaccaatatgaacaatagcaataaatttgggcatactaataattcaacccatgggaagagtttaggctatgaagaataatggttcaaggttttgtaagctatagtagttattttctctgaaagaaagaagaaaaaagctatagtaatatttataagcaccaaaaagaatccatacaaagttaaaagaaaagaatatataataagatgttagctcagaattgaaatctggaaaaccatgaagacat

SEQ ID NO: 225342 - DNA, 2733 bp, Cannabis indica
tgactcacagaatcaaaacatggagtaccagacatatctcttttgccggtcgagttgtattaatcaactcagtcctcctcaccatacatacatactggagtcagatcatgcttcttccaaaaaagattattaaagccatagaagccatctgtagggctttctcatggaaagggcagtaattgatggaaggatcgggccaaatcgcttgggaaaatatttgtcaaactaaaggagcaggaggcattggctttaagacagtagccgaatggaacaaggcagcgatgttcaaatatgtgtgggcaattgcaaccaaggaggacaatctatgggtcaaatggattcatagtgtgtacatcaaagaagctgaatggtggagctactcagctccccaacaaggcccctggtattggaggaagatagtcgcattgaaaggtacaatcctagctttaactactccttcctctttcactcaaagcaaatatagaattgctgaaggatataatttgctatgtcccaatgagaaccgagttaagtggagtaagaaagtttggggtagactcaatactcccaaacatagctttgtaacatggctcgcaatccaaaaaagattgaagacaaaagaggggttgtttcggtttaacatagcagcagacatgcaatgcttattgtgtaatacaggtgccgaatcaagtgaccacctattaatctgaatgcccttttgccttggaatgccttcaacaaacgaaagcatggctgggatggaaggctacagcaaaccggttggacaccttggtgagaagcatcaggcgaaggaagacctctggcttccaaaagaaggttatggctactgctattgcagccttggtgtacttcatttggaaagccaggaataggaaattttggcagcaaatagatgagacgccgaacaacattgtacaccaaataaaaaatacttgtaagagcagaatatacagtgtatggcccaacaaagtatcattagaagacttagcatggtttaacacattataaatgtatagatcagtacttcaggcccttgaaaaagggtgatgtttagtttgtaaatttaaaagtctattggagtaatgaagaacatttgctgttttctcaaaaaaaaaatatattagtgtttataaactaaaaatacttttattctattttagacaattcatatagtttaataattactatttaaattttgattttataatatattttggactatatttatttattatgatcttaattttaattttaaatttattatatatataaatattttaaaaaataatttttccaacaaactatatagcgttggcaaaactaaaataattttttattccccaaggtttaccggtgcattaatacgtcggtaaaactttcatagttaaatgtagattaggtgccaattttgcgccaacattttaccggcgccatatctcgcctgcaaaatgtcatcatggacccctcagccgacaacaaattgatggcgatgaacttatgccggcaactaaattcgtcggtataaatacttttaccgacgagttaagttgattcgccagcaaaactcagtatgctgacgaatcattgtcgacattctttaccagcgcaaaattttgctggcaaaactatgccggggagttatgtatacttttttcggcaagaaaactcgccatcaaaagtgctttttctgtagtgtctagagtccaagatcaaatcttttctcgactcttttttgtagcaacaagcacatctgtagaatcataaccatcagcagtcagactagcctcactcttgttgcctttttcattcttgtctttgctcttgtctatattattctttttcctcagactataacattcatccttgagatgaccttccttcttgcagtatttgcataactttctagccttgaatttggattttgaatgactagagccattgctcttgtttatgtgattcctttgttgatttctacttgaatcattacccttatgtcctttggttttatttgacctacctcgagccattagacctttaccatttgatccattcttctcatcagacttcttctaagtttccttagaatttagtgtagctttgatcttggacattgtcaaagtctccttttcatacaacatggtgtcaacaaaatgttcataagatcttggcagtgaactcaataggacaattctttgattctcttcttcaatctcaataccaatgttgttgagtttaagaatgatcttgttgaactcatcaagatgtttcctgacttcaccagatttatccattcttaaggtatacaaccttttcttcagatacaacttgttggccaatgtctttttcaaatagattcaggacaatttattccacgatccaattgcagtggtctcactaaaaacctctcaaagaacttcacctccaagacttaagatgatagtacggtgagccttcttctgagtctctttaaccttcttcttatcctcaatgtattcaagaccttctgatttaatggcttctaatatgccctggtgcaccagcagagcacatattttgagcctccatagactgaaatcattctcaccagtaaacttgtcaatttcaaactttgctgaactaatcttgatcgagtgttgattatcaaacactaaatcttgatccttgaatcctgatgctctgatgccacttgtggtgttttaatcacctcaaaaa

SEQ ID NO: 225343 - DNA, 2810 bp, Cannabis indica
aaatcaaaaagtaagaaaaaaaaaacacagacacatgagttggtgacccaaagccatgtgggtagacaacaattgatgacctaccctaataaccttaagtgcttttcaagtgtcaaagatcatttgcccctaccaaagttatagttaggagtcattagtagaaacagtactagctagctctctctttattttcagagctttgttgttttgtttccttgtatagaaatgtagagtcagcaaactagcacaattgctggaaaaggacatatatatatactctcaaataatattgctatgtgtccaacaccactattaattagttcaatttaaaatcaattcccaggtattttaattattaacagaatatatggtattgggcacctactcatgctttatagaaatactcatctcacgagtctagaatagtaatatgatactggaaccacactaaattaaaactaagaagctgttgtcttcggtgaacaacacattagtttttatcaactacacgttgaaaatggtttgattcaattaataataaacattatgcatcattatatttattttagggaatggtagaagaagcttcaacagaaaaattcaaggatcgaactctgactatagagccttatttaatcgaataattaattaatatgaaactgaatcttaatattctcgtgtgtatcaataattaatacttataaaatatttagaaaaacgaataagtgtagcgaggtattattccgtttttttttaaaaaaaaaaattgtcaaacgaaatttgatgacatggtttgacttttttttttcttctttgcgtgtgggtcaataatagtattatgtttttttttttcttatttttaaatacttaaatattaatattgttacatacaaatcacttctgacgttttttttttggtgtgacactcgtgtagctgtgaaatgaattgattaagtgatggggagggtacatgtgggtgggtatgtattgtgtgtttatataaatatgtgtggtcaaagcatacgttagaaagtcattaaaagggtctaagtatgactattatatttaagacttaatttcataatttgtaattgtaaccgtgttttcttcataatttgatttataaatattctcgggaatgtttgtgatatagaagaatctattatgcattggagttggacagaaacttttattaatttgtcttttatttatttatttaaacaaatttgtcattattttattagtgtatatataattaattatatatgatgaaactcgttcataatatttatcacggtatatatgtatatcttcagtgcatatggttaattaataattccaatcatatacatatacaccatggattaattttacagaggaaattaagaaaaaactatataacagtcgaatatatatatacatgcattcacacacatgacacccacacatatattaatgtaagaattagttagaagtttgcatgtatattttgggtgttgtctcagttgttattgtaatattaagctcagtaccttataagtttaatctttttctattttttttttttattatttatacaagctctatcgtgttaatttcatacgtgtaactttgttccatgtgggtcgacgttgcaattcgtggtctagctagataatacaagttatcttcatttttctttttcttttttttgaaattaaagattgtattaattattaaaaccaaaccaactgttagaggagaacttaaaaggcaaaaaaatttattcaagtagaatttccaacagaactagtgatttctgtagctaatgcatgagtttgaatcaagtgatttttattacaccaaacactgttgatgttttatttgattaatataaaaaatataaaaaagggacctatggtgccctagcttagccagccccaagaagaaataaaatggaaaaattaattaacgtaccaaagtacttataactgctgtactaatttcctttttctttttaaaaacctacatgaataactccaacctggctcaatgggttattgcataaaagttgtacctcaaaatctaactacgtgtatatatgatttatataaagaaacgattttgacagagaatgctagcagctaggcacgtacgtttattttttctcagaaaaagaagatcaatttaatgatatgaatatgagaagtggtatacaaatggtcaagattcctaaaatagttttccaaaattagtatcttattgaatcaaatacatgtaaatattatgtcatatacatatataaaatatttatgtggtcatgtggatatgtggtcctaaccaaaaaaggactgatatatatatatatatatttataatataagctgtttgttaacctttggtagcttcaaatggattatgctttgtgccctctctttctatttaattatcataagtaagcttattactagctacttgtgtgcgccaactgtgagagtttataaaaacatcaattttttgcatctcagaatcttaatctttgtttgtgattttttttttttattttattatttagactactactactactacaaagtacatagagtgaagtttgcatcagaatccatgattattgttttctctatgttttaataattaattagtattgatcaatagaagagaagagaatctttaattaacaagtagagagaacgtacgtcatatatttatatatataatatgtttaacccttggctttacgtgaaagcctaaagttaagcctttggttttgttctaatacattattttagtctaggcctctctctctctct

SEQ ID NO: 225344 - DNA, 2629 bp, Cannabis indica
ataatagagcatttatttaggaattgaatagacaagagttataagggtttggtctcaccacgagaaaaattagagttctgggtgagggaacgtctaagtctaagaaggttaaaggtgttaatttagattatgaggaggatcacattttaaaaaaataggagatgaacaatttgaatcaaatgtcgatccattaaaattttaaaattttgtagaggatgccgagaagtctatttaccttaattgtaataggtttactaaattatcactactacaaaacaagcctttagaggtcgtttttttttttcagcatagtaataaataatcgacgacatagggttggaaatttttagaagacaattttatcccacatactacctttagcaataagtatagttactagtcagttttgcttgtgatgtataatttactgccttggttcgtaatgaagagaaagttcactatgcttacactattgatatcaggcccttcacaacttggtaatgatattgatgtgcacttaattcctctagttgatgatttgagtcaagtgtggtataagggtgttcctgcatatgatgcctttacgaatgaagaattcaatcttaaggccatataactgtatgaaacattaatgactttctagctttcaaaaatttttctggatacattgtgaaaggtggttacagggatcaagttcaacactgtttaaacttgatcaacatctcttggacttagagtgcctgtggcacatgtggagaaagtaatttttggtttgatttttttcaccaaggtggagattgttgggtttggctcaaaagtcaaattgtcttgaagttacaaatatatggttcaacttttaagtgtgttggaccttattatttgccacatttgtcaataaagctatgcaataactattgacttatatgctctctcatttgttacatatggttggaactacatctcattattatatatggctgagagttgaggttttccttctataaatataaagctctttaaagagcattatagtaatttgaagtaaaggcaatttggtgtgtaagaattcagggtgtaaaacaattggtacaattgggtttaatgggaaatcttagagagagagcatttgtatatccaaatcttgggaaccactttactgagtctagttgtgggttcaatgtttaaaggaaaaatattgtaacaaaactttcttctggagtacagaaccccgcggtaatgattccattttgtggaaaacaattctccaatcgagagcaatcctaagatcggcttcccttgccttaccaggaaaaggggatttgattgacttatggacacaaccttggatcccgtggttgagctatgccgactttaggagtcttctccaaggggctaggagtcgctttcccttattacgaactgtggcagacttatcaactaatggcaatgaatggaatatcgagctcttgaaggaaatgtttggacaacaagttggtgacatggttgctacgataaaatgattacctgttgattgtgaagatatggtaatatggaaaagtgcgaatgatgggagattctcaacaaaaggtgcctacatggaaactatgaagtttggggaagaccaaggagacagaatttggaaggtaatctgggatagtaaagttcacccaagggtgtctatgatcctctggagagtgttgggagggagtctatctgttagggagaagcttgtcattctcactgaaaaagattgtgtcctttgtggtgatgcggttgaatcaacgagacatcttttttgggattgcccattggcccgagcctttatggttctcgggtcctttcccagtgggagtagggatcgacaggaatatgagtctaacagatattgttcgtgattcgggggatctttgcattggggaagaaaggtggcgcttcttaacctttgtggggagtctctttgaaaccgtatggtctacaaggaacggggtcattttcaaaattcaggtggttgatattctttgtgttagatgtaagatgttgcagagaatggaagacttactctcaagtctgaatgttccaactcaggaggataccatggtgatgaagtccaaggatgaggtatggcgatttcctaatttaacctaggggtttatggtcacggatgcatcatggaaggagggtgttgctggccttgctgtgggaactctggacagaaggagcaacaagtggttgtggtctgcaaggaaggcggccgctggttcggctatggaagctgaggctctagcagtcctttgggccattcggttggggattcaagctggcttccgttctattgtaattgcatctgatgctcttctgctgatcaaggccctcggaaatcgactgatgccaccctgctggaaaacaagggttgtggcctttcagatatggagtttgttagaaggcttttcttggtgtaattttgcccacttacataaactggataatgttgaggcggatgccttagcaaaatctgctagaaataatgattattttcttgatttcgagtttagggaggggtccctaattgtgatacccaaatattttatctttgaatgaatgaatttccttctctcaaaaaaaaaaaaaa

SEQ ID NO: 225345 - DNA, 1854 bp, Cannabis indica
ttagtcacaacacaataatgataatttataattagctataattttttatttttagtcacaaattttgctgtgattaaaaataaaatattttggagtgaactttgataagacatttataatattaaaagttgatgtgattacagaccattaagctaactacctagggttttgtcatgatcataatcacacatacaattgaaaagtttgtccaaacccaaaagggtttcatatacttaaaataaacttcaaaactattatttggtcagaggcagctatcatcaaaataaaataagactttttttattattattattggtgcatgtatttcttcataatgctatatatatacgtaccactaataatattaggtatggactaaacctaatattagattagtggagactgtggagtacatcatcacataggcctagccctagcaatattaatggttatctgggctgttggcccaagaatggagcccaatcaatctatacacgtataaaatatgtatgaaaaagcatgcaatcatgtacattcttttacgtgataacttgtaccgacatatcatgaaaacataaccacacaatattttgatccaaacacgattaaagctaataattaacagtacttaacaaaataatggataaaagctggtccattagattaggtcaatgctcttaaaaagtagccacgtgtacgtacacgatcacagcatgcatgaaaaatataaaagtaatacgactttacatatttatatggtgttcctctagaaaaagttcacaacctatgttcctctagaaaatagatagagatttacattatagtgcacttattatatataatcgtgtggccatcaagtagtgtcactatctcgtcatgtgtcaaattctcagagaaaaaaatcaagacatatgtcttttttttttttcttcatgttggcaaaattaattaattaattaattctaataataatttatatagacttggtctagttttgttaaagaattaaaaacaaacagtgatcaataaagacccacatgtccctaaattatcgtttcaatgggtaataatagaagtagtgtaacgtgctttgtttatctatattgatcaagattagtatacatataagtgtttaatttagttattaatcatgtagagagagatattttatatatatatatatatagctagttctgaaacaatgtgcagtgtttggctaggtattgtgtccggttgaatatataaatatatatataaaaaaaagaaaaagagcgaaaccagtgattattaatactgcacacacccatatattttatgtacatatatacatatatacagatagatagatatattgatagagaactggggggcctctctgactatttatatatatgatatcatatatatgtgtacatattgtttgctcgaaaatgataatatagattaataattatatatgatggtttcagtacgtacatccggtcccggacaatagttgcaaagccattatatttgtaaaacttttattttatccatcagacatgatcagtatatatatataataaactatagttcattatattggttttccttgggaaaatatgcatatatttatatactgatcaggcccataaatatatatatacgtgcatatataataggatcccactaaaattaacttttttaagtcactcacaagaaatttacgtacgtacatataaatatacatatacatatatatactagtaaaaatttacgtgcgaggcatgtatactaattttatgttaggtattttttactttatttaaaaaaatataattaacaattaaagaaaaaatattattacttattagg

SEQ ID NO: 225346 - DNA, 3043 bp, Cannabis indica
gggcacaaaacccaacaagtatgccatttttggtatcaattacttcaccaagtgggtcgaagaagaaccaatgaatacagccacttccaaaaaggccttggattttttcgtcaaaaaaaaatatgttgttatggacttccacacaagattgtatcagacaatggaaaataaattgacagtgaccaatttagtgatttttgcgttaagcatggaattataaaaagtttttcagtcgtggcaagaccacaggaaaatggacaagcaaaacctatagataaaattctgaagacaaagtttaaaacaaaggtacaagcttgcaaggctcaatggacgaaagagcttccatgagctatttgggtatagcgagtaacagagagaacttcaacggggcacactccgtatttaatgtcttacgactgtgatggagttatcccaatagaaaacgtcgtaccatctaacagaagagagacttatgatcccacccaaaacaatactttactttaggaatcacttgatttaattgaagagctctgggtgcaataacaacttcagcttaaattctacaaaggaaagatcaccttgcacttcaactcaaaaatcaaaagccaaaggtttgaagttggtgacctcttcttgagaagagtgtttcttgcatcttaggagccaagactggggtcctctcggacctaactgagaagggccatacgaaataacataaagtgtgtgatggaacataccaactaaaatgattggacgaatctaagattccacgagcatggaacgcgaatcacctgcgccgatactatcagtaaattaagattgtccagatccatttatacttattgcattttattttctttgctcttccatgtacgcaatagggaaggaaaagtaaaaaaatagaataaatttcaaagaaaaaatacagtcttttataatttttagttgtgctgtaacaagtgaaaaatagtctaaaatctcagatcacttggggggtgtattacctctaaaaattagtgtaaaaattgatcaattaagataggagtataaacataaactgaagcccaaaaggttcaggaaattggaactcgagcttcagagatccaggagtaagtcgttatgttaccacacttgcaatcaataattcaccatgtcaatcaatgttgacaaatcgtgaagaagttcaggcttcgatgtaataaacagagatgaaatataaaaagttcaagcctttggaaccgaaacctcagcgagttgatagtaagcaaatttcatttaattttctaaagataagggttgttaaaaagcccaagacccaggtcacaggaaccaggacctcaaggaacctaaaagtagacaactcacaaaaaattgtaaagtataaaagttaaaatcctaaagtttaggccgttaaaactggagcctcggggatttcaaaagtagactaacttaccaaagataaattcatttaagtatcgaaatatttaataaagtgaaacaatagatataataaataaaagttaattcaaaggtaaaatttacatattcaaaaagccccacgacaagggtaaaatatttctttgcgcagtaaaaaagggggaccctcctccctagaaatcaagaaaaaaaaaaacaaaaaggtaaagccactcaaggctaaacagaagtattagctggcacggaagtatcgagaactgaatctacattattagaagatggaggagaaggtcaattatttattcctcagctggaagagcagaatttatccaaaattcttagcttccacgacagaagaggtctttatcctctagagttctaggatctgagagagcaatttcccttctttcccttcaagaagcattgtgatatgtgattctctcttccaatgtagatgaaaagtatcatcctcttccacctagttcgtgaaaagatatcgagctagatgtataatttggtgtgacaatctcaacactgtcttgttaactagaaatcccgtactatatgctcgaactaaacatatcgagctagatgtatagtttgttcatgaaaagatctcgcaacagttagttcatgttaatcatgtacatgctgtagaccaagttgttgatggtctaactaaggccatttctagctctcgttttgatatgtttagacacaaatttagtattggtgagtgtacaaatttcaagtttgaaggggagtgtaaagaaagttagttgtgttagtggtaggggttagttagttgtgtaagtttgttacattctcttgtacagctgtacctttcggttacagccttctagcttaaggcttgtgcatataagtttgtaattctccttccatgctaatgagactatattctttctagtcttctctttcgatcttgatctcttcctctctaattcatcaatggggagacacaatgctaactctaatatattagcaccctttcgttgtaataaatatcaatcattaatttgttgggacgtcttatgattttcattataattgttttattgaaaataaataaataataaaatttggttttcaaacataattttttgaattttgtttaaaaaaaaattgactcttgttgtttcttaataatttcaggccactggtattactaattcttttttaatatatatttataaattatatattgcatgcgaaaatggtaggaagagtaataaagcgtaataagaggcaaaaaataaggaaggaaaagaaaagaaaaagaaaggagaggagaggaaggtggttgattcattcttagcaatcatgaatcaatatattatacttgtttaattatctaaaaaaaactcttatctcttaatattttgttttagtttttgtgccatcacaacatacaattattctacaatattaagatatatagcttgagagataaaaacatgtcgtggttaagaacggcggtgaacagagcagcggaggtaggaggtcagaaccagctccgtcgcaccatgcgcagctatgctgactccgttgttgtccatgccggtaatgccgttgctggtggcgccag

SEQ ID NO: 225347 - DNA, 2253 bp, Cannabis indica
agctcctctttagccaataagctcctctttggcaaatgagctcctccttggtccatgagctcctctttcgcccttgagctcctccttggtccatgagctcctccatggcccatgagctcctctttgactattgagctcccccatggccaagaagctccaccttgttggacctccatatctagagtaaaaattcatgcaccattattttagattttttgagagataacagttgctatacgattttgggttgcgatttaggttgctccgctaatttcaatagtttgttttgtttaaaagattcagtaacaaaaattgtaaagaaagcaccctaaatagtgaacaattttcttgttaagagatcaatagtacatattcgcattaagatttccatatttatttttctatatatattattctatttaataattcgaataaatgtgatagaatactcaattatttttaactgaattatatatttgcattatgcaaaaatatttacttatatcgcccctctcccaaatgtgtttatgaaggtttactattcatatatgatatatgttgatgttgtagtatgaaataaaaagcaatatataataagaaattaaattaagatacatcgcatgcatatatatgtataaagatacaaatatatatgtatatgtgtgtgtacgtataccttcctaaccttccagcattgattgctcataaatgatttgatcgagcatcttgtgagagagcatcatttataagttttcatggggtctcaagctaggtctattatgatcaaggtcatttttattatttgttatctggtatgaataataattgctatgcagtctatgtcaatcaatatatatatataaatatatatttacgtaaatatatgattttcatgttcaaatatataatatttataaaatgaaaaacattcctcaacaatatatcctttttatgtggttttaattcgctagagagatcaacaaacaatatatatttataaattatccaaatttaatggccattttttgttagaacatggtgagctcaaccactctctgtctcattcatttatttatgtataagcatttacaccattatctgcccttctttcctctctatatttcttcacgacatgcacactaataatatttacaatgatcactatacacttaaataatgatctgtacattattattaatatttacatacaaatatatgggaaatttcttttgattaatatatatatttatatttcagtaaaatattttgttgcccactcaacactagctattccaagcagtacaaaagatatggtacaattaagttgcactcaaattctaaagctaattcaaatcatatatatacaaactttaggtaataaagcctcaaacaaatctcttggtatctagttcaggagtccaaatttaatttttcgtaaaagcttatattgtttttactgattttgaaaatattatatttttttttaggactcaagaatgaatatttttttagcctctctaatgttaaaagacaagagccttcaaaatagcaaaatacacctcttttctgcactttcttgttctgcattttttgagagttgtaacagcaccaaataaaaaaaagaaagatgctgtctccaaaaccacttcacaaaacaactggttgactgtgttgatggagccaaatctgaggatactatcccttgttatcaatctctcccaacaagccatccaattagttataaaatttgttttttgggatacttagcctatcccaatgaaaggagaacaatttcttcttactaacatctctcggtcatagcctgagacacgttagagatgctgaatttcatgttagagaatttattaatatttatgttgcttggaatctattggtttagtcattaacacaaacttttctccaataccagctagaggatgatggaacctgatagctctactaatcttcttgcttgatataaacccaatgaacccaatctcaaccacagattctccttttaagtggattaatatttacttactatttattgttaagacagagtaattcattggttaattagtcatctaattaatcacctaatcattcactgcctaatactcctgcattgttggagattctctttctgttattctattttgtcttttactttatttgttttgctttttccttttctgttatgcaattgtaatgccagctggcatatttctctgtgtgtaatcattggagccgtta

SEQ ID NO: 225348 - DNA, 4815 bp, Cannabis indica
ttataagtttcatactgcagtaagttttcactggtattttgtagttgttccactgttatttttagttgttctgttttgtattctactagtgttttataaaaacacagtatttatgaaaatatttctgtgtgacagtatttttgtaaaaattatcctaaattttagtatttttgtaagtttccataatatatactagtgattccaactataaacatgaggtatattgaggtgatactttaggactgtttgataattttatacaatgattattaaactaaattatatacgagttccagtagcagtgtagcaaccttaatgtagtgctagaaactaccactaccctttaagaattctttattaattaataaccataaattgtgaatgatccccgtgtgtgtaagttagaagtgtctatattaatgtttgataatattttaaaaataccaatattaatttgattgtttgtataataccaaaatatttatgtgtgcccatcttatataatatcatttctatgttgctttttttttctctttttgggcctgtttgggccaagttgtttgttagttctttcagaaattagcaagtcaagtccacgaagttcacataacctgaaaattgatatttctttctctgcacgttagtgccatgcaagactggtcgttgttgccacgtttgcattattttgaacaaaaaaaaaagaaagaaagaaaataataccaatatttttttaaaaaaataaaacacatattttagaagttttaaataacacttcagatgatgcgaagaattttttcagtcaaaccttaggcatgccaatttgtgaatgctatgagacttacctcggacttcctacctattcaagtcataataagaaggagttgtttagcaatgttaaggaacgaatttggaaacttctacatgcttggaatgaaaagctgttttctgttggagggaaagaagtactcttgaaagctgtggtacaatctatttctacatatgccatgagttgttttcgcttgccaacgagtttttgcaatcaaattgaatctatgatggccaatttttggtggggcactaacaaggatgggtccaaaatacattggaaaagatggaaattactctgcaaatataagtttgaaggtggcatggggttcagatcttttgttgactttaatcaagcaatgcttgccaaacaagcttgccaaacaagcatggaggttatttgacaatccgaactcacttttgggccgacttttgaagcacagatactaccctagaaattcttttttggaagctcataagggtcactcaccatctttaacgtggcaaggaatacactggggccgcaagttgcttcttaagggacttcgctacaagattggtaatggttttcatgtcataagtgggctagatccttggattcctggtcatgatgagtttaagccgatttgctatactagagatccatctacgcctgtgtcgacatacattcttgatactatggaatggaacttgccacaactacatcaagactttgctcaaattgacattgatcgaatcctcacaatccctttgagtttttatcagtcaacagaccggcttatatggcaccataacacaaatggcttttatagtgttaaatctggcttccatcttgccacctcaatctcggaaaaggaccaagaatcgtcttcggatgattataaaacctggtggaaattcttttggaagctgcaattaccaccaaaagtgaaaatatttgcttggaaagtcattcaaaatgccctcccagtcgccacggctttgcacaaaaggaaggtcattgattcaaccttatgtacacgttgcaaatctgcatgggagtcaattggacatgctttgttctcttgtaaatttgccaagtctgtttggaagaacactaagtttcaaattgatactcaccatgctatgggtatgtttaatggggattacctaatacacttggcttcaacaatggataaggagaattttgaagcactaatttgtgtaatgtggagcatttggaatgatagaaacaaagttctccatgatggcacacaaagagattccattacacttgcatcttttgccttgaattacatagagcaatatcgaagtgcatagagaatttcctgcaaaaaattgcagcagccacaccagcaaatcaatcgcatagcagctccaacaggtcggtctacacaccagcaaggatttcaaggacaatgccccactgcagatcaatcacatgggaggcaagttcctgctacaatggctcctcttggttgctttaacagtcaataacttggagagaaccacaattaccagacccgactttctgctcaccagcaccagcaaactgatcttaacatgaggcaccagtcgaccatctccactgccaatgacaatattctatttcagcagaccagagatgatatagtatggaagccccctcctatgaacttgcttaaaatgaatgtggatgctgcaacaaattccaaaactctgacattaggaattggtgcagtggtgcgcaattacaaaggcgaaatcatggctgcactttccaaaaaagttcaggggtgttttcagagtgacgaaatggaagcaaagacgctctttcatattctgaattgggcatcacaaaaccaaatgtcaatcactatggtggagacagacgcgctaagagtttcatctgctttaaattctaatcataatgacctgtcatgttttaatgatctaatcactgatgcacgttgtcttttatcctctttccctagagttactgttactcatgctcgtaggcaagctaaccaagctgcccatggattagcaaagtacgctctagagttggatgaagacgtctcttagataggagaaattcctcatcctattttctcgattattgtaaaatgactattgatttataataatattgaaaatttctacaaaaaaaaaaaataaaaaataaaattaaaattagatgaaaatttatgaatccatattttttttctttttttcaaagacaaaataaggaataggtagttactaaatttttttgacacgatactaaactggtacgtgggtggcatgagcacgatcagacgcagaaaaaatataggcttacccacgatacagaacgatgttagatattggcacaatacgacgtgaaaaatatgtacttaaacacaacaagtatacgaataacatgacacgtaagcacgaataaactagcatgaagaacgtgacacaatacaaacctaaaaaacacaacacaacacattaaaaaaatactacaatttactaataataattataataaatagatatgtatttgtcaatattataaataaattaaaataataataaaacttaaatataatacttaatattattagaaaatataaaactacaattatatattaatttatttttacagtatgacataaaatttgagtattgtaaatatttaaactatagtaattctaataatttttaatatgaataattatttgtaaaatattattaaaaaattatataaatataattaaaattatgaaaaatatatattttaataattggttcgttaattgtaaaaataaatgtgaatatagagcccaaatatgaaacgggccacccgagtaaagcacgatacaaaaacattaggcttagggggcgtaccgagcttaccgtataaaggcatggcacgacacaactcatattttaaaaaatgtggtataatttgagttaaattagtacgacacgtacatatatatttacaacactaattatgtacactagtattgtatatctctaaatcatgtaccccctaattattcatagatcacacgcttaattttttctaaaaatggacttaataactaatacattataaaagtaataaatataaaaatttttttattaatgaatacaaaaatttaggtatttctcaacttattattctatgtaataatctgaattgggttctaaaccaaaagtgcttattaattagcttagtttttctaatacatattatatttataaataaatgaatttgagtcataaatagaaataccaaaaaaaaaaaaaagttaatgctagcagagtggcatagataagtctctttttccttgtcagttggctccttttattattatcacttttattttgtagtaaagaatattgtaagtgattcttgtgtttctatatttatttaatatttctttttctcctttttaatgtaactttttattttctgcaattttcaacattatcccttttagcatgcatgatgtatatccaaataaaatatatcaatttttgagaatcaattctttttcccacttcacaatttatttatatactaatatataatgaaaataatttaactaaaaaatatttttaagcaccaatacaaatagggtttacagaaacaggctatatttatatataatttggttatatatgaatatgtacaagaagttatagttaggttatataattctataacagcataagttaattaatttagccagagaaaaaattgaagtggtcttcatcatgatgtgcttataaaaaccttaccatttcaaacttcaagctaaaaagagaattataaagctttaataaaaatctgtctatatatgtatgtaatatatatacatttttaatcaaattctacattgttaattcttagtatgggacattggtgcaagtgccacatcatgacattgaagtttctccttattacatttttcaatttcaatgagaatggaacatattcaaatgtccctttca

SEQ ID NO: 225349 - DNA, 2361 bp, Cannabis indica
ctacccacttggtgtagtagtctactgccacaatcgcgtattttgctcctgtcctacctgttgtagtgcttccaattaggtcccatcccccacatggcaaaaaggccaagggctggtcaagctagtgagttcaaccggtaaacgccagctatagttagcgtgcttttggcacttatttcatgttttagcgaattccattacatctttctctaaggagggccaatagtatacttattttaaaatctttcgagacatggaatacaccctggcgtggctgccgcattctccctcgtgtatggcaaataggattggctgtatctccccctcatctatgcaccgcaagagggaagttaaaaaagcccctcttgtataacactccatcgatcaccaattaatgggttgccttatatacaaccctcttggcctccttcttatccactagtagctcttctttttggatgtagctgaggtatgcgctcatcgaagagtctccattagtcactacacatgcctgctcctcctctatggtcgacctttcgagatattccacaagtattgattctaaggtatcaatatcctgagtcgatgccaatttggccaatgcatcgacatttacgttctcatctcagggtatctgttccacggtatagtgttgcagctgctctagataacttttcaccttagcttggtacgccatcttcctactccccttcgttggtattctccattgacttggaacaccagtagctgtgaattgctaaagatgtctagcttgatgattttcaattcctttgccaagaataggcaactagcaaagcctcgcattcagcttcattattggaagccttaacccgaatctcattgcgcaatacatcttctgccctcctagtgcggtcatcactactctcgccccaactcctccataatttgatgctccgtccacatgtaaattccatcttccttccccatcctggggtggtttcctgcaacacttcttgacttctcgtatcgtgaatttagctataaagtcggtgaatatttttccattgtctgctgcccgtggtacataagaaatgtcaaattggctgagtttaatcatccattttagaaggcgtcttgaggtttcgggcttgtgtaggacttggcgtaaagggtgattggtgagtactactatggagtgagcatagaagtgtgactttagcttccttgaggccattacgagcgcataagctaacttctccatttttgggtatagggtctcagcatcttttactaacataatacactggttgttgctatttcccctcccctttcacaaaggccacaataacgacatgtcttgacacaaccaagtaaagagataacatttctcctttctctagtttcgccaatagtgatggcttccccagattttgtttgagtctccaaaaagcctcttcatagtcctcaccatcggtgaattgcttgtttcctcttagcacattaaagaacagtagacatttgtctatcgattgcgagatatatctattgagggctgccaccatccccgttaggtactgcaccttctgattttctagtgattccatatctatcagtgcttgtatcttctcaaggttggcatctatccccctttcattaaccatgaagcccaagaacttgcccgacgacaccccaaatatgcatttagcgggttaagcttcatctaatacttcctcaaggtagtgaacgttccatctatgtctttgatcaagtctccagctttgttggctttagtaacatgtcatgaacatacacttccatattatgcccaatttagttggcaaatattttgttgacgaagctctgatatgtggccctcacatttttgagtccaaatgacatgacctgatagcagtctagccctctgtctgtgatgaaggatgtgtgttcctcgtcagctgggttcatagggatttgattgtatcccgagtaaacatccataaagcacattacctcattgcctgttatggcattcaccatctgatatatgcgagggagcgagaagctgtattttgggcacactttattcaagttggtgaaatctacgcaaaccctccacttcccattcgactttgggaccaagatagaattcaacacccaaacagggtaaaaggcttctcgtatgaaccgaaactaattgagtttgtctacttcttcttttaacgccgtgtatcgcactgagttgagggctcgccttttttgccttactggtctcgcatgtgggtcaatagttatatggtcagacataactgtgggacttatccccactatgtcttgatgtccccaagcaaagacattagccatccctttgaggtattatct

SEQ ID NO: 225350 - DNA, 5219 bp, Cannabis indica
aaaaaaagtttaaattttaatgataaattattaaattgttaataaatttaaggtgtcatttagaattgttaataaatttttgacgtttatattagcatttaagcagttattattagcatttgactataaaaaatagatggcactttaaatttaagcttaaagaatataaaatataagtgaatgataattgaaagagtttaatcaaaaaaacactattcttatttatagcaaattaaaaaagattattcaaattaaaatcactttattagttattttcttttattttcaaaaaagattaattaatggaatttttgaagatagttttgtgctatgtgaataattttatgatttatgtttggctaaatactaaagcttcaatttttataataaaatcaaaaatatatgttaattttaatgagtggcaaacaaaagccgataaaaaagaatgaaggggaatatttgatatttgttttgttaggaaaaaatctagaagatacgactcaaaattcattgtatggcacacgtgtctttatctatttagcctcacacgtgtgaatggaaagaagctagagtaatatgagactattcaaattaaaatcactttataattaattttatctttaaagaaaattaatgagtgtgattcaaaaatatcaaataatcttattatttattaaatttatacatacactatttaaaagataaaaaaaagagtaattatcttttttaaatttaaacaaaatattaaagtttccaattaggataaggctatataatattgatgggtatatatacagcaaaacagctcaatatttgttcacatcgaccattctctctttctctcacaaaattataataagtctaattaattatattttctatttctattaattaaaaatggcaaagaagattaatatgtttcaacaaactgtaaggttgtacaatgattgttccgattatattcttcaagtgaaaataagatcaaaatctcaccaaacttctaagatagtcgaaattgaaccttgtgagttcggagatttgttgtacgacgatgtttgtgaacataaagttactgtaagtgttatgtttttcaagagaaatggagaggtgtacgagccatttcctcacgaatcatttaagggaattaattatattagatattatcaacgcgataagttgattcttcgtgatctagttgatggagcaacttttgatagaatgcggtaagcatagtgttaatttgtattgttttgagtatattttttttagcattgtactaaatttaattctttaattattacgtgcagtataccttggaaggtgggtgtgtatttgaagatgacgatgacagaagcgaatgattacataaatgataagttcgaagaaatgtttgagcaactgaatagtattcgtcatcgtctttgtcctactcatacaacaacaacaacaattagagagcctctactaaaatttgatcatatgatttgatgatgatgagttcttgtgtgattattcatatcactatttatttgttattaattttacaacgtattaattatcatatattagaaactactttacaatattattaattagtttttatgttattcatatttgcaccattttttataaaaagttatcaaattataattttccttctacgtcaaaattgtatatactattcaatttggagaaataaagaatgcataagagttgaggttgtgtaagtaactaaaaaatgaaaataaatgaataaataaaatcctagcaaataaaaagagtgataaaagactcatatcttgatggtctccatagctaattaattaaaaaaaactacatagaaacgatctcacaatacaacgcaatctgaaaaaattaagagcatgatcatgatgatcatttctcatgtattgtgttctattatagcttaataacaattataataaatagaagaagagaaggagacatgttgaagtgggagaaatatgccacttacttcatattattagatggccgatgatggggacgaaggtaaggaatttgagtaggccacgcgggatgtataagagaaacaacacgcgtattcatcggtgatgtaggcggaagacaacaaagaaattcgatgtgaattcgattcttgccaagtattcgacattgaaaaatctcaatattgtttgatgttaaattatcgttgaagcgttgaaagaagaacacatttccatcatccgaatggaaagcaatcatagtaaatggtagtgagttgacactaccacattgaaatcccatcatcatttcatcgtgataatgcaccaaattccaactacgtacttcatccttatcaaccaattcccatgccatgaattcatacaaatgtgtactcttacaccaattaaattgcgctattcgcagctttccccgaaccactccaacatgcaccttggaatttaaattacaatccgaaagacaccctttgcaacctaataacaaaggtaactttatcaaataagaaagttctaaataaggattcaacgcaataatacctccatttgtccaactaccgtaaagccaataaacaactccattgtttccaaccgcgtttgtttggaaatgccacctattcaaagccacaggagatttgaagcttgaatggctccattgtccagtctcagaacaaaaaatagctaaatgaattaggtacgacgattctacatattcgacatcattttctttcgtgctaactttgacaaccttatacttaattataggctcatcaaaatctcttaatattcctaaggcatacctataaagtttatgagtggcattaggagaaatgggaatagcaatatgttgttttgtaaaaggattgcatacatacaattttctcaaacttcgttcaaccaacaataaatcatcgaacgatgaccatatataatcatacgcatcgccgcccttgatatcacaccaacgcatacactccaatgctgatttctctccatagtgaaaaatctttgatctctctgagaaataatcgaatgagaatgaagaaacctttgacacattttgtaggtcttcggccacatcacaagaattcctaaatagtagagtgaaaggaagcgaccgagatggagaaggagatgtcggtgagttattaagtcttttttgatgatgatagtgaatgaatcggtgcttgaaatagtcatgaaaactgaaaatgatcgagtaccaacgcttgcataccgatgcacattccaccaaacgtctaaaatcagagactcttaataatatctctaacaatatttcatcagagataattgacattattgacactgataatgtttctatctctaaccattgcttttcaccattattcatttgaaatttcctaggtcgctcatactcatagccaagggttttcattttctttcatatgaaagtatagaaaattaaagatggttgagaagttttaggtataatttatatatataaataatttttatatgctaaatattatagtattctttttgagataatacaaaatattatagtttgttaaatagtttggaataaatttgtttgttttcttttttgaaaaataaaataaatttgttttatttagatacttaacattgttttcataaaaatatattgtaatatcttttcaaaaaatattgttatagattttttccgggtcaaactcttccaaatcttttttcagaaataaaaaatgactaaatttatcaataataacaatgtatacataagattttaacaaatcttattttccatacaatataaagttaaaatattttacaattagtaagtttttataaaatgtataattagttataaatattctaattagtccgattttgattatcaaatgtaattagttaactaatgtgttgttagttagctagttatattagttttcttctaaattttgtttactgttttttgtcttcctgtaacagaatttagttgaagtgaatctttgttctattgtaatctttggcctataaataaagatctaagtcaatgctaagattttctaattatcgaaagtaaaaacagcaaaatcaattgatgattgatgtccctccctaatatataactgaaattcaaaatattttcaaaatctattgaaaagcatggtgatggtgaattcaattggagacatgtccatctcttacaaattttgtcaatgatacatatgaattaatatcatcatcatcatcatacaaaaattcataaacatgaactctaactattgttattgttttacttattcattatatatatcaaacataaatttcattactttaaaattaattatatcccaaaatgaaaagagttacatatggttcacaaagaataattatcaccactcaacaccaatttccccgtaaatttagaaacaaagtacaaaccaagaaaatagactcaggaacagagaaaagaaagaaagaaaaagaacacccaattatatacatatgatttatataaaatggtgctaaacaagctacaattatccatacaaggttttatcaatatacatacatacacataatgtaaagtagtagtaagtaccattgtgaatggatgaatgaatacttaagatttagtaccttcaaattctagaaaataattagggccggagtgatgatgagtagtactactgtcattgtactgttgatcagtaataatgtccttcatttcatcacaatcccatatgatcatttctttcagttgaagagaataaataccccagtccatgacatctctctactctcagagtttccaaacgcataaaagagggtgcaaagctctgtaatcgatctgctacatcctataacactaagagattttaaatagtgaaataagagagtaataatagatttatatgtgatggttgaccatattcatgtggttcttccaccccaaacacattaccaaccgtatcagcatcactaacatagtgtctccaaagaagaaaaagaaagtgtagatgtaagatgaaaaagaaaaaaatttacgcagacctataaacctttaactttggttatattattccaaaattaaaagtaatgaaattggaacgaattaccgatagaataatctggctgagtcgcggacaatgtcgctctctttaaaacgttttcgcggctctgcccgaagtgtgcacggcagtctagcaaccacggcgtccccagaataaaaca

SEQ ID NO: 225351 - DNA, 3521 bp, Cannabis indica
tattctgttaaaccagaattgccgttagataggcacttttaatatataaagattaagaaaagcaaatatataaaggattaatatgaagtaaatgactctatatatgcaagttgagtagtcatatatatgtatatataataaatatatatatatatatgtagttgccatattgttttgcttggttttgagtatatggtgagaaaatggtggcaaggggagtgggatattataagtaccgtgaagcagaagctaaatagttttctttttttgacaaaatcacggacgccgctgctggatttcctaacaaaactcccgcatatgtagtaaccttgtatgctactcctccatctacttaattacgtcatcacctattttatttatttactaatttcttgatttaaattaatgttatagaacaaataaatagatatcatctaattaatctgtcgttcaatttaaaaccaaatccaggtccggcttaattaaaaagagctactcaaactgcctgatgaccaccactcctgttcgagcctaacacacacacacatgtaaatcttatttttatttttggactaataattcttttcatataaaaaaataaaaattcttgaacaccttaaccagtgcaaagcatagtcaaggttaatttccatctagctagtttgaaagagatatctactttaattctttgtttgtatctattttttaaatttatatgtacttttttttgtggttattttctttttaaatatatttatactttgtttaaaactttattaaatttaaccgtcacttaaaatttattcatcaatacaaataaaaaaaaattaaagttttacctttttcttttctctcactaaaatccttccgaacttaatactgatgagtaccctaagaagtacttatttaattaacaatcaaattaacatgaaactaatatgcatgacataaaagttttataaaaatatatatgcatgacattaaagtaacctaaagtaattcataagttttagcctatataaccattaatattcattcatatataataattttgagcttttttatttttacaatttaaagtaatattttttttttttttgcatttttacataaattgacatgacaacccacgtaacaacttaaatcgcaatcaaaatctacacaacaactcaaattaaacaaaactaaatagtcctaaaaaaaactaaacagtaataatactattatatatgtgcccgcactgttcaatactcgctctataaatgtatatatttcaccagatatctccatatcatgatatcatatattaattaagctatttataatatatcctaaaccacatctagttatgccagaagatgatggcaacttagctaaggagccaaaatatttttgcgttgttactggtaattatatcatggatgataaagcaatccagtcactgcaatatatagaagaagtcaccactaacgccgatgaagttcaaagacgagttctctctgaaatcctttcccgtagtgccaacgttgagtacttgcaaagacaaggccttaagggccacactgatagagaaactttcaggaaggtcattccagtagttacttatgaagatttgaagcctgatattgatcgcatcgctaatggtgacacctctcctattctttgctcccaacccatttccgagttcttaactaggtaagtatgtatcgtacgtaatatggaggtagttatatatttagaactataattatttattattaatttttcttcatattaaaatataatttggcttgatatgtgtgtagttctgggacatccgagggagagaggaaactaatgccaactattcaagagagctggaaaggcggtcccttctgtacagcctcttgatgccagtgatgagccaatttgttgcaggtttggaaaagggaaaaggaatgtatttcttgtttgtgaaatctgaggctaagactccaggtggactagtagctcgtccggttctaaccagctactacaagagctctcatttcatgaaccgtggacacgatgatgcttacaccaactacacgagcccaaacgaaacaatcttttgccaagactcgtaccaaagcatgtattctcaactgctatgtgggctttgtcaaaacactcaggttgttcgggttggggcggttttcgcttctggattcattcgtgccattaaattccttgaaaagaattgggtttctttggttaatgatatcaggactggaactttgaactctgagattgaggacatggaggtaagagtttcggtcatgaaaattctcatcaaacctgatcctgaactggctagtttcattgaggctgaatgtatgaaagagtcatggaaagggattataacaaggttgtggcctaacaccaagtatatagatgttattgttacaggaactatgtcacagtatattcctactcttgactattacagcaatggtctcccccttgtttgtaccatgtatgcttcttctgagtgttactttggcctcaatctaaaccctctttgtaaaccaacccaagtctcttataccattattcccactatggcttattttgagttcctgcctgtgaataaaaaaaaatggcaatattggtaataattcagtttctgatgacccagctaaatccctccaccaagagttggttgaccttgttaacgtcaaaattggagaacaatatgagcttgttgtcaccacttattcaggtaagactcttatatattcaccatataaaggtgtttatgttatacaaaactcattaaatagtgtgatttttttttctataaagatgggtacgcataatatatatgattttattttaaaaaatatggggaaacgtatagtacttttggcagttcctatatcttcaattcaacaattttttttttgggtacaattttaagttgtttactttattatttgaacaataatttttagtttattttttatttagattatcaaattttttaaataacaatatatttagtatttacttttaatttataacacaattatttatattaattgaatattgtaaaaataatcttaaataataattaataatatattttattcaattatttattgtatcaattttaaataaattaaaaaacatctagcataaaattaaatataaatccctcgcacctaattttcttctagtctattatatgcaagttatgtatatttacagaataatttgcggcaaaaccccctcaactatcaatttacttgcaaaaaaccattcaacctcatattttggtgggaaaaccctccaaagtactgttctgtttacatttttaaggtgtcgtctatccagcctcattaagtcataattttgcccacgtggcaatgacaggtcactaaaaaattataccatgtgaccatattttacaaaataaaaataaaaaatttaagagtaatttgcagcaaaattctcccaactatcaatttacttgcaaaaaaccatccaaaaaaactttaagg

SEQ ID NO: 225352 - DNA, 2633 bp, Cannabis indica
ttttttttctatataattctttccatatcaaacataagaaattattattatttttatcatccccacttttttctccttacatttttcttatacatttctttttactccaaaatccaatatccaaaacatagcccaaattattaaatagaactttatgtctatgttagataatgattatcgagtattctgtaatttgacattgtatatacattggtataaactatatataaagtaacctgtatatgttatttcgtagaaagtagtactatgttattcttgacaatgtacccattcagtaacctgtagcttgtgactaaacttgagcgtacgtatgtacgattttaaatattcttgcccgataaacattatttttgaaaatataagatgccaattctgtactttaacaaattggtattcccttaaattaataattgaaaacattgctataaacaatcctatttcttttgataataagagctagatcataatttcttgcccttcaaactctgactaaattcatttggtcctgacaaggttttttgttggcgttgtaggtatttgaagatgagaatgaagctgtaaaatactgtgacttactgcaaggaggtggaaaaggttgtgaaggtgttgcagaaatcgaagcatcatcggtatgaaacacagcaacctctaaaatcttcatatgtggatgattattagttcatttcaataattctttgcataatcttgcaggtattcgatcttgtccggaaaatgaaagctctggctgttcttttccgaaggggacgaacacctcctcttcctcaaagccttgaactcaatctaaaggctcgcaggcgatccctggaagaccaagaggactcggtatgaaattcttgcattgccaagaagataagttattcaggggaaaggttatagttgatgctgcaatctaatatataatatataacattgtaaataagtataaactgtaactcgagaaaagggagaatgaaaaaaaaaaccgtaacagcttagtactttcagcgatatggtatccaaattttacagtcaactatgaatcatacatgtttttatgtaaattagcctcacacatgaaactgaaacaatatgattttaccaaccttgttatttacattttgttgcaagttggattatctggctttaattatgggtttatttataccatctgaaatttaaaaaaataaaatttatacagcaccaatgttagaacattttaatttcagttaatttttgaaaatttacttttaatatttttgtttaccaaaaaatttagcttataaagtggacaacgtttaaccttatcccaaatagggttgtgccacctgcatgttgggaatactatcagtgcccaggtgagcattagtgagcattagcgcctacttaggtggatgcttagatcacatttttaagcttctcaacaattaccacaaaaaatcatgaaagacatgccacaaacaagtcccaagctccaaaactagtttcaaaaccaagacttcacttcactgatgtccaggttgacatcatgtcttcttgggcacacagttactttgataaagacaacttaattacataccgctcctatcatatacaatactttcacgaagaggtccatcaacatcaacgatccaaaacaagctcgcttgtactgaattataggcattggtaaatcgcactaacaactattaattaaaaattctctaactttaatatgttgcttactatttcattaataactcgagatctgttctctgcacaatactagtcacaacttcataaataaataataatttttttgacatttatataaattaataataaataattcaacattcaaactatttatccagaaaatgatcctgatgatatggatatcaatgtttgacatgcaacaagaaagaaaatatcttagagttgagtagtcccaagtcatagtagtcgacctaggaggggtccctagctctgcgcccaggttgactccagaaactacgaaacaggcgtttggatcctgtcaagttgtttccaactcaccatcttttagtatcctgaaccaagaagacaagaagaatcctagtccaaggcttagagattgagaagagatgaaaaaacaccccgaagtcgacccaggtgcctaggtttttgaccatggctagaaattcatgacattggacatattaattctcaagatcttaaatgacttacctaattggtttttaccatagctaaaaatccatgacatttcttaaatattttaaatttctttgcataaggtaaatatctagagtgatcgtctatgaattcgaagatatactaatatccacccctaaattgcatatccatatgttggaatacagatggacacacgtccaagtagatattggtacatgttctctttatagtgaatgatcttgtcaaaaccactaagaacaagatgtaaatgtcgtagatgtattagtgtcaatgtggtcttttgatgtttgtgatttctaggtctatgttaggttgtttttagtattattttgagtgtgtttttgatttagttctactcttgtttggagcaattttatgcttttcatcttttatttttgcagatttaaaatagaagaagatta

SEQ ID NO: 225353 - DNA, 3940 bp, Cannabis indica
ttttaaatttgactccaggtgcatgataaatttattattgttaacgtctcagtcattttattcatatgggagtttatacctctgcttccctcttcttcctctgttgtggatttaatagtcagaaaaatggaataaaaccctcattatgttataacaaaagtggcattttccacttattatggtttgttttcattatatagatgtattttgggtgtgggctgttttggctgactgatcagtctttgcatcacttattgttaattctgttaatttttccagttgcgagagcttgagagaggagttgatattcttgttgcaactcctggaagattggtagatttgcttgagagagctagagtgtcacttcagatgatcaaatatttggctcttgatgaggcagatcggatgttagacatgggttttgaacctcagattagaaagattgtagagcagatggacatgcctccacctggcatgcgtcaaacaatgctattcagtgctacatttcctaaagagatacaggtttgtctttattttacaattaaaaaatttggtttttagtactgtaatctattcttgtgactggatgatacttgtggtgttagcattctcgtctgctttatatgtgtgtgatcaggtgctaccttttaaaggatatgtactcagagtttgatcaaacaaacattgatagtactactactagtacttctgttttgaggaatttcaaacatctaactttacaatatttcaacattgcttgttttatagagaatggcagctgactttctttcaaattatatatttttggctgttggaagagttggttcaagtactgatttaattgtccaaagagttgaatttgttcatgaagctgataagagaagtcatttgatggaccttctgcatgctcagaaggaaaatggaacccatggcaaggtaatttcagagacatagtttacatgtttaaatcatgaattgcttattgtttataattttttgtgtggctaaattagcttttattattgataattgtgccttgaaatgcagaactctttgactttagtttttgttgagacaaagaagggagctgacgcattagaatactggttgactggctctgggtttcctgctacaagtattcatggtgatagatctcaacaggttagttaaagttggtcctctcaaatctaacagtttttttagttcttcttggaggtgtttgtgataatgtgtgcattgcttgataattgtttttgtcatttgtcattttttatacgctagttttcagtagtgctctgagaatataatatatgttttaatatatatattttttaatttaacctatccaatttcgggaatagaatgtgaatattgtgaaatacatagcttaaggatgaatcagtttgacatttcaattttcttcaactcatatgatataaaatgttatatggtgaagtgagtcaaatcagcaaggttgatgactttattatggtgttagtaaaaaaaacgagattggttaggttgtagtagatgacagaattaagattgtattaagtaggtcatttggtgttttgaggaacatttacattgaaacaccttaaaataagatttagaaaagaactggattgcaaacatttacttgctgcaaaaaagaaaaagagaaaaaaaataatctttggaaatggaagaaacacatctggaaagataaccaatttttggaaaagaaggatccatgaaagatctcaaaatttcctttttttccggatgaaaggaggatctgtaaaaaattgatggaatggaagaataagattgtatggaaccaaaagaaaaaagtaacattgttttgattggaacttgggtaggtgcaagtgtgaacacatttaacacaacacaaaattgcacataaaaggaggcttgtggagtttctaacttagtttgccgtgctccccactcataatgcccgtctttctttataaactgaaaatgatatacgcttccacctataactcagtttgccgtgctccccactcataatgcctgtctttctttataaattgaaaatggtatacgcttctacctataatatgcatattgtatgcatccaacgtctgcaatagtggagtgactgcaattttttaccataaaactttattatgatcatttaaccacatgtttatatgcaggaaagagaatatgcattgaagtcttttaagagtgggaaaacaccaatattagtggcgacagatgtggcagcgcgtggtcttgatattcctcatgtttctcatgttataaactttgatcttcctaacgacattgatgactatgttcatcggatagggcgaacaggccgagctggcaaatcaggtctagcaactgcttttttcaacgagaacaatgcatcattggcaaggcctcttgctgatttgatgcaagaagcaaaccaagaagtgcctgattggcttactcgttatgcatcaagggcttatggtggtggtggtggtagaaatcgccgtggtggaggtcgctttggtggtcgtgatttcaggagggacagttcttacaataggggtcaggattactatggtggaggtaatagtggtggcggtggagctggcggtggttatggtgggggtggaggttatggaggtccaggagtgagcagtgcttgggattagtctcctgcaacagggtttctctaattttgtctcaagagaatatatattttttcttctttcagattcaatggaaatttctttttgtttttctttttgtcaacctgtttattgttgtgatcttcttgattctgatgtggggaatgctatatcgaatctgtgggaaggaccatagggaaggccttgcctgtaaccagaggtgtcatagtagggccaggttgatggtgaagaactactaacaattttggttatgggatggtttttgcgtgttttgtccttgtgaacatacatgtctgggagagaccgataaatatcttgtcacttactaacccgggcaacttagcagaaaagctcagttagagttaggtacaatacattctacatatatagtttgtagatgaggctgacgcttttttttttataaatttcttatagttttcccatacccaaaccctcccctaaaagcataagttaaatgtattctgttctgtcctggattatgttacaactcaagtttagttggaaaacatcattttcatatgttttttttttacttctatttttgctcggagatttatccgttatggttcgtttggtcattttatgtttgtacaagttactttaaaaaattttccagttaatttatgatgttgtttgatgcgagtacttttgaacttatcttgatctcttgttttgtcaaatgtttttatgtaaatatggtcttggcggaagaaagttcaggtatttgcacgtaatggttgaattgtcagagcaaatttggctaaaatatgtgcctcaatattcagtatatctgtatagatacaacattttgaatatcaaataatgatgtgcggaacttgttttgcttctgaattacttctgtagcttccataagctcaaatttaaagcatcctatgataggtttggacatagaagcaaccacatcaccactagagttgcaaagaatagctccaacaccataaccataaaagttatgaagaaaacattttattacacttccacaaagacgaatgtagcagggtttctttggacaagagacatgaacatatttcaactttggactaatggagttcaatttcttcaacttccatgtaggtcatcaatatgagaagacttgaaattgggacctgtacaagcctccttcactcacactagttctaaaacataaattaccattgggagaagagagaaagggagagagaattctagacagagagagagagagagagagagaggagagagagaga

SEQ ID NO: 225354 - DNA, 4856 bp, Cannabis indica
acaacgcttcccatcactccatgttcatctctcatgtcatgtgttgcctcatcattagtcccatgagttgcatacgggttgtactatccattgtggtggctggggataaatcgtcatgccgatcccaaagtgcatggcattcatcctagcacgggcatcccggtacactgcccactcttggatctctagtcagtgttgccacatgtcttcggtaacagaggccaacttattctctattcgctcaaggcgttgtggcatagtcatttgactaggttcctcttcctttggtggctcttccctagatgaggatgctagtgtcttctttgtttttggatccataaattgagccactgcatttttatcaaaaatgtgctgacattgcaaactttgttctgaagtagagtattgtaccccatctttagcacacagcgctgtaattagattcatatgagcaaatccctttctgatatttcgaacatgatccgtaatcgagtgatggatgacactgcccacatcaatggacttcttatgaagaacggcatataggagtttggtaattgtggtgtccacagtagaaaaatatttcgttggaagtaacttagctccaataaaccggagccaaacacaaccttcacactccatgtcactctgatgaaagtaccttaattccccatcttcagttcgaacccattgagagagatcggtttacaaaggcttctgatgataagatcataatcaagctcttgaactatcttggcataatcatcatcctcaatgtctttgtggccatagaacttgttgatctcccgacttgaaaaagatacctttctgccccggactttcacttaatggttaacatggttgacaacattggcataaaattccatgaccacgggaataactgcaacatcgggctgagcacaaaatttgaaccaatctcgatcactaataattattgtaaattgggagaaggaagttgaaagattgtcataatcaaatcctcattctacaatcatcttcctatcccgagcgatggcatcctgatagcttttaaagcctcttctgaattgaaaatactagcatcataggagggttgggaagatgatgaccgtttatcttttctacttcgcttcaacatcttggaatggtttaattttaatatttctttcaacaatacaccctaaacgaagacttacataaccccaataataattctcaaggttttccaactaaaattcactcccaaattccaaccaaattttgttgagggtttttatcactcgatgcgcacaaaaatccaaaaatttgactataatgttcttgcacactaaactttccccaattgtggcaaacatccaatattcacatataatttactctataatcttaaattgaaccaaactcaaacaaaaattgaacccctaattgtgggttttgtgccttaaataaaattataatttaacatgagaggttatatttatagaatgcacttaaagtttcaattcgtgatttaagtagtatttttttataaaaaaatttcttagtaactcttatgtatatatgtcatgatattgttaatattatttttcacattctcatgcatgcaattcaaagaaaacaaagacatatcgttagtagatgtagccaattagggaagaactatatttggtgaggacaaatttgttgaaaaaatgatcttttgatgttgtagggagaactattgatagcggttattaactaaattatcaataatttttctagcatttatgttatataacaaggttgtaacaaaagtaagaatgtacaccgtaataaatatttttttatgaacaaatttttagtaagtgtgtgtaattttttagtttaatttagttgtatgttaatctaagttcttatttgagtttaatatattgtaattcatgaatgatgatttttactaattttgttttattacttatgtctcttcgttatatatatatatatatattaataaatatacaaataaaaactaacatatctattaatttcaatttttattattataaaaggagaaaaattaaaataactataactaaattatgtatcaatccttaataattttttttgataaattataaatgtcaaacttgaatatttaaattaatttattgtgatcatgaatttattttgcaagatgtactaatactaaattaaaaatatttataacaacaaaatttattacataaattttatttgaatttaaattttaaaatattataaatatcaattaacatatctaatgtaataatttttttttttttatgaatcaagaaagtgtattagctcacaaacttgttacatcctaatagcacccaatttttgggcctaaattatgtaactatacatttgtattctgtacaatatggaaattataatgctgaattacaaggtaaaaaaccaagctttatcatcattcttgatcttttttggccaaaataattcaaatctttgaataactccagccttgatttctttacacacttaagatgtattctgtagctctttgtcctaaagatatctattgctcattccccaaagatggtaaactagacttgccatagcagcagcaagaactagtttcctaaagctgctcaattttactcttccaatccatcgaacaagaccagacagacagatacttctagcattgtaatgaagccagtctttaatattttgcaagcaattctggatattgcacattcaaaaaataagtttgtagcagattcagtatgtgagctgcacaacagacagtctgatcatctataatcctcatcatgaataacctatctcttattttaaatttttattgtattgccaataaaaataaaaaactgtgctttggtgtgttaatctcccccatacctgtttactccagtgaacctttgtttggcatggacagaacaacttgtatccatgagatacattgtattttttctgcagaaccatgttgccattcagagtagctttagattggtcattgagcttaactagacagccccaatgccagctaacttaacttgtcactttgtaattccaccagtactcattgtgtagatagacaatatttatccatctcaaccacagactatcttctttgtttgccacaaccatatgtattttcctattgcaaccttgttctaagctgtaatttttttgaaacctacacctccagctgacttaggctgacagatatcttcccatgcaatagcccctggcccttgatatactacttgacccttccatagataattcctgcaaagcctctatgttctgaatcactttctttggcaaaataatgatttgactccaatatgcatggatggacatcaacactaagttgatgagtacaaccctaccagcaaaggacaggtttctggagctccaaaccttgatcttggctgtcaatttgtcagccaaaatagcacactctttccctgaaattctgtttgggcatataggtatcccaaggtaggtaaatagcatttgttgaacagaaaaaccagaggcaacaataatcctgtcaagttcagtcctagacatgttgctgctatatatggcagatttagatgaattaggctgcaaaccagaagttaatgagaataatttgaggccttacaatttgtaataagcacttttgaaatctccattgcaaaacaagagcacatcatctacaaaggcaagatgattgagcttgattccagcacatctgtcatggaatttaaagccttgtttctctccaattttctccgttattcttgagagatatttcatgcctaaaaaaaagagaaagggggacatgggatcccctcacctaaggccccttttttagatacaaaaaatccatgtaaagctccattgaacataagtgagaatttaggagtgcgaacacaattcatcaccaaattaatgaaagcattaggaaattataagccatgaagcaaatcttcaatgaaatcccactcaatagtgtcataagatttttgaaggtcgagcttaatcatgcaactagctttgttagacttcttacatagtgcctaactagatcttaccatatcataatgttatgtccaataaatctccctttgatgaattcccctggttctaggagattaaactaggtaaaatagacttgattctagaacacaatagcttagttgcaactttgtaaacaacattacaataagctattggtataaaatccttaacaatattaggacattttattttaggcactgttgacctcgcttttagccaacgacaatgagtctaatttgtaagcgacaaatagtttaatataagtgtactataataaagcaaataaagacacaagatttttatagaggttcagccccgagcagtttggtaatagtctaatcctcgtagtttgtattgacttaagaacaaggagaatggttccttttcttagagctcttacaataatatctctaaatataaattcttagacaagttttttcgaccctttgcccagtgagtatgaatcactatttataaggctttaagcttgggagggaagtatttcgcttctgattacaattgatataagtggaaagattgcatagtaaatgcagaatacactaatcaagggattcgaacaagttgccatatctctgtgatttgatcccaaagttatagggatttcttcggtgactcacgatgcgaaagctgaatttgctaagtgttggcgtgctgcgtggatcgctcactgcctggttaagaggacttcatccaagagaatgtatgtggtgccctattcggcatatttcttgcgagcaaatgcatggggttgattccacgtg

SEQ ID NO: 225355 - DNA, 2604 bp, Cannabis indica
tacattctaaactatcacactattcactatataatattgggatacatattattttagatattctaaaatttgtatttctattttattaaatgataaattaaatgttatattttaataatatagtattatgacttgtttttttttattaaaataaaatgtaataataatatgatttagagatattataatagtactgattacattttctatatgtaagtttattatatttttttaaaaaaaatattatccaaaattgtgtttgaaggtactattttataaaatttataatttttgtgatccgaaagactattacgtaccctattatatagctatgatatatatgtatatttgattgatatagtagagtcaaagtctagtggtagtagaatagagtaagtaggtcttcatgtgaactttttaggcatattttgtattggagttttgaggctctctttatattgtttttactaatataggtgtttttaaatgaattatttttggtaaggtgggctctcctaacccatcacatttcaaggttaaatttatttttggtaaggtctttttttcttcctacacattatagatatgtgttcttttgattttttatttcctctcattttcattaggttgtaggttttggctttagctttatgatatgataaatttcatttgaattataaccttacaattatcaatgtaaaactaatcacataaaattttgatacattcatccaaattggttaagtaatctgtaactcgaatcaagtgacactacttaaataatcaaaatctattataaatgcattcgaaatatataattaaatttatcatacataaatgatgtcatattacaaatattaattgcaacctaatattctctttctctactattaagaacctaatttggtatagtagtgtttttagataaaaataatttaattttttgaggaatatatgtgtgtgttgtgtatattagatggggttgtaatattacgaaaaggcccttgagtgagtgagtagtgggctcatgtggaaagggacaagtcttcccatatattatagggtatggtatagagtgcagaatgggacgaaaacgacatgagatctgtttgggtccctttttatgtgggtgggacaccatccaccactcaatcatcctcatcatcatgccacgtgtacgatagatattttctgtatatgacacgtcattttctactatattgaccatgcatatattactttgtcttttgaataaggtgcttctctatccaaagaaaaaatatattgtcttttgagaaatactaaatcaaattaacatatattatagagtaaatattattttgtattttatattttgcaaaaaattattaattatagattttttattttgttaaataataaaataaatatttatttttttttcaaaatgatacaaataggagtctaaattaattttttgtgaaaataaattttaataataatctaattttaaaagtattatataacaaacctgtttatatatctattatgaattatatttaaaaatagtcaaaaattatatttaatgtaaggtagtaatattttaaattttattgtacctattttgtaaaagttttaaatttgttctaaagtggtataaaataaataatgactttaatttttgttatattaattataacttaataataatttaatttgaaagtgtgatataatcaaacttatattattttgaacaacacaaaatttaattaattattatttaataaaatagattcatatttttttacaatccaaaataatatttatcgtttaatatatatgtaaaatacacacgaggtagtttgtaaaatagtgtaagaaaataaatattttaaattttttactatttgacttggttctcttttgtaaaagtgtgagtattttgaattatttgttggtgtaagtcaaagaaaatttatgaaattaattgtttcaattttcaagagtaagattagagcttggtttagaacgataatacaagattattacaaaaagtttattatttatattttattttgtaaagagaaaccaattaatttttgaaatactatagatgaaaaaaaaaacaagttgactatcttattaagatatatcacgttagtgttaattaattacttaatttgaacaaatatacacatttttgaactaaaaataagtaatgattagggtagtttcagtcttatagttgacaataaaaccttgtcaagtttataattatttatttataaatagtaattatttaattaaaagtctctctatgatctacacatcttgttttgatcaatcttaatcataataataatgagatccaaaaatgaatgtttgtgttccaagtgcaatgtttctctattaattaattaataatataattaattatggggttaattaatctaaatatatacatgttttttaattattgtttaattaattaattacttaattagatgggggattgaacttgggcagtgcttaattaggtggtacacttataatgaatagaaattactatcaaagagatcttaattctaaatcatgactcgattattaattaattaattattaatt

SEQ ID NO: 225356 - DNA, 3242 bp, Cannabis indica
aaagaataaaataccttttagatttcccttttgggttctacagttttttcatgataaaaaatcactctttgagttaaaaaggactaaccccccctcacacacactcaaatgtctttttcttcactgtatagccgattctaataactatttcaagacccaaaaacagtcttactttgattcactgccaagagaccatctgagtttttgacaatcttttcatggaacacagtgcatgcctcttctacgtgactgttgtcaggttttcaaaacagagcacaaactttccagttgctaagcaaatgggcttgattggcccctacttactacaatgcatgctatttcagtttagtgaatttgagtcagaaaatgaggtccccactcaaacattttaatcaactgcaaggtatgtgtttcttaatttagcttaaattttatattcttattctgtttttttttttgcttatcattaatatttgaagaatcactatgattttgactatggaatacttggtataagaacttccggccgacccctcgacggtgaagttttaagcatttctggtgattttttctggacttttatgtattatttgtttagtttcagaaatggttagtggtcctatggttgttgaaagaaataatagcaaaaaagagaatatgttatactgattttgaaagagctgatttttagagcatgtttaatattagggccttattatatatattgtgtagtcatagtcattgttaagttgacaagatttgatgtaatagtagtaagttaaaggctactagagcatggctaggaaaggagtcatgtggagcctcttgcacgtgacccccttgtgggaaaaaatatgcctgtcatgatcttggtttttggtataactaccagcaacctcatatgcattatatatcacgagaaaaaaagaaaaaaaaatactctttaggggtctgatagtaacatgtgagattgattagtcatatagattcttatatatgtatatatatttttgcacttgaaagaagggtggttgttttctaatgaaaattcctttaaggtacatttgaatagtcaagagtcctactactagagtttcatatcatcttatacagataccccactattttccattaacttaagctgaaaattccaatttctctgtttattttgattttgatttttttttttttccaaataaaaaaaggtatatactagagatctttgcaatgcataccttgtgtatagatacaccctcttgtgtgtttttagttcctgaatagttattttgatttttttttttataattatttgttttaatattgtgaaccgaatacacagaggttaatgcacaccttgtgtatcggtacaccctcttgtgtgtttttagttcccgaattgttatttctttatttattttatttgattcgaattttttttgaaattttgcaggatgtgtcaaataattacagtaaattatcatagcaaaaattgaattcaaaactattcaggaaccgaaaacacgaagaggtaaacctacaccacataaaatctctgtatactatattgtgtgatggatagatagatagatatagatatatgcaattcttgttggtttcatgtcagtttatatctaaaaggcatgcctaagcgcataaactctaattgacacaaatggggtgggggggtatggtatcatcttttcttttggtacaatttgctcatgtaggggccgtaggaggagtttggagagagagcttattgtgaaggaagagaaatgagagggatattaaaagagaaaaagatattataagtattagtagtggacacaaggattatagtttgacaaagtagaagaaaaaaaaaaaataccaagtgacaatataacctatcaactattggcttaaagatcagatcagcccctccctctactttccactgctgattcatatatatcagaaaaacacacttgtttttttttctttcttgcatgataagcactgattctttaggtcatcttgttgggacaatagctttgtcacctagggacccatctcaccccatcttaaaactttggattgtcactggtcccctgctttagccaattattttgtttacttacatattttaatcttttgcttcacaaagtatagggtaaatatacagtatagggcttttttggtacgccctatatttatttcagcgagatttttttagtctatttcttttttcataattgtgttaaattttttgaaaatttttgaatagtttatattgcgatattttactgcactcctaactgttttttaaatgcacgtaaagtaattgtttcaattatattttcggtttaaattattttaatttttttgaaaattatttattgtttgtactttgtagtgtgtaatttgagtgtgtgagttagtaaagtatattatattataggtgcacaaatgtgtatatatattttatatgtatgaattattataattatatatatttataaaataattttttttataaattttaaatactttatagtagataatttgaaaattatgtgctcttgtttttatttatttgacgtgtttaaaacatgcaatgggttttgaagttgtgtaaattatttatataatatcttaaatatctacaataaaaatatatatatatatattcactgtatataagtgtatgatagaatagaaattgatttgtgaggaagtcccaattatttggggtttagaaggtgattttgatttatttaaggcccccatgaagattctaacacccccttttacgtgtcaccgttgggttttaacaactagttgtggttgggggaccattgacctcaccatcaatacaaactagtacacacacacactcttttatttgctttgttttgtttttattttagatcataatttggtctcttacatttattattatgtggtattcgttaaacttgatgaatcatctagtggtcataataagttatatcaaaaaatttttttagtgcaaaactattctaatgaccaagcaaaggcattattaattaggggcggatccatatataggcgaagaggtatgaattttaattagttacaacatatatttataataaaaaatgatatttataaacatcatattagttttagtgtaatagttcaattcttatcaagagcatttttttttaagtttacttttgcctccgctttttaaaaagaaaattacgcccctttcactttaa

SEQ ID NO: 225357 - DNA, 3181 bp, Cannabis indica
aaaaagtaaaaaaaaaaaataatgcacaaccgtctacattcaaaatgtgaaagttaatcctcccaaacatgaatagcaaaataaaataattacacatcgttaaaatcggttattcacctcaatttttaagcataacggataccctagtttcttctacgatagcttaaatattaaagaaacccaacactatttcaattcgattgtaaattttacttaggttatgataaagagtgatattttctttctagattgagcacaacgggtgtaatcaaatacataataaatcactaaaatcaaattaaatattcctagcttaggaaagctccttcactaatctccttccagaatttgtaattacaacctctactcaatgcattaatggttgaaaacgaggaaatattaaggattgagtggagtcgaagataataaaagatgagtgctgatgttacaaggggaagaggaatctaaaataataccaccatttttggtttaccttcaacaaagctctatcatcatttataggccaaattgaagagagttttttttctaatggaaaatggaagagagttgactaggagagggaacatgcattaagtacaaaaaaattcaatcaattttctataagatgtgttcatgaccattgtattattatgcacatggccaattaatacttccaattaaatacctcatatatggggtttttatttaattccccacagtagaagcaccttatataaaggttaattaaaaaatttggtagactattgagattgttagaaacttgacgttgacgtggatgaaagttcgtcggacatgattggatacatattaatattaaagagtgcgatttggtggttattaaaattaagatgcacaatttagtagatatacaatcacttctcagtaaaattaaacagattccttgaatccataatttcgataatgtggaaagaattttaactgtcaaaattttaagagcatatcaaatttaaaacaaaaaatgccaattagtctataatcacttaatttacttttttcagaatggattattcggtgtctgatttcataaattgaaacaacacgtgttgcagcaaatgtgctacagcaaaataaaagcaactggctccacaactcagatattaacttcgtagcagaaaatttccacggtaggtagcaaaagtagtgtagactgtgtagactgtgggcctgcaaaataatagttttggttgcaatcattaatacatataataacgtaagagaaaccccaatacattaaagggcaaatgtgaattatataaataaaagcacttgataaaaaattatttctcttgatacagtaatttgaacatgtcggttaagcaacctattgtaagaggtgaactcacaatctactgcaacagagtgactataaagtccctaccttaaaatagagcacattgctattatgtattattgtgtgtagcaacatccgcgctatgtaaaggttagggatattttgtaaatatataatttgataggactaatcacaattcacaacttgactgcatctttccagaactaatatggagcaccaaacagatagaaagccaaactttcctcctcgagttctcttcttcccgttacccgctcagggatatataaacgccatgcttcatttggctgagcttctagccatggccgacatcgacgtaacgttcctcaacaccgatcatgtccagggtcaactccaacaacgagctcacatacaagccaagtatgcagcctaccctggtttcctcttccgaaccatacccgacggtttgcctaaagatgaacctcgttcaggtgaacagagtattcttcgggtgcttaattccatgttgaagacgacaaaaccaattttgaaagatatgttgcttagtggtggtgtattgggttcagatagaagcccttacgttacttgtattatggccgatggaatatttggtagtcttgcaaatgaaataggagacgaactcaatattccagtcattcattttcgtaccatcagtgcttgctgcttttggatttactttgctattcctgatatcataaaagccggcgagcttccaatcagaggtacttagttaaatatattattttcgtttttaatatttttggttttgttgtttacggttttatattattaggagatgaggatatggataggatcataacgagagtacctggaatggaagccattctaagatgtcgagacctacctagttttgctcaaattagagatcatagaggacccccaacttcatcgaattgttgaagtaacaagacagagtgctcgagcccatgccctcatactcaacacatttgaggatctagaaggacccatactcaatcacataagaactcagtgccccaaaacctacaccattggaccgctccatgcccttctcaaacataaactaaccaaaaggttgtcaactactcgatcttcgaaaagtattttcgaagaggacaggagctgcattgcttggcttgattctcagcctttaaagtcagtcatttatatcagctttggaagtcttactgttatgacgagagataccctaatggagttttggcacggtctggtgaatagcaacaagcggttcttgtgggtgatgagggaagacatggtggccggagaagacggtgaaatcccgccagagttggtggccgccactaaggagagagggtgtttggttgggtgggcaccgcaagaagaggtgctggctcatccgtcagtgggtgggtttttgacccacagcgggtggaattcgactttggaaagtattgtggcggaggtgccaatgatttgttggcctaatgctattgatcaaacgataaatagtagatacgtgggtgaagtttggaaagttgggatggacatgaagggtcataaatgtgacagggaaattgtggcaaagatggtgaatgatctaatggttgagaaaagagaggagtttcagagatgtacggctgaaatggctaggttggctaaattaagtgtagatgaaggtgggtcatcttactgtaatttggatcaattgatagaggacttaaggtccgtccagcaaccgggaatgagtattaattagctctaattaatgtatctagttttatttgatattttatttaaaatttaagggtgggcattatccaatcc

SEQ ID NO: 225358 - DNA, 7198 bp, Cannabis indica
tttttttaatataactaacttaagacaattttgaacacgaacagatataaaaaaatataaccagttttatcataacatctttagattagattattattaagttttattttgataaaaaatcagttcaggatcctatttatacaattttagaaaatacaaggtctattttgtcatttaacaaaataaaaggtccaattggtaacttttacaaaatacagaatccaaattatacttacccaaattttaattgttattggtgcaattatgtatcaggtctcacatatttatgtgggacgatgcttaattataccaatcaacaagataaatgtggtagtattggacaccatgacactttgataacaaattaacaatgctataatgaaataaaggatagagatattgattcaggggggaatggttttggttacttacacgtctagtagtataataggtgagacctgggatggtgccaacatagcctaccagccccacataagggattacataagatgccaagagatagttaagtgagtttgcataaggatcaaatgaaggtttcagagtgaaaccaactgctttattgaataattttgcgaaattttgagggctgagatctattaatggccttggaaatccacctactgtgttaataatggccctgcatatatattatcagaatatattaattgaaaaaacagaactgaaagtagttttaagaagtaaaagtgaagatgggtactgtactacctgatatgaccaacttcttgataaccaaactcttcgattatcctatgagtaaggggatcaagattggctttcctggcaccaattggaggtggaccaccttctgccaaagatgaatttatggcatcaagcccctcaccaagcgctcctcgaaggaaaaactctgcctccatgaactctaagttcagagcaaactgaatcttatcattatcagtggcctctactggttcgcagcaaggactagtattggtaccccagatcagaccaggttccattgcaagaaggaaaacaaaaatatgaatagttgatgatataatggccattttttttcacagcaacagagcatagagaaaaatcgtcgagttagctgaatattaatccatgaatttgtgtagaacagcaattgtcaacctgcttaaaaggacactagatgaactgatcattattaggctcatcttattgcttattcattacgtaatttaattaactgctgctaatgattaattgaatgtttgtaagttaaagaatgatgttccaagttaactcccaaaacaatataatttcactataatgggtgtacgtacgagccataactattgtttacagcagtattgcatttccagaattagacataaaatctcaaattgttgcgtctacgtaattgactttgtaatgttctcttcttttgattttcgttaaccacttttttcattggtgaaaagatagaaagatggaaggaaatagaaacacttgatgtggatgtagtatctactaccagtgcccattgttttctacctccaatccaaaataagaaattattcaaaatcaacagactcgaagctcagctaccaatctttgttaatccatctataccagcatctatatatataatctattcttggtaatattgcaaactacaagaaaacagaaaatgatatgacgaaaaaactgacaataacgagaaaaggtatacaaattctctacttcacatagttagaaaaaaatgaataatccaaacctataaaatttgtatataatataaaacacaataataataaataatttttcttccctaaatctctaaataggaaacaaatttattcatgtaattataaaaaaatataccattgtgatgagacaatatgtattcatagggttagggataagacttagctacataatcctagttgactgggtcggctcatcaaagacttcagttaacaagaaaagttcacacttctacttcaactagactttacacacagatgctaaactcattaaaaatttaatgtaagctcaaataaaagtctaaattttcttacttgggctacattaattttaatatacataaatcaaaataaatttgtttgaaaacaactcatgagttgaacaataaaaaaatatttgtgaccactttaaaaatgatacttatatttattagttcttcaaaaatgtgttttaaaaaataaatgaaactataattaaatgtgacataatgtataagcactatgtttacattattattattgataatgtttattaattattaatctaatatatgtattataaatatatttgtgataatgttgtttatatacactataaatttttttatttttagtcacaacaaaatgtgtgactaaaagtaaaaaaaattgtaattaattataaattatcattcttatattgtaactaaaaagttcgtggctaaaagtattagtcacaaaaattacaattaattgtgactaaatgtgtttttagtcacaatacttattgtgactaaaactaattagtgacaacttgtatttaaatactatgttttaatcacaagtaattttttattgtaactaaaaattacatttagtcacaaaaaaattatgttgtaactaaaatgttgtcactaaagataatttttttttttaagaaataatgtgtttatttaatatatatatatatatattatatatgattttataaataaaatatgatgtttgttatttattttttataatatataatttgtatgtaaaattaaaaatatgtttcttatagttaatcagatgtataataaattataaataagtttttatccacatgtaatgtaattaattgatataaaatataaattgataaatttctcttttttttggcaccttatttttaatatgacaataaacaactaatttttcacacgtatggtaaacaaatcataaggtgtaaataattatttaaactttaattttgacactaaattatttaaaatttttctaaaattgacaaaatagttaatatagttttaatgtgtgagataacaagtgatcccgtctaaaaatttccttacatatttatgtgaatttagtttataactcagttgttttttttcttacataatttatgaaataaaaggttattgtaatgcctttctataaatcttcgtagtgtttttagctttattttggtgagaaatgctaaaagcaattagttatatgttatttgtataattaagtattgtgtttcatatattatcttgtaaatatagtgttgttgaacaccactcttacctaataacaataatctattttggttgtgtgtctactttacttgaaatcttcagtatttttctatataagaagatagattgtcatttggttaactttgtttcactttgttttaaaattttaatcactatatatgatcaacctttcaaaacttgaaattttattaactgacaatacacgatgaagattattttccagcatttgattgtgacaaataatattacaatgtcagtttgatagcacattttaccatggtccgaatcggggaagacagtcacagctcacagaagcttctattgtggtggtatagccctcttggcgccttccaaagtgtttttgaggagcattgcaacagtcattgggcctacgccacccggaacaggagtaatgcatcctgctaccttgcatgcctccttgaaatctacatcccctactaatctgtaacctgactttctactctggtcatccacagcatttgtgccaacatcgattactgcagcaccaggtttaatccaactgcctttgatctgcaccatatgtcaatatctacattaaaaatacattaagtaccaaccacaatactgatgacatgcatgcaccatgcttagcaccagcaatgacatcctgaattattgattcttaaaatagcggaaacattgccagaatcataggcccttgtcaaataaagtactttgcgagaatcaatctgtcatattgattcctataagagaatgggaatcatttttcggatagccaaacagagccaaagtattataaatactcaaaaccatgaatcagatttacacctagaaagacagatgagaaagttctaatgttcttaagaatacaatgtggatttgctaaggggcgccttatggtaccaacaatcataataaatatacataatgtcacatttacctaagtgaaaatatatgtataataatgactcttattcatttatttactaaagaaatgatatcaagaatgcttttactttaggaataacattacctttaaatcattttttattatttaaaataaaataaaatattattttttaacattgagggagggaatttgcacttgagacttcttaaaggtatgaaaccactagtctacatctatgaacacaataaaatatattttttttgaacaatttaatcaattcaagcttccgcttatgtttcaagactatgtaaacgaaataaaaagattttgaattcctttccaatcagacactcaattcacacactaaatttacatagtatgattatgatgtgttataaaatcccacctaaaaatgttacttggttgattttaatgacacatcagtgttgaaatttagcctgagaattgagagtgtatcattgattcctattacagttttgtaaaatgtctcattaatcatttatcattgatttcctatgttggaattctgagaagtcaaaaacttgtcctccaattttcctcactgttgttatttttatagcatttcacagcttaaagagaaagaatcagctacaaaagcactaagttctaatatttccatgggaaggcaggatcaaacaagaagaggcagtatgaaaaacagtgattagttttgttaatgaatataaatattaagaaatttaaagaattaccatcattgcctgtcctgctgctgcaatgacaatgtctgcttcacaaatgattttctctggctcaggagtacgtgaatgaacaacagtaacagtagcatcttccttcaaaagaagtaaagaaacaggtaacccgactatgttacttcgacccaccacaactgccctcttaccttttatagttataccacttcgtgagagaagctcaatgcatccctgcatagaatgaccaagaaataagcatggattgttcctacagagcagatgtatatgcattcacaaatacgcattcatgatggtttcttgctctttcagactctcaaaaagtacatttccacgtgaagaaaatgcacaagcatgttacacggcaacatacacatagtacaagaaaaccgtctcaccttaggagtacaaggaagaaatagaggatctctgcctttcattgcaagcttgccaatgttgagcgggtgaaagccatctacatccttctcaatgctaatttcactcaacactttctcttcatttatatgcttgggcagtgggagctgaaccagaattcctgtcagtcaacaaactctactctcaaacacttaaaacagtctaacagatccaccatagcttttctcagtcagaaacagtacataaaacaaaacaaatatacaaaaaagcaactttttgtttttactatcttgccaccctcttcttttcctaatcaatcaaacaacacatttcacacatcacactttaactttgcgtatgctgctgcttcacttattgaaatccagccacttttttttagcttagttcttctcttctttgtttatttattaaatatataaatacaaaaacgaaaaccaagtcaaataacatgttcctactcctattggcactaaactacattctccttcagatcagcaaaatcaacagaaattttcaagaaaagaaaaaacattaataagtgtttaagcatattttagcttagttgcactgtataatgtgatgtcattacgctcaaattgatacaatcccatttcaatctatcaataatgaattagcaaaatatagaattctgagggaaaagaaaaaggttaagtaagaattagaaccgtgtacatccggattggcgttgagttcgtggaccttagcaatgagttcggtttgagaaacgtcctcgggaaggtccaaatctaaggacttaatcccaacttcagcgcaagctttcctcttcatgcccacatagctctgcgaatctttcctgttcccaactattaccactgcaagtcccggtacctgaaaaagaaaacatagaaattgaaaattcccaaatttcaattttccgtttgttctccacaaaataaaaggtttttcagattcgtaattgttactatgcaattacgccatttttgagagatagaaaaagaccttgccatactgctcagagagttgacgaacttcaacggcgatttcggatcggactgtctgggcgatggatttgccgtcgataacagtagccgagtgaacggacggtgaggatgaagccattgagagtggattttctgaaaagtaggctgactgaaaaaactctatttgatattagatattagaatgacgtggcaaacaacgtaagcatggcctctacatggtggcaactccgtgttgtccaaaatttgatgggagttatatttggacatccacaataatagttacactctaatatttaaaaaaataaattttaaaaattactttgaataattatcttttttaccccctgtacttatgacactatactattatgccccttaatctattcagcttgttacaaatagtccttgtataattttatatgcatacatttagtccttctgtttattttgtttaaaaatactgtttgtattgatgatgtggtattataacaaaggatagagtagtaatttcatctctttttagagggaaaattgactatgaggtggcataataactgacaatgaaagatgattaaaaaatgatttcataaccttttaaaaaaatttaataaaaataattttattaaaataattccaatcgttttttagcagttcaaattagaaaaaggtgtaaaattaggattctacagtatttgaagagatggatatcactagaaagaacatgggatttttggaaaattaaggtaatgatattctattttttgggatgttatttttcattttttttttcctgtgattgtaatttttatgacttgtaatttattttcctaatggt

SEQ ID NO: 225359 - DNA, 5491 bp, Cannabis indica
ttttttttttcatgacctactatatttaagtaccatcctcgtgatgggtcctaattttggcttgaatatggatccgtttgttttcttaaagtacctaattttaattgttgataaaagtagagaatatatttggagtaattaatagtattttataaatgtatgatataaataatgtattttataaaaaatttaaaataaaaaacgagtttatcaattataacaatctttgagtatgttatttaaatttttttaaagtttatttattttagagaaattgtgtaaggatatttatttggacaatattataaggggataaagaagaaattaggggagtataagtgggccaaagaggtcaaaatgccaatactactacaccacaaaaccaaagctaaagtaaagccgaagaagccaagcttaagcaaatcagcgccgcctcttctttccgaatcaggcaatcaaccatggctgcctcttcttccttgttcaacacctccctctcttcattcgacccaaaacctaaacccttttacccaaactctctttccaaacaccgcccttcctctctcatcacctgcaccacctcttcttcctccaacaatgcctctccttctaaggtccgccgctccgatgagaacatcagggacgaagctcgccgccaccgcgccatttccaacgacttctccgccaagtacgtgcccttcaacgctgggttcgactcctccgagtcgtactcgctcgatgaaatcgtctacaggagccgctccggaggcctactcgatgtccagcacgacatggatgcgctcaagaagttcgacggcgcgtactggcgacgcttatttgactcgcgcgtggggaagacgacgtggccgtatggctctggggtttggagcaagaaggagtgggtgttgccggagatcgataacgatgacatcattagcgcgttcgaagggaactctaatctcttctggtctgagcgttttggcaaacagtttctgggcatgaacgatctatgggttaagcactgtggtattagccacactgggagctttaaggacttggggatgacggttttggtcagccaagtgaaccgtctccggaaattgaaaagacctgtggttggggttggctgtgcctcgacgggagatacctcggcggccctctccgcctattgcgcatccgcagggatcccatcgatcgttttcctccctgcgaacaagatctcaatggctcagttggtccaacccattgccaatggcgcatttgtacttagcattgactacagatttcgacggttgtatgaagctaattagggaaatcaccgccgagttgcccatttacttggccaattctttgaacagtttaaggctcgagggtcagaaaacagcagctattgagattttgcagcagttcgattggcaagttcccgattgggttatcgttcctggtggtaatcttggtaatatttatgccttctacaaaggattcaaaatgtgccaagagttgggtctcgttgataagattccaaggcttgtttgtgctcaggctgccaacgccaaccctctttatcttcactacaagtcaaattggaaggacttcaaagccgttaaggctgagtcgacctttgcttcagctatacagattggtgaccctgtttccattgatagagctgtgtatgctcttcagaattgtgatgggattgttgaggaagctactgaggaggagctcatggatgccatggcgcaagctgactcaactggcatgttcatatgcccacataccggagttgcactaacggctctgttcaagctcaggaagagtggggttattggacccagtgatcggacggtggttgttagcacagcgcatggtctcaagtttacacaatcgaagatcgattatcactctaaagacatcccagaaatggcatgccggttcgctaatccaccagtggaagtgaaggcaaattttggctcagttatggatgttctcaaggactttttgaataagactccaaagttatgagcacataaacgataaaactgtaagtttagtagcagttttgctattttgttgcggtcaaggttttatttttagcttctgctgtttagcttgtagtatcctattacttttcctgttttggggctcaatatcttgttctctattttgttgagttaaaattaagctataaggctagaagtgatacactcaatttcctgttgcaatggtttacagtttttgcttgtgaaataaagattgcaacttttccaatgatcgaaagtgaagaaagaaaaataaaaggaagggttaattatttgattttgtacaaaagttttatggttgcgcttttaagagtttactagcacttcccaagtgcgtggagtgtttttgcacatttgaaacgagatgatttcaatggtggtgtcatgtcaaatatcttcttttggttttgaaagagttcttgtggtggtgtcatctcaagaagtattaaagtattgaatgatgcaagaaaatgattaatgtgatttgaacatgggatagggagtgaacgaccaattcttcattgtgatatttttgcttagtcttttggggacatgctggatgggatgacatcttccattacatgatgattgccagttgttctcaaagctttattttttttttgaaaactctcaaagctttgttaatgcaatcaatattcacaatcacaatgatcaaaatagttaaagctcagcctctattgattttgtacaatgggaaagctgtaatccttacagaaaaaacttgtgcgctaactgcttattaagtactaacacccagattaggggggtttcaaggttattctaaagaaatacctgaattcaattaccatatatatagtactatttgtctcactttaaagatgtttgagctgtatatacaacaccagaacttccaagttcttaatgctcaggtaagaaaaaggtttcagcctttcaggtcaagatgcattagtgtatacatcaccaaccagaaacaactgttttttttttttggtaagtagaaactactgtacttaggtaagtggactggcaattgtaagaatggtgagaaaattaattagtgagataatattgtcgaattaaacaaaaatatttatcacttttttaatgttgtacttattatatttaacaacttttacttatccttttctaaaatcggattgagaagtaggcaagcacatctcaattttgatgctcaacatacttgcaatgtcatatttacagtaaaaatatattcctgataaataaaataaaataaataatggtccttgtttgttggttacttgcaactatggggagaatcagtacgcaagtgatctaaatctaaattgtcatttcatggaacatttgatgatattgatgaatgcaataagccaacaatttcagctagtagcatgaatacaggcaaatttcacaatgggagtaagatcctctttttaggcaattttaaattaaatattagaagtgctttatataatttaacaatgtatgaaatcaatttttcgataaaatttaaaaccacaagaatttgcaatgactctaaactatcacaaatcttcttagtcctcatttgcaaggagagacttttctcaggagaagtcatatagggatatactcttatcatctgatacactagcaagccgaccaggccctccggctggtccaaaggccactccccaaacttggtcggcgtggttgctcattgtctggacagcagccctcatgccgatgtccccatagccgcactgttctgtcacttgaacctgttgcaatagctgtcccatctgggctaacatccacactcagcacccagctagagtgccccgacatggccccaacaagagtcttaccctcagcatcgtacatgtgtacatgggcatcatctgaggctgaaaacagcagcctcggttcggtgggagaatatgccagtgagcgtacaggcatgaaatggccttccaggtggtgaagaaacttggaacggccaacatcaaacacagaaatagttccgtccattgagccacaagcaagccgtcttccatccggactccaagcaactgacagaacaaacttcttgctgctgtttttctcagatggttttgctgcttcaggccgaggaatcgataaagtggcaaccaaattccatgtggctgtgtcccaaagcttcactgatgcgctgcccccgcctgcaactgctaggatggtgccctggtaaaatagatattgttccatgaatttttaaactgataactgttttgtttgagtaacaaggtttctagacaatccaaagctcagtattgttattctattactaataatgtcaaagaatatgtttaaaccaaatgcagacactcatccatgaaaacaaaactgaaaaaagcatttatagataaaacatatattcataccatatcaagaatgggttaattatgaactttcaaaccccattcctcaatcaatcttaacctaattgttcacacttcacacaaccccaatactaattagttcatcatatatatgtgaaaaatttggtaaactaacagcataaaatttacaaaataaacatattgaatttacacatggtgtaaatttaaggtcacatagtgtaattttaattttaaggcagcattaaaatttgtaaaataaccccattgaatcacggaatgttgcagttaaggtcaaataaaatttgccaaataatttttgagtgactcatcttgtgccaccaaagtggttattttgctaataaaatatgtccacgttattttcacaaaacactgagtttcctaaagaaagttattttcttctactctttagatatttttgtcaaaacaaaatatataaataataaaaaaaaaaaagaaaagtaatttgagtgttagtataccctgggatcaaattgcatttgccagacttcggaaggaggagcttcaagattagctaaggtgttattagtgtcgacatcgaaaaccctaacgaagctgtcgagggaggcggatgcggcaaagtggccggaggggtgagcggcgacggagaccactccgagacagtggccggtattggttcgctggaggattaggtcatctggcttccatagcttgacggtctcgtcgagggaaccggtcagaagcaaggcagatcgggtctccgttgccggaacccacgtggccgcccagatggactcatcgtgggcgttctcgaacgatttgagtcccgcgagtttcatagccagtaactcactgtgcgttgttttgttgtttgagggttttatttgggtattgggtttctgcttctgctcactaaaattgggcctcactttactgtgtaacttattaaacactttaaagtgaataaatgcataaagaacctctttttatatagcacaatatactatttagtataggatttgtaaacaaagtattattaaaagattatataatttgtttttaatttat

SEQ ID NO: 225360 - DNA, 5537 bp, Cannabis indica
cgactaagtaagttggctagtctgatgctccgaaaggaagattgaatgtgtagtcatagacttagcctaatagcactactaagtggttgcaagtttgaatccccttcctccaatgtccaaaaaaaagggaaaggaagactaaaggtgagcatactaaggtggaaaagctagaaatataggtggtgtgtaacaaagagctacttgggtttttataatagttgatgctgcctctcaccctattcaatgaaagtattctcattctaagttgataatcaagtatgtgaacgttattaccaagcttttgttgttttcatcttttcttaggtgtaaaaccctaattctgtaagcttatatatgtttataggaaactctatctttacttttaaacactataaaaatctttgctagaataaaactctctttatgcattgtgtgcccaaatttaaattattttgtatcatcgacttctagggagttttggtgaattggtagggtgggacgattcattttcaatccttgtgattgatttgcatttctcatcaaattttaacttttatgtttggtctgttgatgcattttttctctttctttagttgatactttcccttttatgttcaacatttttactttgttgtgtacatctttcacttctctagagctcaagatgacttttatcgaggttgtggacttatccaatgatgatgaacgtggagagttggatgtagaagttattaagttaaaaccacatttggttcggagtacattgcaatcagacaagaatagtaaagtccaattgtcaaagcatcaaatgttgaaaaccatgtattcaagacatgaaagtgaagtggagagcccaaatgtttcacgtactagtcatagtatgttggatcaaaggcaatctccaatggaaaatgcatgtctttcgtcgacattatctatgtcttcagcacctatatgtcgacaattttggaaagctgggaactacaacaatgcttttggttccaaagtcgcacttcaaagtatttcactatcccctattccattttgtcgggaaagtcatgctatatttggtagagctgaagatttttatatagtaattcttactaacacctttaaacttcgatccaagtccaattttatctgtcttaaaagaaatgccacaagaacttaggttttataattagttgaatattttgtggatataaatttccatagtatatatttagattataattttaatacttgaagaattaggtgtagggttatggtaaattcataaaatagctcattacactttagagtcatgaagtatacctagattaactctactttgtgtatgcaatagacgaataagttaccctcaaattttccatgtatccatttattagcatgctatttttctttgaaattttacaagttgtgaacttatagttgtattttatgagtttatttacatttgtgactcctttagtggaacttaatcctattttattttgatggttatccttcattttgattttggcacttctatcctgagaaagtattctagttttcctgctttgattttgaagtatctagcgagttatgtcatatgattccattatgacctctaggttatgaatgcatcccactcatttatgttatgctttcccctataagagtacttgataaacaaggtgtggtcaacatagctctagttaggcctttgtaaatctcccaagctaaacttttgtagattattttagtttgtttagactttctcattatgcatatccttgccttaagaatgaccttgttatgtccgaagttaaatctatacaaactaattcttcaaggcatccatttagaaatgcattcgtaacttcaaattgatgcaatgagcaatcaaggtttattgcatgtttaaggagaatactaattgtattcattctagttactagaacaaatgtctatcagtaatcaatatcatatgtctagtatatcgtttcaccccactgcttgaatttgatagcgcaaatctatttgtaactgacttttatttttttccatcacgtagattcaccgcttcttagttaggttttttttttccctaaagggccttcatttcttcatctgtcttcatgcgtgacagctctccacaaagttcttgtatattttggattgaagttaggactaatgttgaggtcaattgagtaataaatgctcgaaattctggtgaaggatacaaagtaagaataggatgtttgttgagtacatattctcacctccttcctgacaacaattcataaatttagatctttcctagaagctttgtttagttttcattacttgtcttatatttgctgattgagggtgtagggtagtcttatgtatctccttttttttatttgaggttttaggtctctctcgataagttatttgatgattgaggggtgtagcctgtaggttagtcttatgtatctcctttttctatttgaggttttaggtctctcttgttaagttttttatggtgaagggtaaccactaggttgtacgtgttgaatagcctatcattattctcactagattaggaattagtgggataagttgggttatacttggtttaaaatccaaaaaagaaaaagtggatgcaatagaacctagacctttaaagattggaagcattgaagattttaatcgaatatggtcttatggagcttatggttcggtaatatacattatcctccaaccttcttgagtaaagaagtatgttaggaaaatgctgtaagttttgtaaatcaaattttcctcgaaggtggctagttgtatgttacacctactaaggtagaattttctttcagaagatttatgcaaacattcaagtagttataaatcaccgacctatcttaaaaaattttagagtcgatttccataggaacccattctatggtgaccactatgcgacaacccactctatggtgaccactgtgcgacaacccactctatggtgactcactacgtaggaacacactctatggaagccatttcgagctcctcttaggttgcaactttcatcacatgtcctattagagggtgttggctttgatactatttgttacaagtaatcccatacttagttgatgtggaatcctaacaaattcttatgaggatatatagcgtaagtaactcatgcagccatgaatacatttcaccctaccaaaattttctactttcttttctagattagtgaaatttgttgttaaacagcacattaaaagattgtgggatcacaattggaaaacccaagttcttagatttcctcacaaagattcgattagcattctctttactaactcaatgcaagtcttttgttaagggtttttttctttttaatgaagttacatttggattttgcatttgtgacctcttatagtgattgccatgtacaatgagctaaataaatatgtgtattcgtacatatgggctatgatgaaaacatatgataattttttgtagtttttttggtttggatcacatgtacttagggctttatatcaaactctcaagtgaatgttttggaaagcataactttcattgaaatcctatgatgacataatgtggatggttgattaaactttaaagttgtataataattaattattctacatgattgtcaatgcttattacatatctttaacatttactttgtggattgcagatggaaaaaactatctacaagtccaccctatgtttcttcattccaatgccacttcacataagtgggcatttggtggtattgttcatatctatgaactaaacttgttctcatttataaaaagctactttttatggtgggtaacagaactgatctcacttgaatttaatctgtgcttgcagccatagcagaactgctggacaatgcaattgatgaggtaagccttaattgtttaacttgtcttttcttaacattgaccctctgaattttttatttaattaatgaatcaatggacaggccataaatttgataagaaaaaaaaattaaatttagttgtaagagttggaatggtacattttatatttccagaaagtttaagattgtgtagcctttaaggcttattttatgaaaggagtgttttcacatgggtttagtcaggtgggtctttggcttatttcttttaaaagttgaatttgaaacatattaactatgctactatttagtctctactttaattaataacgaagttcttgaatatgatattgttttctgaaaatattgagtagttcaaacttgacagataatttttaaacttcattctttgtttttctctaaaaacttggatagatccaaaatggggccacttttgtagctgttgataaaatattgaatccaagagatggaaatccagccttgttaattcaaggtactgtgtgcaatctctatctaggaataaagtgtagtttggaggcattgccttgtttttgtacataattatctttttggtagatctgcaaatgtgttgcgcaattcattgtttctaaaactgtgtattttaattagatgatggtggtggaatgggccctgatactatgcggcagtgcatgagttttggatttacagtaaagaaatcaaaatcagcaattggacaatgtacaagttctacctatgtttattttcattttttttttgtatgttattcaaattaattaccttatataaggttttcagatggaaatggcttcaagactagtacaatgagacttggtgctgatgttattgtcttcagtcgccacttgaataatgggttcgtccaattttaatgttattaaatttccaagtttcgcagttggacaaagtacatctccttaccttctatcaaccacgaccttaatctgtaacgaagcatatctctaccttttatttaagggatattcttctttttggttaatgtaggaacccacttttccattatatattttgtagtctgtgagttgtgaatatggtgtaggctgtagtagatgtgtatgatattttggaatgtcaaatatatgttatttctcttctgaaagttagatttggttatactaaaaccttgcatttagttcaaactaacattcagcagcttattgtgtataaattttggtcatatgaagaattatatgtttagctcttatttctgtgggcaggatattgactcaaagcattggtcttctttcttacacgtttttaagaagaacaaactgtgacaggatagttgtaccaatggtgagcttcattgcctaatatggcatttaataggcctctttacttctatgaaatcttgttgtctaacatttactttgtattttcctttttttttttttgtaaaaagagaaagaggcttttgtctaagattgacccctcccccgttatatatagataacctcacttgtggcggaggaataccatgattacaagttctatatcataaattatttaaaataaaatcagtccaaacattcataagacacatcaggacctattaaacaacattgcacaacagtctccaatctctattcaa

SEQ ID NO: 225361 - DNA, 3239 bp, Cannabis indica
agttattatcttccataaaatttttgaacttttcaaatataatagtcttaaaaaaatgtactatctaaattttaaatgtattaattaaataaaattcattttgtcaaaaaaaaaaaaagaaacaaaattaattacaatatgctgattaatgcaaacaataaataaaattacatgagtaatttatgatttgtgcaacacacactatacaaagtcacaaacttaacatttagatttatgtagcaaaacataactgattatctttatttaatataagtatatggatgtaacttgtttaaaaataaaataccgtaaatataagtgtacatgagacttgtgttgtgtgtgaatatatcatttcgcataatacataatacatataataatatcacttattagatatatgttagtttagttatcagtggaagatgttgtatgatgtatatgtgatgacagagatgataatatatatatatatatatatatatatttatttgtggtataaatatgaagactgaccgtccatgaaccatccaccgtcggatgaaatgtatgatttagatataacaagatcgagatctgtcaacacttggaccatctccagcaaaatcccatctttgtttgcactatcaacctgaaatatatatatgtatacattacagtaagaattgaattccacaaacctcttctgtttgtttttgaaaggttgtacgtagaaatcgtaaaggttgttggtgagacagctattttctagtttttttttatagaaaggtaatttgtaaataatgataattataataatatcaatgtaaatatctattatttcaaaaaacaattttttttttccttttgaatatctattattattattatgatacgtcattatctgggttacagaagaaacaagaagttttaattttatcaaataaaagtaaaagaaagaaggaaacttctccataacactataataaattcatgataaaatatttactgaaaaagacgtattcttctttgttttttttctctcttatttaattgtgttttcttcataatttccttaattgagttgatatctaatggttctccactgggtgagtagtgtatatatattttaataattttattaggtaaaattataacctttttttttaaaaaaaataaaaattatttgttgaagtgaaattatactatctaggaaacatcgatattctgatgaattgaaataaaaaagaaaatccagcaaaccaaagtatctagcaataaaaaaacatagaagaaattattaagaagggaaatacctttataagtgtggaatgtgaacatgtatcattgtctatacaaaccctgaaacgaacacaaaaccaaataatccagataaacaaatatatatcgtcataattgaatcttttgttttaaggctaagaattaaaataattgagaaagaatacaataaatcaaatattatttaccttggagggtacattctttcatcgagaaattcataatctggatcaatataaggctcataaatcacattggtctccatggctctcttctctgaattactcattcttagtcgaattctcctcttttattaatcaccagcgatattgaggagaaaacatcgctaatgttggcttgatactattcacaaatacgatatttatatatataataattataatatgaaataaataatattaaatcacatgtggcaaattgatatttattataaaactaaaaatatataataaaatataaacttgtaaaatataagtgatcacagccgtctatcttattatttaaattatatgcaatgattacgacacatgattaaataattacttattttgaattattattattattattatattaattaaagaaatttctcaattaatattagttagcaatagctggttttgataagaggaaaaaccacccgtaattatgtggtgatgattatctaaaaaaagaacgaacgtagtttctaatagaaaacgatatgtgcatgtttgaccacgaataatgagattttagattctaataagaattcattcaaataaagttatatagctgtgttatgatgatatatatttaggaaaatcttcctgttttttttttcttgatcgacgtacttaaatataatatagtttcaaaccaatcagaaatttaggatctgattacatgtattaatttaatttgaaatttgaattaaagataaaccgatgcatatctaattaataaagaataaattaattaagtgatgaaaaacgttaccttcgaagagagagaggtagctcagaaaagatggtagagatttcttctgggacataataagagaagatcaaattgatctagagtagaagtagagttaatttatagataagagtttatttaattaaaaaataattacaaagaaaagcttatcaggagagaacgagaaaaacgttttcatggaaaaaagaaatacgatcatatatatataaagggtaagagataggagcgaaaaagaaggaaaatcagtcacggaagtagtggaatcagtaatactatttcttccacccaaacccagaaaaattaaatatataatgtggttttatatttgatttatttatatagatggatattagtggaaatgtagaatcaattatatatcataacttaactagagaaataagagatgagtttaattttggttttggtttctgggaaagacaaaactaaaatgaggatctgttttaaggtttttgaaagtttcctaggagaatgggattgaagcgtagtaatcatgaattgatgagacttttggtagagatttgccacgtacgaattgggaagtcacatgcgtggagtggaactgcggcgggtcgtttcttcagggttacaatcaacacgtgggttttgtgggcctgttgttctcaggcccaaactactggttgtctgtcatctctaatctctatcagtatttgatgttttttttttattactattttgttttggttagtgcttagtcagctataagtggaaaggatgaaagagattggacccactcctatccaatgggggaagtcatgactcatcctaattgcctccatcggcatctaccacacaccacacatctgtaatcaaatcttaataagaagctgcaccatgacacgtttacatgcatcacatatgtaacagggtctttctcactctttgcactgtggctgtggcttcaccttattattattattatt

SEQ ID NO: 225362 - DNA, 2249 bp, Cannabis indica
tgcctttataaattttgaaagggaataaaactcgatcccttgctgtaattaatttttgggtccatatatgttatatttaataattattataaaaaatttctagttatttgcaaagcattatctcatgatagctaccactagcatcatttcataataggcactactatgcgtaataacaatgcataattcattattaattaatcaagtgactattatgcttctcttatatcctcctgagaattagggttattcatacagtttgccatatgtgattttaaattttaaccaattttgatcaaattatttgagacgagaactagtgaataatggtgtcaatagtttggtgcattcaaactgtttatgattctctagttcaatcatagttttaaaattatcattagtgattcaaaccaaacaaaattgtctaattcttttatatataattaatatgttgttttggatgtaatattgatatttggtgataatttttatgcattctagcactggaagaaactagattcttattttctaagtaatttgctaatacgccgatataagtaccttttattggcgtttcactagtgcatttcacgaactgtactagctaaaaatgtcatagtttttccagcacaaaattataccgacaaaaatagtttttccaagtgcaactcgtttgcgtcagcatttcgttcagtgtaaacacatttttcttagtactttttaaaaatgccctagtaaagtttttttgtcacggcaataatataatgcgcttgtaaaatttgagaaatatgttttttggacttttgccaacgcttaaacatgcgagtaaaagttataaacacgccggtaaaagctttatgagattagaaaaataattttaataatatttttagattttatttttaaaattttgtaattttttataattatttcacatgatttttgttataatattaataaaatatataaattttggtaatatctatttaattacttaattaaatattttgatttatattttaaattattatttataattattttctaattcattcactattcattttcataaacataattaacaatttaaatagaaatattgatcaattaaataagactaataaggatttgtattaaatcatgtcccctgaactttgacatatactaaatcatgcattatgaaggctaatctctcgagctttgacataattagccacctcttgaaggctagccatactcttctcgaaagcaccaatattttcgttcaagtcagccacctaatcttctacgacaatggcacactcctctacagctgagagcttttcaacaagctcaaccaccatcttcgttgtgtaagcataaccaacacaagcctgaaaataggaagacaaagttaggtgagatgataaataaaagaaagctagttcaagagaagacaagaaaaattattaccccgaagatatcagtgaagcatctttgagaaaatacgtgtgtaggtttggagctaaccaacttctgtaatggaatgttcttagccttagatccaatcaaggcatcaccattgaaaagaaactagaagccctacgcacgaaccatgctccaccaggtctgaaccagagtttggaacaccattatcaacttcatctggagagatctcaatgggagatccctcattagctccaacaactctatacttcttcttgttagggtcttgggcagggggaacaactttatcaattttacttctcttccaaagtttgttcttcacaagagtagaagaaacagctaggataccctaaacaacctccctgactggaggttcaatctcctttggtagagtaacttttctcttcaaacaggtgtccatggcagcgaagaaactcatgttatctatagaaaagaaatggcaagtggttagtacaacagaagaaaagcaagataacaaggtataactaccgaacatgaagcatcggcaaattgttgattccctaactctttctggaatagattgagtagaagtaacttctttatcatcccggtctgaaaacaaagatattctccctcaatatttggagtcattttgaatagaattctcatactctgacactgtcctagacaagatgacagttacactctgaccatcttcttcgagaggcatcgtccaagagtcatcaaaaaagcgagtgtctacataaacttgttgacaagacattatcaggccaactttgcagagatttttagtggtaaac

SEQ ID NO: 225363 - DNA, 5389 bp, Cannabis indica
gtaattttaatagtagtcttatacagtctgacatgaagaaagccacgtagtactcaaaagccaaaaaaccatagctagacataaacaaattaattaaaaaaaaaacaagaaccaaaagaaaaagaaggaaaggaaagaaaaaagaaagaaactgaagcaagaaaccttagttagcaatttacgtaacaatactataaacatatgaaaatgtaaatctctatcagttaaacttacacagataaaaaaatagcttattacttagtaataattaaaagtaaattaagaaacaaaacagaaaagaaaattatacaattaattgaggaaattaaagagaagaagtttggttcaaatatcaactttacaggcattagcagtgagaagaggaacttggcccataacacctttcttgaaacccaccaaaacatcacacttaacataaaccccataatgagcagtcttaatggccccagctttccatctaagcctccctaacagaaccaccctcaaccccaaaactccataaccctcgtccaccgccaacccattcaacacctccaccgacaccggaacctcctgtccgccgcccagcaccggcgaaagcgccaccgtgctcttcctcgcgtggtagagcggcggcagcgacacctgcggcgttatcgcctggttcctgtacatgaggaaggcggtcagccggtcgtagtaaatggacacgcgcctgttggggttgcgcgtgacgattgtgaattgcatggtggtggtgactagcggcggctgctgcatctgggaagaggtggtggacgttgtgttgagctggtagatggcggcgccgactactctgaattggggcttgtaggggcggtagacgagccatagagtgagcgctgtgacgccggctaggaggaggaagacggagatgcaggagcagagggccctgcgggggtcgctcgtgcttggggtgcctttttcgtgggtcattttttgtgtttgtattggaggtggtggttgttgttgttgttctggtgcatgctcttctgccatggttgaagatatttgagtgtatatatatatgtgtgtgtttgtgtaaatctacagtaaaagtttgtgtacgtatgaaaaagaaaaaggaggtggttagtcttagtggtggtggtagtggaagtgggcgagtgtgtattttacgagagaagaagttgaggaaataagaaggagaagaatccaaatggaaccaaaaagcagtggaaaatagaagaaaggtgaagtgttgggttttactttattggtaaactagtataaaatagtgtactcttctctctctctcaaaagctcttttataatttagttgtaaaattatacatgaattaatgatgatagaatttgtacttaaaatgaatagttcttaattttctaaattagtattgtttggttttaataattttttgttcaagtatttgtttgtgtagagaaagataatcgttcaatttgtcatttatgaaaaaagcctatttagctctcgtcctcgatgtaacagttcattggtactataacggtagtactggtggtatacttactatatttatttattctcaatttattgccaaacaaatttgctttggggttaagtattcttgaaatactttttaaacttaagtgtgcttatatattagtccacttttcaagtgggagattcctttaatcgatgtgaataaccctacttccttttctttttgtttttgtttttccacggccccccttaacaatttaatagactctttagtttacattataatttaaatattctttaagagcatttctattggcactagtgatacttaacacttttaagatgtgtcgtcttactattagttaaagatattttttaaaaattattatattaaactatatgaaatttaatactaaattaaactaataataatattgacacgtagtaaaatatttgactttttagcatttgtgattcggtaatgactagtatgagattttcaaattgaattgcactacgcccatgatccaagactaggtattatatgtcattgggaacatttaattagtttcagcgcgttatccccgagccttgtctcccaaaccttttaggtactgcaactttaatctgttatataaaatcaaataaaactattatgtaaatgatatagataaagttcattaatcattcattttaaaattaattgagtcccacgttttatcagtcattgggaaaagaaatggtaatggagttggccgggcccgggctttgccgacaaaagtataagaccccttatttgactcctaatacctccaaatgttctcatctcgatcgactgttactacaaaggcccctcggccctctctattttggcttttacacgtttctggacacttgtggggtcatgcctagtcagatcccacgtgtcacatgaaagtgtttctctggttataaaagcacacgttgcatttgcatgcatttgctttgctcctttctgtttctactttcggtatatatttctttcaatgataaagttaattaagcacgatgatctgatgacagcatgtacatatatgagtacatctcatgtacacgtagcattaaatatgtagctatgaattatgaactgatatataatatattatcatacattatatatgtagcattacagtaattactagtatctggtactaaacaaggcctataaatacaaataatccaccaatcaaataaatctaagttgagtcatctaaattcagttactaagtagttataacacaacctttaaaccttttcaagccaaactaaaaaaaaaaaaaacaacgtcgtaaaacacagccaaaccaactagcaattccgaaagtgatttgcaaggttacaaccatctttgatagtcattctcgtcactctacatcctactcctagtcctatagttaccgattgctttgagagcacaagaaccctacgtcaacttcaacgctattgtgtcataaagcaaacgagagcaattgatcttcacgtactattaccaattggagggtcagtttgtccttgacgaacaaattgtcctttcacccggggcctctgttctgccagtcttttcctgctctgatatcgaacctgtgtaaaagaatgagccaatgtttaggttccaatctcgaccctttacagagatgacttagtttgtgatcatttgaaaattttcaatagcacaacagtgaactaatgaacactgataatgacaattaaaaacaatggtaagtactacgaagtagtagtagtagtagtagtacctttttctcaaagcaacgatctttacgtttcattcgaaatttggttagagctgcttctctctgactcatgcgatgcaaatccatccctctaaaactttcataaacaaaatgtccattgtcgttcagaccacgagaagtggtggttttctcatcagccccggaagaagaattggtgtttccatcgtttctaccacaagagctgccatgttcagcactactaatttgatctcccactccatcgcaaaaaactaccaccatggctctgatcagcagcagcaaaagagctaggcttcacttcctccacaagatcaaactcttcttctcttgcttggtttgatcagaagatttatgagttgcttcttcagaaagttggtaacctgttccgagtgttgacttgaggtatttgctgcaaatggagacttctctcgctgactttccgaaatgggaccccacgtagaggatacacttgattgtgtataaaaggatggtaataactggttgcctccagaattttcatactttagacccttaactggactcattccaagttgaggactggggaaggacacagtggtatgcccggattgcccagcaaccgaagccggcaaattgtagtgactaccgctccttgtggcagcatgctgtggagaagaaccggtggagctaaacgatggagtgaaaattaactcaggagatttctttggaccctcctttggggtaatttcagtgttgggaagagtgggaaaaaggggttgcagtgtattgctattactatacctgcagaagggatacaatgattacatattcaggaaacataccacgaattccctcattttttatagatatatatatgtatatataattcagtactcttacagttccacttaggcctttcttccatacaattcatcagagacaaggaaaccttccaagcttaattatacagattcttctgtggtaaattcttaaaaagcttttttataattaaatggcacacaaaagaaaataccaaattcttgttcctctgataaagtattgagaacataacaatggaaggaaggtgaggctctcttgaacctcaattaagctaactaagcaaatcataaggcgtctaaaagtgatagagaacgcaccatgaaaatgcagaggcattagaatggttgagttttggcctttcaccagtaccttggctattcgagttccttggacaaattcctttcaaagaaagttccagctgtggaggatactcagagatgcttatgcactgatcatccgacttatcagtgcaccttgggtgatcatcaaatgtaccgatcaagtcaatagctccacaagagggtttcaccagttcgtcataacaactctgaatattggcattagcattgacttcacaattttcaggctgggaagtttcgactagcttcattctcttattgccaatgtactcttcctttaatcccaagagagatgacctaaaagcttcattgcaagatacaacctctggtttaaaaaggtttgatttatctgcagttaaatagctattagctgctccactcaaaaaaaaaaaaaaaaaaagaagaaaatacatgagcacagacacagagtgggaaacaaaaggttatggcatacctccttctgtcttgttttcatgcattactgcttctttatttaacggagtacaatcttcgtgactctttacattgttcctgtcaactttagaagaattcccactccttatctgtgaaatatcttgcatattttggacgtgctcactcttagcttccaagtgaggcattgtacaagagctctgcacaacatgggaaaacatgcaatctcttagcaaaaacttcatgaaatcagccttcagtggaacaagaaaatttccctcaagctaagtggccccgctttcatattaacttcgacatggatttcaatatctatgttctaaccattaatttgtgtcccttttaggtccactagcaatcaagaagatatattcaaagttgtgaccgtaattagcaaacaagagggaaaacattttgatactctaataatgaagaaacttgataccaaagtggaataactcaaatggtca

SEQ ID NO: 225364 - DNA, 2536 bp, Cannabis indica
gtcatcatcgctcccgcaaacccactcagcaccgagtcagaaatcgccagactcgtccagctcagcaaaccgatcatagcctttgccacgtcagcaatcaccactaagctggagaatctaataaaaaccgtagtttcaatggactctcccgagttcgactcgctcatgtcgacgagttcgactcgggaactgaactcggtactcgaagtgagtcaatccgacgtggcagcgatcatgtactcgtctgggaccacagggaaagtaaaaggagcgatgttgactcaccgtaatctgatatcgctcgtggcgagctacgacgcgcatgcgtggcgcgtggggaagacgaatccaagtgttttactcaaaacggtgccgtatttccatatttacgggttctttagctgcgtgaaggcggttgggatgggtgacgcggaggtgataatggaaaggtttgagctgagaaaaatgcttaaggcgatcgaggaattcgaggtgaccacggcttcgctagtgccgccgattgtggtggctctggttaagaatactgctctaacggcggcttacaacttgagctcgttacaaacggtagcgtgtggtggctcggctcttcggaaagaggttattgaagctttcaaagctagattccccaacgtagttctagctcaggtttttattaattaatacttaattgattaatgttccattttttatgtattaattagtatctaaatgtgtgtttggtttaagggttatgggcttactgaggtggcgggagcaattttccggccgttgaaccctgaagaaagtgtgcggtggggttcatcgggaaagataacagaagcgtttgaagccaaaattgtggatccaaaaacaggtgaatctttgcctccttgcaatgaaggggagctttgggttaagggaccctcaattatgaaaggtataatataaaattactattaaaaagattatttttttatattaattaaaacaatgtcataggcgatccagccggccataatttaatttattaatcatgcatacatattatatgaagggtgggatgattaggtacgtaggtttctcaataatgccaattaattattatagtacaaataaatattagttagtggagatatacattgtattatatattattataataataaataaataataatataggttatattggtgacgaagaagcaactaaggcagccatagtagaaggaggtgagggagagaggtggttgaagacgggagacttgtgttacatcgacgatgaaggtttcctttttgtggtcgatagagtcaaagaattaatcaaatacaagggatttcaggtccatattattccaaaccaaaataattaacctagctctgattttatttttatatatttatttaaaaatgtaacacctagtatttatctgaattatttattgatggtacgtagccaattattgatgatgtttttactgtttcaggtggctccagcagagttggaacaattgcttcagtcccaccccgacataattgatgctgctgtcataccgtacgtcctctataataattattacctaaatatctttattgagaaaaatataccaaatatgcttaattttcattctagtcaaattttataaaataaaaataagatgcttttgtttttgtatttgttttattataaataaatattataattttaatggactaatatattttctaacttaaataaattaagttactaaaaagtacatcgatcctaacaaattgtaaaaagttacttaaatataattaatttctaataatattacaagataattatatatgcattctaaaattaagacacattttacagatatccagatgaagaagctggtcaggtaccaatggcagttgtggtaagaaaacttaaaagcatccttaaggaatcagaagtaatgaactttgtggccaaaaaggtacaagaatattttataccacatctctaaaaaaatatatatatccatgcaccttatagtgtttttaatacgtgaataagtataatcttaattatatatataaataatttagttatttaggataatttataaatttttgagaaatataatatgttacaaaaattagattcaaatactttattttattgcacatattttttatgaaataaagtgtttgaattctaattatttattttataaaatatttataggatattttaaataataactgcaaaatatattattatatataaaaaatagaattaaaaaaaaactattatattattagtacacttacttataaaagcaccctatatcatattaatatgtgttttattaaggtttaataaattgtattaattgacttaaagatgtattatatatgcatgcgcaggtggcaccatacaaaaagataaggcgcgtagcatttgtggattccatacccaagaattcttctggaaaaattttaagaaatgagctacgcaaaattttcagcccacgccaatctttctctagattctaattaattttttttt

SEQ ID NO: 225365 - DNA, 2565 bp, Cannabis indica
aaaaaccgtaaaaaatattaaaaaaaaaatttcttaaaaaatataaaatattataaagttttttttacaaaaaaaaaatagtgactttatgtaaattatctattaattttatataagtaataatttggatttggattattataggttgatgataaatatcaatactcaagtgatcacaaagatattagggtacatggttggattagttcaaatccatctgtgggcttttgggtaatcacaccaagccatgaatttctcacagctgggcctatgaagcaagagctcacatctcatgtcggcccaacatcactctctgtaagtttataagcccaatacttttttctataaaaatttgtaaatatgaacaaaataatattaataatgggaaaaatatatattaaaatgtaggttttcttgagttgtcactatgttggaaaggatctaatggtaaaacttgagaaaggagagacatggaaaaagtttatggccccatttcaatttttcttaattctgcctcaaacaaccctaatcctgagtcctcattatggaatcatgctaaagcacaggtatgtatatatacatgatacacacatatatatatatatatatattattagtgattgtatctatatatatggtgccataattgaacctacattttaatgtttatcaggcagaagaggaagttgccaaatggccatatagcttcataaattccaaggactatcccctttctgatcaaagaggaagtgttataggtcaattgtttgttaaggataggtacatattttttcaatctctactactaatatataatctaaatatttgtaatattcttgtgtatgtatcagtaatcagtatcacttacccttttttttgtcccttttctttttttaggtacttgaacaaaaataacatacatgccaaatttgcttatgtgggattagctgcacctggaaatgctggttcatggcaatgggaaaataaggtatatacttattaatggattttcactagtgatattattaattgcacttgaattaataactaatgtgcataatattttaggggtaccaattttggagtcaagcagatgagaaaggaaatttcatcataaaaaatgttcgaccgggcaattacaatttatatgcttgggtccctggtgttataggagactatgtctactacaaaacaattactattcagccaggtatttaataatattaatatataaactactttttaattgtctagtcaattttgttattaatgtgaaaaaatcaattaatgcagggagcaaaataaatttaaataatctactttatcaacctccaagaaatggacctaccatttgggaaattggcattcctgaccgaacagcttcagaattttacgtgccacacccattgtctaatgtcacaaatagactcttcatcgataaagaaagtcataggtaaacttattttaagaataattattatacatatatttatatatataatatatttgcattataattaactttgctgtggaattattacaataaatataggttcaggcaatatggtttgtgggatcgttatactgatttatatccagaaaaagatctcgaatacactgttggcgtgaatgattatcgaaaagattggttctttgctcatgtcaataggtacgtacttattattcatcataccattattaattataataaatttaatttggtaataaacacacttggtaataatattgtatatcttggtaatagaaaactagaaaatgggacataccgacaaacgacatggcaagtgaaattcaaccttgaaaatgtggtgcaatccaaaagctacactcttcaattagcattagcttcagcaagtgcttcagacttacaggtttgtatatataaatattattattaattaaaaatatatattatttaataatgaaattaatttatatgtatattatttgtttaggttcgaatgaacgagcgtaatacgtatagtcccatattctcaacacatttattagggagagataattcgatagcaagacatggaattcatgggacatattggatgttcagcattaatatctctggctattggctccgtcaaggacaaaatatactttatttgacttcatcaagagctttaggtccttttggaggagtactctatgattatcttcgattcgaagccccatctcaaacataattatttcactatatttaattaattataattgctcatgatgaataagtttaatattatataacttctattgtgtatttagtacattgaacaataatggcaaattaccatactgataatttatcagctgtggtataaaaattttgtatcttcagtgtattttacttctttgaattattctgacatttgtaaaagtgaaatttcatattttataattactaaattattatttaatgaattaattaattaaatatattctgtgatattaattaattaaattaccatactcatgaatttttcagtggtatattaattccttattttaatttatctaattattatttaattaatc

SEQ ID NO: 225366 - DNA, 5658 bp, Cannabis indica
gagatcaggctggcagcttgtatttgtagacagggagaatgatgttcttctccttggtgatgacccttggcagtaagtccccatatttaataattcagcagtttgtatggttatctttaaaaactctggttcactatgcataattaaataaaacatggcagagcttaggatattaattctgtttgctagctcgacactgaaagtagttattctaagagtaggtgcaggcttcagcctttcagtttttgcaagtgattttacagtagtggttgaattaatttttatgttattggttgggtcatgcattttttttgttgctggaaatggtattaagtgtttagtcacttaggctaagatattgtgtgaaattgagagaattgtgcctttatggcctgaaatagttcgttcaatgaatactttatgaaataacaattacacgatgactggttttttctttctgcaataagtgtaaagaggttagaaatctacatattcaaggttttcaaaaatgaagaatggctgtgaaaataagtttgaagaatgcattgacaaaggtagtgtgaaaataaaatctccgaaaattgtgcatggctcctgaagaatgcaaaaatgacgtaaaggtgccttgttcagttggcggcttttgattcgtgtcgctccatttaacatgctgcaattttgttttctattctattgattttcttagaataacagtagagttgtcactgttgcatgatgactggggaactattatcataattttagtatgcgataataatgagaggtcaaggcatctgtgtattcaatttttgtggattactgaatttgagttgagtatgggaagataagtagtcaggaggctttgtgtgcatggttccttaagcatgcaacgatgacataaaggtgcctaatgcagttaaagatttttgatacaagtttcaatttatctggttggagtgttcattctatggagatatcactgactagcagtatacattggaaagttacgacaaatgcttaagattggggagttacaaaattaggaaaattaggaaggtacgttgggagatttgctagatgcgttgcttcatagagataatggtgactgattgtatctccaggtagcattgcaggattgcaaacaagattttatgtagggttttaatctgattgtaggatcgtatgactgagctttatctctgcagtgtcaaatttttttcattttaatagaggtttttattggaaatgtgtcaatagttttcgtggcactgaaaatggaaaatgagctacgaatgaaattatgtgagctgctcagacggtggattgaattgtttcctagttatttttgtaaatcatgatcttggtgtttaattagtgggaatgcgtacagttcaatgtgtatatttttgctagtacaaggtaggtacgatgtgtgtcagtcacatcaggatggtattgaatttggattgtttatttgaactataaatgaggtgggtgggtgtctagtgtccacttcagaaacagtaagaatagggtgaataaatatgtattgttccttcctctttaattacagtatgattgagtgtcttgagccatgtggattgaatgctttaccctccatcataaataatagtttcagtttgagctttaacaacacgtggcattgaaaaatgtgtgtacccactgtttggtgggttcttcttcttcttattattatttattactttcaactctattaattacacatgttattaatgttaaatgataaccttttttccagggagtttgtaaacaatgtgtggtacataaagatactgtctccacttgaagtgcagcaaatgggcaaagaaggcctcacccccggaagttctgtctcgaaccacaaggtttctaatagcagtaacgcttgtgatgactacatcaatcgacaggacctcagaaactctagcaatgggattccatcaatgggcaaccttgactactaaaaaaaaggcaatattttcctatggaaagctttattttagatggtcggttgctgttgaatgttagtaatcaccttattctactagtacccactttttcttatgtacggataaaagcattcttttttctttttcttattttactttctgtggtcagtgagatgtagtgtttgggctaattatgtctattttaaaatttgcatgtcagcttattactgtaaattgtaataggatggataccttcctggtttctgaaacttctaccactatatagctctttagaacaacaacacgtatccctcaagagaatgattatcttgatggcagtttgttttgctatcttgtctttgtaatttatatgaggaattttaatacttatatctcgttatattgaaccaaagacacccacttgttatgcttttttcttttatactcgtgattataatgactttgtctgtttcgaggtcaactcttgattgcttgtaatgtgacatttcttaggaaatttattgtagtaaatagtaatgtgactggttgtgagcccacctaactgtttaaatgtccttgcttgtcacctatatgatctttttatctcacgtagtactactatttgttgctttttacaagttgacccttctcatgtgtatctggtaactcgatttaatgtatggtgaaatctgtaaatttcttattttgttctatttcatgcataataatttaacaaaaatcagctttacatgtcaagatccaagctagggattagctttgagattcttaatatttatttgtatatgtacatatacaatacatataagcagatatgatctgattctaatcagtggtttataagtgctgatgatccaagagttgacctgacaacatgcaagctgactgcatgaaccaactgacagcacttttctgcaattaaatagcacttggctttcacaattgagatgaagaatttcagtttttactacgcttactcttctgagtttaaattgggtgtaagcctgtaattaaagacagcaatgtgaaattagatttttctgattcatccagccataattaaaggatcaaacaatcaattataatcatactattgtattattgtttcctattcacgtgtctttatgaaatcattattggttttgcaagagtgagaatgttacttaaattgaatttaaactaaaacaagcaaaacttctattctatccttaataagaaaaggctatacctttacggatctaaagaaagaggaaaaaaacaaacaacaacaacatagaattgtagctgaatggaaagaggtacacactatgaaaactagataagggctacaactgtaggctgcacctactactttaatttaatgatgatgtgtttacttttaccttaaaaataaattaaaaaaaataaacttgtattttcagtcaccgtctaaggacaaaaattaacctataataaacaagctattacaatcttgatatccatatttcttctactacaaattgacttaatatatttaatttcacgacaatatatgtaaccaaagatatgtggtgtggtatcgttgtcgtgtaacacacacacatgtatttatatatatatatatacacatatttactacactaattcataatatcttttacttgattcggaaggttttaattgtagaaagttatagctagaatcgtgtgaaaatggttaaaaccaatttttgtgaactaaagatacctaccttccttctatagttctattattgctattgctaaatttattcgttttttttttctaagagaaacaaaaaaaaaattgtcaaacgagagagagagtgagagaaagagaggatggagttgcagagaagagcatggttaaggggcatatgggaggccttgaaggaaatccttttgcagagagtcttaacatatagacttcgttcttctccacttattcttccaaaccacttgcttaatctcaatgttattgtcactggagccaccagcggtatcggcctccaaacagccaggttctctctctctctctctctcttcaaaacttagtaaccaaaaatttagagcattacacttctctttaattgatatactatcatttatgatcgagaaaagaacaaacaatgtatagattcttcataatgggtggcctaagaatgcagaatcgtgtgtgaaccaatttcacataatagaaaattaaatcttgtcaaatatgtcatctcattatacttcattgtatgtaaattttgttttaatggttgttttttttatttatttttgatggaaataaaaaacagagagctagtaatggcgggtgccaatgttttcatggcgtgtaggaacgttaatgctgctaatgaaattgctaacaagtggaaatcagaagcacgtcagcatggcaggaccattaatgtaaaggtaactacactttcattaaataaatattaaactttttaaagccattttcctaataaaaaagaagtgaaaaaaagaaaactatggctgactactggctactctgcctcataaattggtgcaattttgaagaaatagatggctttattaatgaattaatattattattattaagattcaactaaaccaaaaaaagtaatcattttaaatatcttgtaatgggtcctaaaattgaattatgggtacttgttgacaaaactagttaactacttacataaaagcattatgcaatgcaagaatagacctaattgtcccttcagacctcaatagagtcagagtgatgcagcctgtttcttctaataagttctaagaaatcaagtactaatagtaataaaccatgattgatattgtgatgttttctttttggaaaaatggatgagctataaatagaaaaaagaatgagtggatgaggtaagcataagtagtaataataacaacaataattatatgaatggtatgtagagtaggaaattataatacttattatggaagagtaatagtacaaatttagaacactttaaacaaatgacacttaggatactcttaaacttttacacattttagactcttttttctcacacttaaagtctcctacttcaacttacactttggcacacactagtactacacttcaaatatctaaacttttttagaattttctaacttctttacaagtatctattacttaagtagttttaagtttattctaaaactttctaaaatattttaagtctttattagtactttttagaagagaattattaaaaaatactattagtgtctagtaccctcctcagtatcatactgctattcgtataattaagtattgagtactatataattaagaaaataacttttaagtatcgctaactaatcgtgagctgccacaatgttggacactactgatgcccaataataatatttttttttttaaaaacattatagatttggtaatgacacttgtcattgtacaggtgatggaacttgatttgctctcccttaactcagtacgacaatttgcagttgagtgggatcagctttcaatgcctctccatattctaatcaataatgctggcatcttacgtatgggaggtatattaatattatcattaattaattttaccaacaacaaattaaaatattgttattaaaaaatagtgtggaatgaagaacaaagagaaaaaaaaaaaaaa

SEQ ID NO: 225367 - DNA, 6055 bp, Cannabis indica
atagtaaaatatttaaaattttctgtaaatttataaatattcctatataataacaatgtacatagtacatgatcataaaaaacaataaaaataaaaaactctcctaaatactaataaaaaatatactgaaatatcctctgtactacaaatttttccttaaacgtaccctttggtgcaatataggactatgaagttagagttgataaaaactatgaagctcatcattaccatcatcatcctcaatattattatctcatctattaacattaaaagaaaaaagaaaaaacaaattatcaaacaaatcatacaagatgaagataatacatttgtctgtaccgtacaggatctcatgtatgtatatatacatggtctcttaatccatttttgacaaaaacaaaaaacataacttgaatattcttttgggggtgaactatatatagttgaatgatttgtggacaataggccattgttgagaggagaaatacaaatgaattagctagctagctaggcaaactttttcatgatttatgtgctgttgattgttgggactgactgacttactccgtttggggctttatgcagcacaagaaccatgatccctgcttcttcaatggcatagttttggtatctctcttcgcgacgtaatcctccatgaactgaacaactgcctggtgaaatgaattcgacaatgttggattagttagtatctgttgtgacagtgaaaacagataccgaaaattaaaccaagggaaaaggtggtgtgttctaagagtttacctgagcacccaatttaattacatgtctaggtgggatttctagaggcgtctcatctgcgcggaaaagtctcaatttcgataagaatctgaaggagtctggtaaatatcttatctggttgtcacttatatctaactcttcaagcatttcgaggtttccaattgatcgtggtaaggctcttagatcagcaaagttcttccccacatttagtttcctaagaccggttgcaaaacataggttctcgggtacactttcaagctcattgaagctaagatcgagttcctttaagttcataagattgcctatggttgttggtaatcctttgattctgttatagtgaagagtgagaacctcaagggattcaagctttccaactgcctctggaagagctcttagttgattgaaatctaatcttagctcggtaagcattgtgcaggaaccgattgagtatggcaattcctcgagctcgtttgtttcaacagttagacacttcaaactggtcaaattcccgagcagctctggtaaatgggttaactcatttgaactcaaatcgagattgatgagtttcttcaagttcccgaaagtatctggcagtgatcttaacctgtttgcatggaggtcaagatcagtgagatttatcaggtcaccaaacgagtctggaagattaacaagttgatttgagtggatatcaagctttgttaaggctctgaggcgacaaatactcggtggaagagccacgattcggttttcagacaagtccaattcagtcacctctgataatttcccaattgacacaggaagcccctctatctgatctgtcaattttcccttcagatcaagaacttgtgatccgctttttgcagtgttttcaataagagccgccaccttcatcaaactgaatttttccgagttcccttcacccacaaaataaagtccaaaaatgccaaatcagcaatgagaataattcagaaataatttattctttaatgtattaagactatctgacaatactaaacatagccagacacaagtttataaaaacaactcaattatatccctctatcctaatgatcatattgtaatgaacaagttggcccgatcgtaattaattcttgtatcgcaggaaagggaacatgggaaagaagatactagccaaaatgctctagattaaactcacttctactctggcagaacatgaccagcttcaacactaatataagacaagtttattacaaaacgaaacaaaacaaaacatccagctactaaattatattataatcacagcattgaaacagttggataaactttctgcagctaactattctttcacttttgattcctattgaaaagtgttttctaatatgtcttcaaacaacaaataatcttggattgacagttaagtcgaatattcttccaatgatttctttttacacagtaattgatctattttctatatcaatatcgaaaatgaaaatatattacttgatctgaagctgagaaaataacctttgagaggtcggcttataataaattttcaatacacaaataacttttgctctcaataacatcatttggaccaaagaaatcctatgccaattttgcaatctatagatgtttcttctttatcaaaggcccatataaacatctacaaacatcatttcacttagacttagattacacatccattggttaaggttaagtctctctttctgaatctaaagattgctccactagtactcctaattggaccccacctatcttctaagctagttttgtatgcttatcttcaggttataaactcataaatgattcttcttttcctctacaagattcaaaataccatgtaaggactctaacttccttttacataattggttagttttacttttttacatgaagcatgatatcagaccaaatcttgcatctgcagatgcaaccatgagaagcttttccagtgtctcggctataccgaattattgactataacaacatactaattactaacccagttcttataataatcattatgataatgacataatctccctattgaagaattcaagcaaaattcaaagttgttgagtcaattacttccaacaactttgctagtcctatgatgttgatctagaaaaagttaaaagcttgaaaatgtgaccaattcagataaaatggtagttatttacagaaagacatttcaagagataaaagaagaaaataagaacaactaagaaagctttagggagataaagagaaagataatggatataaagatcaataagaagcttttctaaaatgggaaaaagtcaaccctaagaatcaacaaacccagataagatcaagttagaatatcaaacattatagtgaatcagaatcactacaacattatatttgaattttgaccactaaaattcaatgctattccctcattagaaaaagctcaaagatctatgaactcaaaatcaaagcattaatctttaccttaatagaaaaattcaaaactaaatatgcttctatatatatacaaacacatatccaaatctatattagtatatataatgcatagtcttcccaattcaatgtttcccaaaatcaaattacctgcatagaaagaggccttagcagaagaactcctctccaaacccaaaggaacaattttctcagacttcatttcaacttccctgttcttcttcttcgccgtcgccgttgccgtcgttaccaaactagcatcactaattacggcatctctcaaaattttcgcgggtttctcaaccggttcactaaatttcgctggtttcttcatctgggtatcaccagaaaccaacccagaagctctctgaatcagatcatcaaagatctgaaacttactatcaacctccacaacatgaacagcttcccttctctgctcataactatgaaacaaaaccaccgtcttcctcacctcttgtagaaccacaaaaaggtcttgaggaacatttttaggtggctcttgtttagaaatctcttcaagctttaactgttcctcagtgttgactgttttgattacagacatggcggcttcaacctcttcaatggtgggtcttggaggaagtgacttgtaagtcatcataatttcctccaccgtctccacaacttgctcaggtattacagccatggctatggtgatgatggtgatgaatgtttttggttcagacaaaatagaaagaaaataaaaattgtatttttacagaaaaaagaaagggttttgaatttctctatgggcaaatactactcttactataaaagccttatttcttagattagactatatattatataaataaacatttttaaaaaatatatatgaaaaataataataattcttgtttttttatttatttttttatttctaattttatatatattttttcttggctgcccccatcttaattatacactttgtttaatttgttcatttaatttactttttttaggaatatctttttactttaaatataaatcaattttagccaaccaatcatttctattcagatctattttagttggaggtaatataagtcttttaaaccacatgtactttttagtatttttcttcataaattcatgatacataataataataataataataataataataatttttagtttatttttccattgagttgtatccatgtgatcattgatacatacaaatgtgtatatacatttcatcacatcttaataatgagtaatactattgtccaaaaaaaatcttccaaatggcattatgtaaagattgacaactcatctagtgttcatttttttttttctatgacaaatacatatatatttttttttgtgtacatataattgatttgggtttttatatatatatttatattttataaatatgggatgataaattagtaccaaagctaaaagggagttataaaggtagctctttttggtgatttataatatatgtacatattatcacatatgggatatgggatactcatttttagtatatagaatacaaaggtgaaaagttcactcacataatcatacataagaaagtagccaaacataggagataatgggatatgcaatcaaaaatattttccaccaaagcatatatcacaaagtttaattgttatattatattttagtatatgcttgagatataggacatggccccatatgcaaataattatactcctcatcaacaatccaatcaatttttattttctttattatttttgagcattcttatttagtctaactataccaatgtgcaggggcagcccataatttaagtgattcataaaaaaaaaattaaaacctttatataaaaagaaatgtggtatatttttaatatcaataaaaaaattatatttttaaaaggaatttttttttttgaattcttaagttagatgagtataagcacgcgtctaactcgcctatgtctagagttaaatttattgatgtgttaacttataattagttagcagctattcatattatttattaaatgaaatctgacattaaaatttattaataatagtatgttatctcttatagtgcttagtgcggtaatattaagtgtttattagtatttttcttattattatataatgtcaagattaaaagagagagaaaaaagaaaaaggccactttgtttgatcttttgggaatcataagaaaatagtagccaaagcaagcaatgaatcaagttctcaattaatatttaattattatgttagcgacattgtgtagatataatgtccaaagtttgttaagtaaattgaaaaatcaatccctaactatacatgaaccggcattttccactataatccaaagaaccagtccattaatccatggatttctttttcttattatatatatatatatttatattgtttttaatttttcttcgattgtactaattaattattattaaataaaacttatcactatcataagatatatagataaggaagaaaacataggattaatgagagtatatacaaatacaaattattattattagttgatataatgttttaaaatcaacagaaaatattgttccacgtcgtaacgtaacacttgattatatttatatggtatgattttctatgtgatgtgacattgatatatacgtacgtataatctttttttttttattattattattattaaaaagataaatattatatttcttaaaataataataataataataataagagcaaaagttgtgattagtcaattcaatagtgtcatgcattgtgtgaattgttct

SEQ ID NO: 225368 - DNA, 3413 bp, Cannabis indica
aaaatagtcacacgtgcaacacactgcttgaacgcaattttcggcgtgttaaacttttacggatttcttaaaattttgcaggatattttaaataactataatttacatggccataaaaaaaaaattaattaaaaaattatttcgaatgctaaaacagataaaaatgtatcgatgtatcttttttaagggagtgcattatagaatttttcaaaaatatatattaaattaatgttatggctgttttttagttactattataatttagtataatttgagttaattattattattaaaaaaaaaaaagtgagatttgcgtctaaatcactagtggacggttacgaagggatgaaataataatatgtgactaacaaattttaaagtagtttattatgtttttataagaaatgaaaattgtaatattctactcattgcaaaaggattctctttttattttttctaaataacaattatctttctatcatttgctaaaagaaatgtataaaataaataatatagatgtataacaatattaaaaattatcaataatatatatatatttttttttttttgtaaaatttctgtttagagttttgagctgagtgagtgggtcgtaggcacaagctgaatgatttatgttaacatatcacaagtacaattaaaattaaagccaacttgtactcacaaattgtaaacaaaactcttataaaatagatttatttatttgttctttttttttttttaggtaaaaacaaaaatattttataaataattattaattgtgttggtaggagtatggaatgactgaagctggaccagtattatcaatgtgtttggcctttgcaaaacaaccatttcctaccaaatccgggtcatgtggcaccgtcgtgagaaatgcacaactcaaggtcatcgaccctgaaaccggtgcctctctctcctacaatcagcccggtgaaatttgcattcgcggtcaccaaatcatgaagggttatttggacaattctgatgctactgctaataccatcgatgtcgatggctggcttcacactggtgacattggatatgttgatgacgatgatgagatcttcattgttgatagagttaaagagattatcaagttcaagggttttcaggtattgtttgttggtcgatcctgaaatttagtgagttggagaataaaaaaaatcattagacctttatttaaaaaatatgatatttttcaaaataaaagaaaaagtgggactatggaggagggtggatcctagacacagacttagcacgtcttagtatagattttaacacatttattacgataataataatttcaggtaccaccagcagaacttgaagccttacttattagccacccttctattgcagatgccgcagtagttccgtaagtataatctcatattttttaaaatttattgtaatttaattattaagatgtatattttatcaaatacacatcccaactaaaaattatatattatgagtcagcaacatgacataatatgattggtcgatattgctacaaagcaatatcgactaatcttttctctcaaataaattatttattttaccaaatttgattttattatttatttatttatatatatgtttttttaaatgaaaaataggcaaaaagatgaggtggcaggggaagtaccagttgcatttgtggttaaatctaataataaagattttgatctaagtgaagatgcagtaaaagaattcatagcaaagcaggtaatttatatttatttagatataattattaattattaatatttatttattgattttaaataattaacaaaaaaaattacatgaatattataattatattaacaagtggtgttctacaagaaattattattattattttatgcatacatgaaaaatcagttccatatataaaattattgatataattttttattttgttaaatgaaaaatgagattttataatttttaaaattgtatttttttctaaagttattgatgaaaagaaaaattaaactaaaaaattctcttaaacgctgaaatagataggagtgtatcgataaacttttttagggatatattgttaaattatcctattttatatatctaaatacaatttataataattatttgttattgttaataaggaattaataatacaaattttttatattaatattaacaggtggtgttctacaagaaattacacaaggtttactttgttcattccattccaaaatctccttcaggaaagattttaagaaaagatcttgtagccaagcttgccctagcttccactttaattatatcttcttaataataatcaattaactaaatgtatttattattattgttatttttttattaattggtttgatgggtcttttttatcttaattaataagaaagtattattgggtgttgttgtgaattaattaattagccaattatgatatttgttacatatattattattaatggtgtcattaatgcaatcttatttattagagtattgctttttaatttactattaagaggtgatgtcctataattaattaattaatacatttttttataatatttattaaagtaaaatagttgaaatttgaaattaaattccattaataatgtattacactcaacaaaagtgttagataaacaccatggatattctttagtatttctttatttatatttttttctctttaaattgaattgtgaatggttaattttagtaatttaattaaaattaattaattttttaattgagatctaatataaataatttagagtaaattacagtgtaaatatctatgttactttaagttgcagataaatacttaagtttaataaattatatttttaaaatttatgtaggtacctagtcgttaagtgaagtgattatccacgtgttatttttttattggtatatttaaattcattctcaaataaaaaatttaatggcctagaccaatcgagaattgctacgtagaatttacttgatacttaacggttaggtacctacataagttccagaattataacttaggtattattattgtcaaaaattaaacttatgtatttatttgcaaccgggagttaaacttaagtatttatgctgcagtagtcatatacatatagcctagtagttccacacttcaactcacaagaaaaggtcccaagttcgattttttcctcctccaatattaggagtacacatcaggtgggttttatagggttttgggttttcaagtttggctttttgggttcgggtgtatagaattagtaattcgaactctctgtttgtgtgatcaagttttcaagttttaggtgcaggtgggttgggattgggttgaaccaggttcgggtgggttttgatcgagttcaagttgggctgacttttttttt

SEQ ID NO: 225369 - DNA, 3853 bp, Cannabis indica
atatctaagaagttatctgttctgtgtaaattgtacgtttaagcactacattcacccacttcagttttaaccttcaaattaactgaattatccatgatgctacatcagtaacatacctatttgtccttacagaatgtgatcatttgcttttaggttctacgaggggataatagttctttggcaaatgacatccggaaggaaatgaaggtactgttcctacaattattactcaaagcatcacaaatgtatggctgcttacacttctaagcaaaaattgtctttggctacggctgagttgcatttagttgatttaatcatcagtcttaaggttgtaccacactaattatagaaagcaatctgctttgaacttattaagagtctaacttaggaaaccatttctgagaaaacttggatgtaaccagatttagactgaaagtgtctcaggtcccaaatgaagctttctcagaattggtctatatatgttgagaaacatccattgtttctatttatcttgagaagatttaattatatttgtctgatatttatttgtccctacttcatttcaggctctaaatgggaagctgctgaaaaccagagacaaaaatacaaggagagagatccagaaggagcttagaactctttccaaagaagagcgtaaaaggcagcagctagctgtgacagatgttataaaaaatgcagatgttgtgttaacaactctgactggagcttcttctcgtaaactggatagaacgtcatttgatttggtcatcattgatgaagctgctcaggcccttgagatacaatgctggatagcgctattaaaggtaacagtaatttgtagacgcatacaaaaacactatactggcctccacaataaaaggatcattatagcttcaaactatcgcatacaaatttatgtatcttgcttacaaacctggctgtggtaacatgtctagctcttgttgttgtgaatttgtaatataatatccatcaaaattagacggttttttctggtgaagttcagactgttgataatttcaattaaaccatgtgaaatatgtactgttacttcaagcatcactcaaagatcttaatttattgtttttagggctcaaggtgtatacttgcaggggaccatcttcagcttcctccaaccatccaaagtgctgaagcagaaaagaaaggtctaggtaggaccctctttgaacgccttgcggacatgtacggaaatgacgtcatgtccatgctcactgtgcagtaccgaatgcatgagcttattatggattggtcatctaaagaactttacaacagtaaggtgtgattatgtctgaatcatgatttgtatgtgaatgcatgcaacttttcatcaaatatctgattctgagaactactgtttggtgatcgaactaatgctgctatatgtatgtatggcttttgtttctacaggttaaagcccattcaagtgttgccgcacatatgctttatgatcttgaggatgcaaagaagacctcttccacagaaccaactcttcttctcatagactcagctgggtatatgctttttctgttgccttgaaagttttattttttttaatactctagtgagttcttgcaaacactccataataaccataaagaacaaatttcaccacccacattgttttcaagttttgagcttcacagtgttcacaaatgagggctaaaataaagttgaagcaaacatgcagcgctaatctgcaactaaacctgaattgttacttcatgaaatgttgcctgagacagaactgagctgggttgccatttggttttctggtgtctgtaatttagaattgtaaaatcactatgattctaacggacatgtttaatacgtttatcttcagttgtgacatggaagaaaagaaggatgaagaagaaagcacattgaatgagggtgaagctgaggttgcgatggcccatgcaaagcgacttgttcaaagcggtgttcaggcttctgatattggaattattactccatataatgcacaggtatatgatccaattcaatagttctaattctcttgccataagattcaaattgaattgtgtcagttgttacattggccgctagatgattggtagtttgtgcccaattcaatagttcttgcgtcagcaccacaaacattttctttatataaatgaaactggtattgctgcaggttgttttgctgaaaatgataaaaagcaatgatgaaaagttgaaggatttggaaatttcaacagttgatggtttccaaggtagagagaaggaagcaattattatttcaatggttcgatcaaactcaaagaatgaggtacatttgctccagttttatcgtcacatctgtactctttatattagaaatgaataccgttctaaacaaaaacaaaaaaaaaaagaattattcttgctctgaactttctacaccttcaggttggatttttaagtgaccgtaggcgaatgaatgtggccgtgacacgagcaagaaggcaatgctgtcttgtctgtgacactgagactgtaagtagtgatgcattcctgaaacgattgattgagtatttcgaagaacatggtgagtattcaagtgcctccgaatactgcaatgaataattgatgcttcatcggttacttttatggtttctatgattcaagagagtaattcgctcaggaatatggttctttaacaccttcaaaagtgctcctgattttgagctttttaggacttgttttgaaatgttcaatggaccattttccattacaagaaaggaactaattactgaattatttaactgacatgcgaagttcctgttaggactacattttattatatataaaatagagattattttacaaaaacataaaaacaacaaaaaaaaaaaaattacaaaaatactgttttatggacttttaaatatttttaccatttttttgattttatttaccgaaagtacggtctttttacattgtaatcttgttaatttgttgttgattttttgttatctgtatgttattttttattgttattttgatgttacttttatgtagtttttttgttgattttatgttgttttcgtattattttttagaaaaccgtaaaaatgtagaaaaatactctttgaacgtaaaaatgtaattattttacaaaaaattatgccttatgtaattattctttataagactgaaacaaaattgtgatgtcaacatttcaccaagatttctttttttgtacactaatgtactaacattaattcaagaatcacgagtggatttctgaatttgacatataagaaggcaatggggtagtctttttttttttttttttttgggaattaatgaaagtgggttggcaagaaattgagaagaaaaattcacaacattattgactaactgtgatattagtcatcatttgaatgcaagggtcacaacttgtaaatcatctcaaaccctgtacacaaattctaaacacatttttataaagttccgcaaactggagctgatgttctatgatttcccagaccttgattatgagcttatttgattcgtcttattcctttcaacaataaaatttaatggagatcaatctgaggtcagtcgatcatcatcatagatgaacaaattccctggtggggttttctccctcatcatgatgaatggtacaactttatataattcaaactattcttatgaaaacaatattagagtttatgttcacaatatatatgtttgaatgtagaactatttattaatatggctaattaggatttttgttccctaaattttaatatgtactaaattatacctcttaaattttttgtccgttaaaaattctattgagatt

SEQ ID NO: 225370 - DNA, 2040 bp, Cannabis indica
aagaaatgacattgtgattatatatcaaaggaatcaaaacagtctttcttatgatcttatgattattttaagattatttaatatgaataattagtaataagcatttgtgttttcaaatgtgataaataatttaaatttgatttgttagaataaaaagtccccagtagtgaagaatctttagatgcaattagtgacatcattccccactatgccttagcatttacggtaaaaaaaattcagagattccatttggtcccggcgccttcaaggggtgcatttgagaaactttcaactttatctcttcagtgaaagggacaacagtaagcagagaattctcctcaagagagatagaaggagaaatgagtgaatctaactcatccgcatttgagaagaacaaagcctgaaattaatcattcaaaatacaccccttgtccctctctttagatcaaagaacaccattaaagtccttgagattctaagtatgattcctctttcttctaaccaaagttgaggcgttgaaaaatgaccctgcataagccacaactcccttgatctctattcccacataagttctttttgagtccataattcatggatctcattctgcacctctctctctttgcaaagatcagcttcatgagcttcgagcgactagagaaattagagtttatgttccaaatctctagtactcatgtaacaacatactagtttatgcgtgttatcgtaatttcttaataccatgcactcatttgttgatcaaatgatttatagaaaaacgtgaataatttaaatttttataattaaactttaaacaccttacaaaaaaaaataactaaactttaaacttcaatatatagatactttacataattgggaatcccatttttaaagttacaatcgttttacgaaatacttagttaataaagttgtcacctcgcgactatcaaaataaagcttgttgtcccgaagatcgaacattctagctctaatcaccccgatatgtacaatcttcattagctctagcttactattgatcaattttagctttgcctctacctacacatgtaaacaatatttgagagacgataaactagattataactaggcgctcatacatccaataataacaatcatatcttgcgttccacacgtcctgagtctgaaacgtttgtacgacatagcttagtatatatctattgatatctcaatgcaactatatgtacacatcactaatatattgatatgctaatttaatggctactgatatccctaacatatatctgttggtatctcagtgcatctctatacctcactaatacactaatatgttattctaatagaaactaacatgcacgataaacatgtattcataaatgaaattaatataccaatcttatcttgattctgaattcaagtatgctggtcaacttgagtggaaattgttgcttattaatttataggcccctaagtcacaacatatgtaaaattaatgtgtgagttagttcctcatttctaatgtgtaaaaataaattgttatatataatatgaatgtgctactcttcttattgccaattaattttgagatggaacctcattcaccttagccactttcattcttaaattatcgataataaaattaaataatatgaaattcaatacttatattgatagttatataatacattataatagtattaaatattaccaatacttttgatatttctcatattaatatgatcataaatattttaggtgtagagtaagtgtgacttttcactagtaattataaaatattcaaatgagagaggataatacaactttgagtttttttaattattataatattatattattttatgttacttttataatagagtataattgtaatgagtattacatttgattttttattgtaatgaggactcatttactcaaactaatagtcattacattgtaatggatacaaaaataaaagggataaattgaaaaatagccacttttttttatcaactaaccaaaaatacctccattttaaattct

SEQ ID NO: 225371 - DNA, 1766 bp, Cannabis indica
tatatatatatatatattgtgctctttatttagaaagcagacatggcaaattgcaataggattaattcccccaatctctcattccagctaagttcattttgtccactaaaaaaaacacctaacaactaattaggttctatttttttgtatttagcaatattaattgatggttggggataattttctatatgtaggacctaagttagttgtatcgactatgtttaaaacctataaaagagatacaatgatgaacaaatagtaatactagggcaaaacaaaagaaaacaatctttcaaaaaaacacatacatattattatttcacaaaatgaatagtgttaatgtaataatgttgatggtattacaaacatgtattatggtaacattgttttcttgtgcatatggagtcatggatgacattcctcatacacctcatgccccggaactaggaatcgaagaaattaagattcaaaatgttttggatggaaaagaggacttgaccgttcactgcaaatcgaaagatgatgatctcggtgttcatgttttaccctacaaaggcacttatagtttcaaattcagccgtaactttcgaggtacaactctcttcttttgtgggttcaaatggggaaaccaattccaccggttcgatatttacacgccacagagtccaaaatgtaacgttcccaatgaatgtttgtggtttatcattccttctggtccgtgccgttttgacaaaaccaccttcaagtatagttgttcttcttggaattaaacgagagtaatattgtgacacttctatttacatattatataattttgaccatatatttctaataagtgagaatcacatctcatttaattatatggttaagattaattatacatcatatattatatgtaaattatatcatattactcttaacaaagatccacatacaaaattaaatattaaatatatatcgtaaatatggtgtacttctttctctaatttcttaattaacatgttgtaaaataagtgtacaataatacaatatatattttaacctatatatgcaatgcttgaaactattttattataaaattaagggttgctagagacacattaaatttggttatatttataggctcgtttggtatatgttgttgtatttgtgttggattgtactgtattatattaattatttaatataatattatttggtattaacttgtattaataatttgtgtaaaattatattatctttattataaactcaaccccaacttcgacccccgttcgggtaaagggtttgaatcaaggttggggttcggtatgccggagcccagtccaggtttcgagttcaaattcgaggttagaggtgcgagttcagggttcggggtttgggataagggtcggatctggggctggggtctccaacccagccaagaccatttgtaaatattattaccaaattcatttgatctagtttcaaatgattggtctggattaattggggttttaaaccacaaattgtggattatataaactgccctagctaatatatatggataattaatttttatattaaataataccatttgtattgtattaatttatgattgtaataattaatacaatacaatattaatacaataccaaacaaaatcttggcaatttcatatatggaggtaatttaatgcaacaatttaagtacaaaatatatggtggcgtttggcaatacttttttaattaattttctgtttttaaaattgaaaaagtaaaaatatt

SEQ ID NO: 225372 - DNA, 5643 bp, Cannabis indica
tacattaaaatagagtttttagggcacaaagcctaacaaaaagtttaggttggctatgtgttttttgtgtagtagcctttgtacgatcttttgctggtttggaatgtttcctggactattttagagttgtttaagacctattagattggttttaggtggctgagttgagagttgagcaagtttgagttcatgaactcaaatttggctcagcaatggaaacttgtgattctttaagttatgcttgttgttgcttgatgaaatatgttcattatggtccttatagatgttctggagagttttgtagcatttggctttgattggaaaattttttggaggtttttaagttgagaaaagtcgtatttcaaactgtccagaaccaaaattctagatggtaccaaccaaaattccatttggtcaatctttgggaaacgccaatttttgtattttggtcataacatttcacttggatgtccgttttagacgttctttatactgttttaaatcttgtgaagagctgtatagtatgatatataaattagagaaaaaatatgtattttgttctagggtatttttaccacgaggtttggtagaaaatcttagattgttttatacgagtattagataatgttttggaatagacacttatcagtttaccgttgttgtgacatagggccaagattgtcaggaatttttccactcgagttggctggcatgcacgaatatacattaaaagtaagaagagtataactgtactacatagcatgttatgtgagttacgattattatcgtttgtaaattgagtaatatcgagattaagaaacaataattatcgttatgtgatgaaaagattgtcttattagacaatgatgaaaaggttattttattagacaatgataaaaaattgtcttgatagacaatggtgaagtggaatgactataaattgaaaccactgttcagtttcttacttgtcggttatgctttataagtaacgacagtgacattggatactagtggctaggtctctgggttgtctggtatgacaacaatagtgacatttgatactagtgacaggtattaggggtgttcgcggtgcgggtggtgcgagttgtagccattttttcaaaccaaatcgcttatgcagtttttataatttctcaaaccgcaatcgcactacgagatcttaaagttacagaaaccacactacgaaaatacggtgcggtgcggtgcggtttgagcagtttacactatcataattattaaacatcataatgaaaatttaacaatcaaactaataaagttttaacaatacaaaacaaaaaattcttattaaagttttaacatcataacatgtataacaatcattaaagcattatattgaattgtctctacaaaataaagtaatatatacatatattatatatatttgtttttatatgaaaaaaataaaaatcattttataaaaattggtaactttgtaatgtatagtgcggtgcggtttgaaccacaattattaaattcaaaatcgcaaactaaaccgcaccatgcagtttggaaaaatgcaaactgcaattgcaccacaaagatcaaactgtattttttatgcagtgcgggcggtttgtgtggtttgggcggtttgatgaacacccctaataggtattaagattatcttattaggcaatgatagtattatttggatatcggtgataagtatcagagttattttattaaacaataacaaggatattgggatgccgggctaggcatgaaagttgttttggtaagcaacaatgaaaattggtgatttatgaagtaacgggtatggattgtattattaaaaaagtgattgtatattactgaatgttttatattgatattttttgtaactgagtatctatgtttatctggatttaattatatgagtattatatgattatttgattttgattgtttgatagttgtgtaatgatttgtgatgttgtattactacttttcttgctgagtttttgcgactcacagatgctatgtggtgcaggcattaggtaagaaatatttggacaacaatgagtcaagaatcttctctagaaaatgtacatatcagcttatctagcaagtggtgttgagttgtcgagattgacattttttagatgttttaaatattaacgtgtattttataataacattgtaattacatatcttgtaatattttaaaaagggatcccctattgtaaaagtgattctgccatgacttttcaattagcaaaatttttattaaatcacatttttacataaattgttagtttattatcataaactattttataaaagcacacatgtggctttcctagaggttagggcattacaacatggtatcagagcaaccataattttaaaggttctgaagactgactggatatgtacatttggtgtgaagaccaactcatctcatggatagtaagtataatttgctccctattatatgattaattgttatatgatgttgttagaagtatctctagaaaaacatgaattatgtttggttgtagtatattatgaagttataccaattaagaaagtatggtagaaatatatgcttaattgctaagcaaggaaatgcttatttacattgttgttacttgagaattataatcagtatgaggggatgattagtaagacaatggataaggttttccaatagagaatttgtgtgattcaatggaaaatttgacatttcgggaatgatcaaagaaatggtgattcattgccacctagatcacgaagtaaggtgcatcattacacgacagattagttgacgagactgacatattagagaattgataaatcaataaaatggttctctgataagttaaattctcaagatgtgcccaagtggtccgtgagatatgaagaactattaggtacagttgtttaagcaattcagataatggaaccttcttgctctagaggtgattcagaatccctgagtgtggaataatagatggatatgagcgtgtccattcaggatttaaggtgagttaaagatgatgattaagtgagttgtgccatcttatactacagaagtgacgttcatatagtagaggactgagcccgaggaacatggattgaacccttttaattggagtataacttgactagtgacttattaaggtatgatagtgagatcacggtattgctaagatggaggagtttacttagattgctcaagaatatacaacgaagatggtgaatgcatctaggtttgatcgatcaatcaatcttggatatacaatgacaacttaaaacctaaaaaaggtaatgctcatccgggaagtggagggcatgtactcaagtgatttagttgggtattattaagatggacagggtatcaattattaatgacaataacatatgggaagattcttagaagtttccatcctgtatcaattaaggtatgggttatgacccttattattgaaagaggaaattcagatgaccttctagatgtgggtaatgaagttctgctgggaaagaaaataagactggtaagtttaccttgaatgtttgaaaatgaaagatgttttcttagagaggaaaaccaagtttaaactaatttcatggtagtatattagaccatgtgatgtattgttaagatgatgtggtacgtgggtacctaataaagaattggttatctcctgtgagtgaggatgatttctctagtgagtatagagagtagaatgtatatatatgggttattttattcgacaactagaaatattaggttactttattaagtaacagtgtgagtgatactgttattactctatgaacccgctgtaaggtaaatacggttgtctcataagacaacataagacaattgattacttcattaagtaaaaatgatcactagttatcttatcaaataacatagtttgttgttttattagacaataaattgtacaattagtgtaataagagatttagagtgcttagctaagtataaagatagcgttgacatgaaatttagccaactcacagcagagccttattaattattgattatcaccacttgtaaataagaataataaatagtaaaagtaacacataaattcatggaggtttggcccccttgatgttagggtaatgacctactccctttttagttgtatttactcttgggataataccatgcaaattacaagtttagaccttgtaatttctagctatggatctcgtcagtattacaattgtgagaacaatgtgttacagataaagaacttgtgagattttatgaagaacttatgaagaaaatagacttagagtctaagagaccttaatggcgtgtgaggcttagagagagagagggagagagactattggcgtgtgaaacttagaattggccctttttcatgtgatctagtgccgtttatatagtataaggcttacaaaagatcctaattcaaatagaaaatatgtccctttaaaatagggaaaataacatcttttttatctttaatttgaaatacaaaaaaaaaaagatagataaatccctagaatctaggataatatctttgagggaatatccctatcttcatgggctattggacttgtcccataattgtaagtaagcttgagaatcttctagaaggctcgtggtgcaccctgcaatttgttcagcctgttaagggctatctacacattttggcctgctagccctgtctttggaggttattcgacatgtctgtacaaccctatctttggaggttgtccatatagctttgctattcaggttggcctaccaacattgctgaaggttgcccattgtatggaagttggcactcctagccgactagctataggttcagctagggctttactggcaggtatgtagatctgtgtttgcttgtatccaccaggcagccatgggatcttgcatgttggaaggtgcatggcactaacctagcaagttggaaggttggaggcactcacctggcaggttgaaggttgcacgcactaacctggcacttggaaggctgcatgcactaacttgacaagttgaaggttgcatgcactagcctggaaggttgaatgctgcacacactagcctggcaagttgaaggttgcacgcacttacttggcaggttagaaggctacaagcactaacctgacaagtttaaggctacacgcactaacctggcaggttaaaggttgcacgcactaatctggctggttgaaggctgcatgcataaacctggaggttgaaggctgcacgcactaacctggcaggttagtgatgagttgttccccacgtgtcttttgattttgactatgtggacataccatgtcaagtggataaaatttgggataatagatagtatcaattgcaagagagaaattgtaatgtataaactagacagtgaaactctgttgggttttatgccctaaataaaactccatttcaatgtaatccttattattcaaatatcaataaagaaaaagaagtattttcatcacttattgtgtcatttggttcatgttataatttatttgtttatgtgatttataaattcatccaaatccttatcacatttctattcttgtttattgtgtcgtcagcacaatggaaagtaatcaagattatgtgattaa

SEQ ID NO: 225373 - DNA, 4061 bp, Cannabis indica
ggtgttcgtgcgaaggtctcatattcatatgagatggttccagaacatcgagtcgtgtttgcctttagattttggaccattttagatttatgtgggaattttctgtcgtcaacagtaatctctctttgattcacaggttgttgctactagaatatgtagggttgtttgtattgttctccttgacagaacattcgacgcccttttggtctttgacccaccacgaggccttcctcgtgtttgcttgctgggggttcaaatagttttgcatgtgtgttattagcattcgcacgcgctatagcggcttcacgctttaatccagcatttctttggttaggcttgcctaatctttgtcgaagttggcaattttttaattccctcaaggaacatatctagtggggtcttatgcccctcattctttctttctagaatggtttcctcgttgtcagttctttcaaagtcccatttaggaggactttttcctgtatttagatcattggcaagttgagtcccctggggctcttttctaacgtgatgaaccgtttcttcttgttcgacgggaatgtcttgagaagtattgtccataatgcaaacttttatttttgggtaggaagatgtgtttttagagtttagaaagtattaactcgaaatttcgttaacataaattagagttgataattaatgctcagtaaatattatatgctatataaatatatatatatttaataagagagatggatttttacttgattttgtaattaaaatttatatattccacgagtttttttctatttctagtattcttaggttacagatataatttggcaaaattttctcaaatttaaaaaattgatctctcttttacaatgtttgctctgatatttatagggattgaataacaattattttttatctaatctgaacaatagttataaaccgtgaacattccttgtgtttcatatgcaaccactttcattttaaataagatgattgttctatttgacttggtctttatcttctataacatacgattgtcaagatgtttcattgtttaatgtatgattttcggggttcaccagcccttagatgcactttgggtaacatattcttctgaaaaaataccaataatatttctgaggttataaacaagagcaagtttaaataggttaagtctcaacattaacattatcgacactagaaatatttctaaatgcctttacgagtttaactctttaattaatccacctaatttattccttcatgtaaccaacctcattatttacagcttaacaattattatattaaattgtgtttatattatatttttatataatatgaagttaaatttttattgatatcaaactattatatatttatacgaacatcaaaatcaataccaaatataatattatataaaaaaaaatatataatgtacaacataatttatataatgctacacaatccaataaatagaacatttttttcaccatatttctgtgttttatttttccttcatcacttaggtacaaaaaaaatttctaacattgctatacataacaaggacaacaaaaatgaatcaatctctctaaacacataattattaatagaaaaaaaaacattaacacaattaacatttataaattcaatttcccgtgtaaaaaaaataaaaaacacaaaaataaataaattaaaaaaaataaaatctaattaccaaccaaaataataaattatatctcataccatttaccatttaaagagataaggctatacacaacagagcaaggatcaaggtatagaaatggaacccattaatggcggctgctgcttctgctttcgatcttatatcttgacctaaacccggcggagatgagaggtgtgaaggagggccatctaatccaggcgtaaactccggcgagaaagcaatatcaggtggctgagccgtacccgaagcaaagggtgttcctggtttgggagtcgtcgtcgttattggattcttcccaaaaatctctttgggtaataaaaccccagaaaccccaaaaatggcgactgggttttgatcaaaaactgtttgggtcaccgacacttgaacgatacctgtattgattgctaccgatccattaaccctagaaatgttgagagtgaagcttcctgcgcccatgtcttccgtagctaatgtgggttgaacagggttcacaattgattcaagcgaacccaaaggataataagaatgaagaacatggaatttcaacaccactgctttcttatcggccggtaatgattgaagctcaacatttgacggaagttgagcgaaagctgtatcgactggtacaaatagggttattccggcaccaccttcgtcggcttcaaattcctctactacgccggaggctgctaacatcgaagccgcaacgttgaagttatgaccgtcgattaaagccttagtgatattcaaacctaatggaggtcgagtctcggaagccattagatcgaatccgtacggaacgagaagagaattaacagcgaagacactcacattgtacggtagggttttgatagggttaagaatggtagcattcgagggtgaataaggtgccggagatcggactgaaacaattccggtgattggatcgcgggtgatgttgaccgaaccgaagttgttggtggcgcgtccggtggtttgaaggagcgtggtgacaagcttacctgaggaagagatccgtcggagatcggaaggggagaggtattcgaggagtatgtggtatcggacgacatcagcgcgtgaagatgaagacaagcggcgcgtgagatctgatgaagcggagaggtatgtgtttgggacggcgaggagagttatggaggatcggcgggagagatcggcggcgagggaagatgatgatgaggagaggagtgaagcgaagtcggagaagtctgggaaggaggagaggaggttggtgatgttgagagcggcggtgggagcggtggctatggcggaagagaggagaaagaggaggaagagtatggatggtgtagggggtaaaatgggaaatgggtaagtctgcttccatcgccattgttgtttctctctcaaacactctttttctctctcttctgttagtgagtgagagagtgagttgtaataaaaacgaagattaagacaaagggtattttcggaataattgaagatgttcgaatgtataataataatgtccacaaataataaatataaatgagagtgtctactcatttcatattttgtattttatttaaatataagtttgtattttaaataatgtttatttaatattttgtattttaaaattgtatatatttactatttaggtaacgtttggttggaagtaatgaaatagaatagaatagaaagaaaacaattttcattcaattcctatgtttgattgtattttaagtattggaatgacattctaatgggatactctcggtcaaactctttggtggctcgggttttcaaggctcgatactatccaaacgggtcatatctttcggcggaattaggcaacaacccaagttttgtgtggcgaagtgtactagaagctcagtctttggtggctatggggttcggtggtgtatagggatgggggagaatatttcagttttgggggagccttggttgtaagatcactcaaatccgtgtatcatctctgataacccggcacttgtgaatgcaaaagtgtcgaatcttatgcatgaagaaggtggaggttgggatttggagctgttaaatgatttattcctggagagggataggagacttattcttgctataccaattaacttgtcttcgacggaagaccatctcacttggcacaaagatgtatctggcggttacacggttcgaagtgcttacaatttgcttcaggaaagtcaaggacaatggcatagtactgaagattcaccgttctgggagagtttatggaagcttaaagttccaccgaaagccaaaaatactgtatggagagcggccatgaattgtcttcctaccactgttatgttgcgaaccaaaagggtagaggtaagtgctatctgtc

SEQ ID NO: 225374 - DNA, 4023 bp, Cannabis indica
gctacttgacccggcgataactcattcatctcacatttaatttatacattcataacgtatactactcccacgatgtgggatttttgctctccatataataacacttaaactcaccttaatttatatatacgctcattaatgtataatactccgtcgatgtgggattttgggtgtgcatggttggagcccgtgaatcgatttggctaattactttaccctcctccgccaccaaatgtgtcatcatctctctctcattataattttctatatgtttttgtggggtaataataaaaataataaataaactaattttaattctctctaatatttcgtgatttttgatagaatcatccagctagctacaccaaataaaaccctattctcctttgtatcataacttttggagtagtactagtaatagtagttggctaattcgtttgataatgatttttcctttgctctcaatttacttttcctctctttctaattaactctagatacataggttggatgtgtagtggtgaaagatgttgtatatattaattaggatatgtttgaatttgagtatttatgtgtgtgtgtgacaagttatatatagccttgctccaacgcgtggcaagtggtgtggcacttccaaagccttgcttatgctctatacataattatacccatgtggtatagagtatttaatggatgtgtgagattttatattaatttgtaataataataatataataaattaacaaaaattgaagaatatacagtcattagcataaaataatatagcatgtacctttttagagtggatgtacagatttatcttcaatttttttggcatttaaaaaaatattttggtctttttttttttcatgctataattatttaaaatatcttataaaattatttgaaataatttacaatataaaaaataatgttcaaacagtctattttacacgcgtataaaataaaatagtcgcacactctttttgacgtgtttaattctttcaaactttttaaaattttataaaatatcttaaataactataacgtaaccattaaaaaaaattgactaaaaatttaatttaaataccaaaataaataagagtgcatcgatatatcttttttaaaaaaaatatcaaaacaaatatttgtatctattttaaaaaaattattatttagacacatggatctctttttactcatttgggaatcaagatctccagttaaaaagttgtgtgtgtcatattgtgttaaaccaatctaagtttgacacgttaactaatttttcatttattaaaaaattaatcactatataatttttttatcttaaaatgctcaaattaattagtgtgtcacaatcatatttatttaatacagtatgaaacacaatcttttaatagaacatcttgattcctcattttagaattccattttttactttttattttatgtctccactctctaaactattattatagtcggtccataattaattaggcaatataatatataattatatataatatgtatattaagtagaatggaatttggcaattatttcacttagttataaatgatttgaatatacattgacaacaataataatttgaaatttgcattatggaatgataaattttgttgtgaagaagtaataattgtgacacattgacattgtaaataattttacgcaatatttgaaaatgatacatatatgattcttatttataaaattaaacatatgaataattaatatgagatctattaatttaagtgtatttcaagtgtaactgaaagattataataagatattttaattaatacttctctaaataataataataataataataataattgaaaaagaaataatcataaattgcactttcaactctcatcaaaatctcgtacacacaaatcttaggaataagaaaattataaaacaaagcaagaaacattaattcatcaaagcattaataatatttccatatataatcaagcaacaaaaaacactctttaaactcaaaattattaagatgatgatccaagaagactatgatgatgatgatgatgagttggagttggacaacattatatataattggtatatatgattctattttcccaagaacacatgagtaagaactgtttttgtctccaaagaagccttcagcaacctcaaaccctatccatacatgatcagcaaaacaattaataataatatataacaaaaataataattaaataaaaaatatacaatcattacacaatatatataaatatatttactaaaatcaattttaattataataaaaattacttattgctcaaaataaaggtaatacttaaataaaaattattgttgatttactcatttaattttaattagtcacaaaacttaataaaatacatatacatctaataattccaacaaattataatttttctgaaaaactattacttttttaatcaaaaatttttcaacaataacataaacttagtaacaatttttttagtcacaaaaaaaaaaaataagtagtgatttttttataaattaaacatacacacctcattaataccaagggaaacagtcttctcctcaagggcaccaacctccttaacattaaaagtgttaagtaaagcaatgcttgagatagtagacattggcttcacttcaagatcgtccataatcatataagtaaccactcctttcacaataccaacttgatgatgatcattattaaccccagatgataatgaagatgatgaagatgatgataagccaacattattattattattattagggggtaatggtggtggcacataagtcaacatcttattgatgaaacttttacaattagggcaaatggcttttgagtcatcagacacatatttacgacaagaggagtatgtattaaaaggactgctattacattggtaacctgtaccacaagaaaagatttgttttacactattggtaggtgtagcaccactactactactactattagtagtagtagtattagtattggtcaataagagaagtggtaaaaggacaaatgaagatgatgatgacttgggtttgagaagggtatccttattgacattagattgtatgtaagtttcacttagattttctaagctttgatagagtttacctaaggtaccaaccataccattggtagataaaagccttatgatggtaccaattggcatagataaaagagagaatagaaaatcagtgaaatcctttccagcttcagcaaataaaacccttttctcctttgtattgatcagcaactttagtgtgataatatttggagaactagtagaacttgccatttttttataagaactttgtgaaccctatatatctcaaatttgtgaacttttggtgaatatagcttgtgagtatacatatatatatatatataaatttatttattgaattttttttacattttaattaaataaacaccacatttttttttaaaaaaattattgtattttgtcaagtcaagcattgactatgtatgcttgacttgattggaagtatgtgaatggttatttctactttctacataattaaatcgtatacaaattgagttagcacttttaaaatgttatatattaatattttaaaattttgagcatttatattaatcaagtatatataaaagtgtattaatcgttctatgttcttatatatcctttgattttatagagtcaatattgtaaatttcaaagtttctttatctccacatatatgatatctagatcaagaaatgagcttattcaaatacattttaagtaatattttatgtaagtttacctttatttttctcctttttttaagatttattattaagatgttattatttaagtaatgtaaaatagaaatgctgattgatttttcggtcaactaaaaaaaatatagaagaaatacatgagagtgaagttggaaagatattaattgacacacaaaatatgagatactatatatttagtgcatgcatgagttac

SEQ ID NO: 225375 - DNA, 1858 bp, Cannabis indica
aataatttacaatgtagaaaataatattcaaacaatctattttacacgcgtataaaataaaataggcgtgcaatacactgcttgaacgtaatttttagcgtgttaaattttttcgaatttcttaaaattttatagaatgtcttaaataaatataatttatatgaccatcagaaaaaatttactaaaaaattattttggatactaaaacaaataaaaaatatattgatatgtatatccattttaagtgggtgcattatataaaatttccaaaactattacatccatgtaatattttcattgatgcacatattattatatcaacctatgtgcaatatttactaattatggtattgacttcattatatagacacaacccctcatattcaatatatatacacaccccctcatattctatattaataattatatattaatattacatctcgaaaaaacgcaaaaacaaagggcattaagaatatctcggtagaaataattcaataaaattaataaataaggttattaagtcttttcttggactcaatgtctggtcttatgacctgtgtttgctctgtttgttagtcagttgttaaaagtatttcttgttttttctgggtttcttgttgcacgattgggatggcagatcaggatattatggaaatggaaaatgagtgtgaccatatcactctaactggaggagatgaagatgacggggggctgttatacgatacgaatgacaaagatttgacggagttcgacgatcgttggtgtttagtgggaagatttcttactgaacgttctttggatttcatggctatgcaacacaaaatggcttcgttgtggcgtcctgggagaggtatgttcgtaaaggaattagatgagaacttgtatctattccaattctaccatacgatcgacattgaaagagtggtggagggcagcccttggacttttgacagagttccactaattttttcaaggctcaaggagggtgaaataccaagatctgtggtaccaaatactctggatttttggatacaattacatggtatgtcaactgggttcatgtctgcaaaggtggttaaggatattggtaactatgttggtacgttcgtagaggcagataaaaacaattttctgggaatgtggcgcgactatctccgggtccgagtttctgttcgggtggatctccctttgaagcgaagaatgaagcttgagaagaaaggaggagaactgtgttacgccaatttcaaatacgaagaccttccaacgttctgcttcatatgtggcattcttggacactctgaaaaattctgtccaaaactctttgatactccaccacatttgatcaagaaaccgtatagcttggagttaaaagccatgccacgaaggagacaacacacgatcggtgcgaagtggcttcgacaaagcttcatggctagaggagaagactccggtgactgtgcgcagggtgaaccgtcggggaagggctcaacatcagggggcattaatggcggtttcaatcaaggcagaaagattgatacaccacgatctgtgggatttgatggaggcaatcaaggaggagaattaggcagaaataatggtaaatttgccattaattccaatggaacggctacccattatgaggcaagagatttgagcatgaatggggaaatcaatgaggatctggatggtgatttaattatccttgattctaaaaggaaaagacttgctgagaatttaaaaagtgggccgaatgaaagtgggccaattgaatgtattggggagggtaataatattatcaatgttagtgagacaaaaaactttgttggggcgggctctgttgcacaggcccgccaag

SEQ ID NO: 225376 - DNA, 4476 bp, Cannabis indica
attactttatttgattttcagatgctggtcctccttcacctgctgatcatcttcgacaggttttctacagaatgggtttaaatgacaaagtgagttttcagtggctctatattaggtttctggacatcatttcagtgttcatgttatgtaatttttaaattaatctacaggaaattgttgcactatctggtgctcatacactgggaaggtccagaccagagcgtagtggttggggcaagccagagacaaagtatacggtatggaaaaatccttctgtttgttaatgttgaaaactgttctgttacgagcctacgtcgatatgctttttctttttcaaaactgctttgtatagtaagaggagaattaggggtggatcttatagtaagaattgatagtagtaatttattgtgggagaagtaataaaaatttgacacatgtgaattaggtttttttcgtgagggcaactgaacaatttggtgattatctagccgatactgcaatgtactatctactattatgtaataatgaaaacagtagcaaccaacaatgatagcttactagaatatgtttgttttgcagaaagatgggccaggagcacctggaggacagtcctggactgcgaaatggttgaagtttgacaattcatactttaaggtttgagaattatttgatatttgttaaattggaaaatatctattttggggattcggacttcagagtttctctaattgattgttttattgttctgtacaggatattaaagagaggaaggatgaagatctactggtgttgccaactgatgctgttctttttgatgacccgtctttcagagtaaagtcaagcaactcatacatagcatagcatagcattctctctccttctcttgtactaacaaattattacatgatttgcaggtgtatgctgaaaaatatgccgaagatcaggaagcattcttcaaggattatgctgaagcccatgctaaactcagcaacctcggggcaaaatttgatcctccagaggtttgttggccttaaatgcgactttttttgccttttttttttaatgtttacccagcctacataagccaacagttgctttaactattaaatgtatgtaactcttaaatcttttattatgttttctgatcagggtattgtgctcgatgacggttcttcaaaacctgttggagagaagtttgtagcagccaaatactcgactggcaaggtcgtagcaataaaaaacttgcatctcattgttcattttgtcaaattttatcgagttcttatttcaaattatagcacgatagattttcacaacggaaagcatatatatttaaattgttcatcgtttatggtttattgcaggactaaataacaaagtgtcatagttttcttatgccgtgtgttttaaataaaatacaagatgaagcttttttcaaactataaattggaagtcttaaaatgaagaacaggaataaaaaagaaattcaatagtgttgttacctatttgaattgcagagagagctgtcaagttctatgaaggagaagattcgtgcagagtacgaagcggtcggtggaagcccagataagcctctacagtccaattattttctgaatatcatgatagtgattgctgttttggcatttttgacatcactagttggaaattagatcttgggactttttttttatatataaaaattatattacattgctggttttgtattctaattcatcggaggcgttccgagttggaaatggttccttctgttctttatgtttcaaattcataacgtgctttccaaggtaacgttttgaagggtttaatccctcgagaaacaagatgaatgtaaatcttaacattgccattgaaacttatccatagtaaattgctgaacaagaaattaacacaaagctctgcctcttttttagtggaccaagaaagtagggctgagtaaatttgagtcaatttatgtctaatggtcgtatgtaattggtttattagggaagagattaactattttttttttttttttttttgaataaaagatgtaatttattaaatcatctcttgaccaactacatcaagaatgctactcgggatagaagttcagccggaaccatgaaactctagctaagccgtgagcaacacgattagcattaataaaatgtaaattaacatttttcaaatcaaacaacaggatttgcaatcatcaatacaactgtcagcaggagatcatattgatcgagcttcgaatgacttgaacagtgatgagactatttgtttcaacagttacattgggaatatttagcatctttagccaacttaggacctccttcactctaatggcctcgacaagattcgtatcaatacaaccaacccaagaatctgaccgagtctgtaacacatgaccccttgcatcttgaaaaacccagccataactaaatttgctagcaccctcaaataatgctgcactacattaatcttgtaattatcatttaatggagcacaccattccccgtacccttcccccatctccattgaaaaaagagaaggattgaaggatttgttttgagcaaataaccatttatgtattgaatggagagaaacatgttttcttagtgaaaataaacattaatttattgaatggattcatagcttctaaaagggtttataacatcatgtaaaagctgattttgaaaaagagaaatcggttacagatattgacattcacagaggatactgttgaggtaagggattatttcttcatttacagatagtcactgcaaaaaaactaataagtgggttagagattgaaggctgaagacaaaagccatgaaaggaaaaagttggagtggactaaacaaataaatgacgccgtctgtgggaatcgaacccacgaccacgtggttaaaagccacgcgctctaccggctgagctaagacggcttgttgctgtaggaacttggtaactttagtataaaacttgtaaaaacatagatatgggaactaggaaactaaagaaaattattggcaactatttaattttgtaaaataaatattgtttagacatgaagaaagaaataattcaaaggtgttataagttataacagttcaattagaaatgctaaaagacaatattgatgtttagtaatttttaaagtgtaatattgttattagtgtaattaaattgatctaaattattaaatttttattttttatttaaaattaatttaaatatactaataaaaaagtgacatggataataacttaacacttaatgaccatatacctataaattactataaatataatttatgtattattatcatcaaaaattaagctcaagtacctattcataattaagaattaaacttaagtatttacactacaaattactttaatttttatagaatatcgctgactaatcgtaagcaagtagtaatattagacaccgttggtgccaaataacaattctctgtcaagaatggtgtataaacaggggacacaatcttctttgctattgcagccacacctaatcattaccaatgattaggtgtcctttcaatcatcacagaatattccctttgtaaaagtttgttatgcattgatttctgtaatgccatgtggcaaacctgtattggttaactttgtactccctttacctatttaatgaagctgctgcactcagtctcaattgagctgagaatttcattcttctctattttttatcttggtatcagagcggctgaaccagacctccatcaatgtcgactggacattctcagactccccccactccacctcctaccaatcggaatcctaccgctcaagcctcgactggtacaacaaatgccagctcctcccaaaatctaaccagcaactacacacagcccttcaataccctaaaccaaccattctccctcaaacttgacagaaacaactttaccctatggaaaacaatggtgtccactataatccgtggtcacagacttaatggtttcgtgaatggaaccaggccgtgtcctcccgagttcataccagctgaagtcactgcagaaggagatcaagagaccgaagttatgctcaatccagagtatgaacactggattatcagtgaccagctgctcatgggctggatctacagttcgatgactgaaactattgcaacagaagtcatgggttgtgctacctttgctgcactttggcgcgcgctggaaaatctgtttggagctcactccagggcaaaaatggatgagtatcgtacacttattcagactacacgaaaaggtactactcccatgactgatgatctaaggcaaaagaaaatgtggtccgacatgcttgctcttgccggagatccgtatccggaggcacatttggtttcgaatgttacatctggccttggtattgaatatctgtctattgttgttcaagttgaggcaaaacctaacatctcttggcaggaacttcaaga

SEQ ID NO: 225377 - DNA, 3513 bp, Cannabis indica
ttaagttgttcgagtgtttcgttcttattgtattactaatgttggcttcaaaataattctttttaatttatactgtggtttgcaggagtcatggcttttcggaaatatgttccttctagtgatgcaccaccttctataactatgaagcctttggaattctcaagtaaaatgcatgataatcctcggtttgtggatccagagaccgcccttgctgtggagcctgatgtagatatagatctcagagaagtttactttcttatcatgcatttcctttcagctggaccatgtcgtagaacatgtgggcagttttggaatgagcttcaagaacataaacttttacccagaagatatcatgcttggtactcgaggaatgatgtgcttattggagatggaaatgatgatggcatgtcaatccctttgagttatagaatgttggtggagaggtatgcttcactttgcatctttctctcttaggtgtaatcaacattttcatcagtaaacaattaatatgcccaagatttaatttccaagtaacacacatggcatttggttgctaaacagctttcctatgaagctgattgttgtgtgttattttgcttatttaggtattctcacattcaaaaggatcacttggtaaggcttttgaagcagttgcttctaagtgcagctcctccacggagtataagcagtgcaaatcccccaaatgctgctgatgtacctactttagtgggagttggttctttttcacttttaaacggtaggttaaactggtttaagaatttaggttttcatggcatgcaattgtaaagcttaattgttatgttataatgtaaacaaataataatgttatcgtattaacttaggctttgttttttcttcctttaagttattatatgatcgatacttgatgcacccttattatttagatgatggagatacttccaaccaatcattaaggaaaccccctgctcatatgcgttggcctcatatgaaagcggatcaagttcgtgggctaagtttaagggaaattgggggaggttttactcggcaccatcgtgcaccatctattcgtgcagcttgttatgctattgcaaagccaacaaccatggttcagaagatgcaaaatatcaagaagataagaggacatcgaaatgctgtttattgtggtatgcttttttaattcaggtctattatgtcaaatgattgcatcctcctgacctttcttttgtacataaggcttgttttccatgctaggatgtaatgtttttgtgtgatgattttgtttatttttggagcatacttgtaggtgtatgatatgcgacaaatggaagttgcaattttttttcttttcttttgagaagtatgctcttgattgagtgtgtgaaattactgcagccatatttgatcgcttgggaagatatgttattaccggggcagatgatcgccttgtcaagatctggtcaatggaaacagcatattgcttggcaagctgccgtggtcatgaagtaagtttgtacaatctctacagcataatttgcttatgtgtcattgttatctttgtattattttttcatctttgtttttttaatgtttggaagggtgacataactgacctggctgtgagtgctaacaatgctgtagtggcatcgtcatcaaatgactgcattattcgagttgtaagattaagatttcccttctactaagcgaactgcgtcatcctttttctcttttgtttattgatttgtgacttacattttacttgagggtcaatcatttgtacatttttggtctgttttagtggcgtatacctgatggcctaccagtttctgtactgcgggggcatactggagcagttactgcaattgcatttagtccgagacccgggtttacctatcaacttctgtcgtaaggccgtctctcttttttttctgtctcctatttctaccaaagttattctgttctctgtaaaaattattctaaccttgttgatattgatctctttttttgtcagctcatctgatgatgggacatgtaggatttgggaagctagaagctctcagttgagtccgcggatatatgctccaaggccttcagattctgtggctggttagttgctctcttaatttcatctagattccaaatcatagtttgtgaaaggaccttgtttggaataatatgattagttgcaggtagaaacaatgttccatcttcaagcactggtgcacaaaaccatcaaattttttgttgcgcgtttaatgctaatggtacagtctttgtcactggtagctcagacacacttgcaagggtaaatcgttctctctctcagtatttttggtcacattcttgttcagggaaaggctaaatgttctgtgtatggaacaaatttcatcagtaatcattttctaagtgaattacgacattcaagggctattttcttgcaggtgtggagtgcttgtaaacaaagctctgatgacgcaaaccaacctaatcatgagatagatgtgttatctgggcatgagaatgatgtgaattatgtacaatttaggttagttagtctgtcaatgtagtttccattattcactgataaatatattcgtactgatggaggctctctctgtattgcagtggttgtgctgtagcatctagatttatgtcagctgacaacatgaaagaagagaatgttccaaaatttaagaattcttggtgtgtcccttgttccccatcatttttaccccttttaaaattagtaacatagctttttatcttgatttgtgttgttttgctttgtctaccccttcttttaatttcagttgaagttttgggtaataacattttacggtgcttattgtaatgtttgtttccagcttcactaatgagaacatagttacttgttctcgtgatggcagtgcaattatttggataccaagatcacggcgatcacatgtgagttgccacattatagcatatgcatattttgtgtgtgaattaggagtgtccctcatataatattactcttttctttttctgtttctttttttagttaatattccccaaaatttgagcattggagactttagtggaaagttttatcatgaactcttttaaatgtttgttataccatgaattctttttttttttaggagtctaaataaaatgtttattgccatttttatgtttcaaggggaaacctagccggtggacgcgagcatatcatctcaaagttccaccaccaccaacacctcctcaacctccacgaggaggccctcgtcagagaatacttcctactcctcgtggtgtaaatatgataatttggagccttgacaatcgctttgttcttgcagctataatgggtatgttgttgattgttcttttgttgtaataataacaatccaaataattgttagtattatagttattgttattgctgttgttggttggttctttagctgtgcatgtgttttgaagtttctataatgacccctctctatttatatttatttaagggtaaatacc

SEQ ID NO: 225378 - DNA, 2359 bp, Cannabis indica
ctaaacgatctagaacgttgatgatgccttagttttatttttggcacttattctaaacacattgaaaatgtattatttaaaatcatttatacttattgtattttattttataaatgaagaatctttctctgttgcattaataaaagttaaattattaattagatatttaatgtcaaaaattaataattagtatttaaataatgttttattgaaataattattttgatataattatttgttaattaaaactaatatttaaatgtaagaaataaattaattataacacaaataaagaggaagaaattatttaaattcattaagttttgagataatgaagagtataacgctagctcatttctatatatagggaattttggccagggtacttggagacaaagtcttggctcttttatttattgtcaagtgggtcggccctagaggtctactcaatttggccaaccctcgaagtccactcaagttgggtaattgagatggactgacctttgaagtccacttaagtggactgacccttgaagttcatttaagtgggccgaccctcaaagtccactcaagtgggcttaccctcgaggtccactcaaatggatcgacccttgaagtccactcaagtgaactgactctcgaggtccactcaagtgggtagacccttaaagtctactcaagttgactgacccttgaagtccaagtggaccggcccgtaaggtccatgcacttgagtcgactttcaaggtccatcaagaccacaagcactcgtggacttgggttctaaaccaaatgcactctcatgacacgtgctactgaagttaccatgaagatatcttctaaaaatgataaattgtaaagatatttatttttgaaagattattttattattattattgtatttgaaatgtaacttaacccaagttgagaaaaagatttatgtattaatgttgaaagggggtgaactactataaaaatttattgtttaccattgtcaaatctgttttcataaatccttttatattttggtcgacattcacttatatttatcttgcttgtttacgattttcttagatctattgatgaaaaattgagtcatgacatcacattaatgtggtgccctaattagttagcaacttcccatattatttattaaattaaaatatgtggaacctaactaatattaaaatgcatcaataacagtatgtcacgtcttgtagtacttggcatcttaagatatcccttagcattgtgattgtagctaggtataaaattgtatttgttgttcaataattcttctctttgggacaacaaatgaaaaatatactatgatcaagcattaacgaaagacctttataattactgaaacgctccaaacacaaatctttttacaaatattgaagtcttgtcctattgacaaggttggtatttttgtctattaagttgtgtttatgttctgttcttttctatatggctacgttcaatcatacacactcaaacatggaggatcgttattcttctatgaccctggaggaagaagaaactggtggattgcaatatggggtggatgatgatagtctttcggagattgatgataggtggtgcctagtgggaagatttatcacggatagagaaatcgattttttagctatgcaacacaaaatggcttaccttacggcgaccaggtcgtggtttatatgttaaagagttggaacctgatctctactaccttttccagttctaccatgaagttgatattggaagggtgatagagggcagtcctatacttttgataggattcaactggtttttcaactaaagaggggggagaatcctagatcagtggtactaaacaaacttgacttctgggttcagccgcatggtatgtctacggagttcatgtctcagcgtgttgtaagggatattggcaattatataggcagttttgttgaggccgatcccaacaattttttgggaatttggagagactatctccgggtgcgagtttcagttcgtgttgaccagccattgaagtggaaaatgaagctagagaaagtgggaagaccgatttgctgggcaatctttaaatatgaaggcttaccaactttctgcttcatctgtggcattattggtcatgctaagaaatactgtgagaaactctttggtactccttcacacctattgcctaaaccttatatcttggagatgaaagcgactcctcggagacgcaatcacaccataggatcgcgatggttaagaagtggccctgtttcaaggtctacaggcgaatcgtccaatggaacgtacaggagcagcccggagcaagttcgacggccgtcggggggggaggggaaggatg

SEQ ID NO: 225379 - DNA, 5463 bp, Cannabis indica
ggataaatggttggcttgggcaaagtattggtacaacaccacctatcattcttccttgggttgtaccccattcaaagttctgtatggccgtgacccaccctctttggttcgctattcgtccgggtccacgtcggtgttggccgtggatcaatggctcgaggagagggactcattcttggatgatttgaaaatgcacctcttgcgcgctcaacagaaaatgaaggttgtggcagatggctcacgaaggcaggtggagttcaacatcagggatagggtctttgtcaaattacgaccctatcgccagaaatcactcgttggccataagaatgagaagctgtcagcaaggtactatggtccattcacagtcttgaagcgcattgggaaggttgcatatcaattggatttacctccttccgctgccattcactcggtttttcatgtgtcacaactacgagctgctgttggagatgcccactcttccccgactatccctcctactttgtcttctgatttggaactcattgttgaaccaggggagctgctcaatgtgcgctaaaacccctcatccgtggaccaagcagtcgaggttctgattcattggaaggacctgcctatgtttgaagccactagggagaaatttgatgtcattcgggcacaatttctagtcttcaaccttgaggacaaggttaaaaagtttgggggggggggggcaatgataggaatgctaagcctcctatctgattcacctatgctagaaggaaggttggaccattgggtcaagggtaggttgagtcttttgactgggtgagtttgttagagggtagtttgggaattgtgggggttgttgttggccttttagtgccaagggaagctatatttttcgattatgcaagtactgagaagttctctacatcatgagaactcttctctttattgtatgagactatagtctccttttccccttacaattcaataaagcttccaaaaattcttcttcatctttgctgttacattcgtattttactgctatagttgttaatcaattaccaggtgcttatcaactatcaagagtaatatgatgactaatgaaaacttggatgtaaagtgaataaagaaatcaatagatttgtgaagagaacaatagttcccgtcaacatggctgctaccattatcaccattatatcttgaaagtccagagcaactagaaaatgaggcactcatgaggttaccattgcgagttggattccttggggcttcacttccgtcgtgaggcaaaacatgttgattttcccagggaaggatgatccaaacttaattctatcaccattcaagctctccaccatccataaaaagaagaaggtcttacgaggaaactttaaatttcccttataaattaaccttaacgagagcaggtggcaccaagggcaggaaatgaaaaagggaattttaaattgttgagctggggattttatgactgcccactgaagccctaagacacaatgcttgcacaaagtatggccacaccacaagacatagggtacattctcaacaatgttgaaagattcccagcatatgggacactctagtccttcttctctgctactatttgagcagacatcgtcatctgaacactctaaaaaagcttgactcgaaaagttggagcttttctttggtccaatacttgaaatggcatttgaagcaaaaccccacatcttaaatataataactgtacaagataactcaaacgctaaaattgtcaagattgcatcattcttttatgaaaccccaataggccatgaactaaactgaataaattcctgcttttgtttatgctatcaatagctttttcccccctgatggactataataaagaatagtttaaaaaagtaattaagtcaataaaacgagctagaagcaattatcattacaattgaaattatttcaagtagacaaagaagaaaggaaaaaactatatgaatatatttttatttctcaataacagtaacatatattcatattggaacatgttaacaataaaagtcccgcgttgtagtttgtttgagttacggaacaaacaagctaataaaagtattactcaatcaatttctcatctcactgtttattttccaaaattatgtaaatatatatatatatatcaatgttatttttgccaaataattttgaaaatgagaaaaccatctttccagttaccaatattaatattttaaatcagaaaattgaaattaacggttgcatcgcaaccaactactcaaatacaattcgtagcagacaaagttcgactgaagcagtaaattaatacaaatatcaaaataaatcagtgcaatgaattaaataaaaagattgatatatatatatgcgcaaaagaaaattgagaaagagatttaagcgaaggtagattcgaataatcaacagtttggaaaagacattaactccagtgaggaaaatattttacctttgttgcataatttcagtaaaaaaatcaaagatttgaaatgatgaagagagaatgttgagcagagatcgaagcagaagaagtcgcacactcggtcatcttcttcttcttctctctgtagtatggtgttttcttctatttatatgaaaatgtataagagatttggtagacgacatcgtttgggtctgcttgtccatttcttttggagaagtaatttccgccgtgggttttttcgtcctcggaagtagtacgaaaatgagggtgtattaggtattataattttagtacagaaaattagttcaaaataatgtagacattcatgtaaataatgacaccatcactcgatctagatgtaaatccgatccgattgtagccaacaaccacgatttatgatttgcataaaagaaataaatattaatcatcacttaattttaatatttatttatttctcattcattttgtttatgtttctgtttgtttttctaataggtacttttatatctcagaaaagtcctctattagcaaatactcctcatcacttagttttaagttctttatatatatatatatatatatatatttgttatggaaaatcatacatttattcaaagaccatctcagttacaaataagataacaaatcacttggaacagatttaaaaataaaattacaatcaagaaataatatagaggctctagcaaacttatgagccgccatattaattgatcgtctaacaaaataaacaaaaatattttttttagaacattaagcatagtcatacaatcactaaccacttgaccaaacatggaaatcataacaattgagttatgtaaggcttgaacaaccaaaagataatcggtttcaagtatcacttgtggccattgacacgccttgatctagcttagcgcttcttggactcccatgacttcgaatatttcaggagaagactgaccatgaaaagtcttagtgcagccttcaataagcaatcctcacccattacgagccacgaaaccaatcccaaattgttgggtctcaccaaacatcgctgcgtcaacattgaccttaacactattttcttgtggagccatccaatgctctgctccatcacttggtagaaaactagtaatgaaacctccaaaccatcattttgagcatttagccattgattaaggaagcctcttactaacgaaatgatgatatccatacctactattttattccgccaaaccctatcattccttgtattccaaatagcccaagaaatagcaaccaacaactctttttccttccaatctagcacttagaattttgcaacacactaagcgaaaaaactcagctcctactgcacacccgtgcctataccaacccgatcccaacaaagtttagtaactaggcaggttaccaaggcgtgcaaaatagattcatcatccagtgaacacacttgatagaggagttaacctcaacgtgctttgagcaaagttgagccatggtagggaggcaaccgttactagctctccaaaccagatttttcatctttgggggaagcttgaggttccacaatttcttccaaatttattcactgaagactcctctaagttcacctctcctttaagcttttggatcagtttataggcgcttttaacggtgtacaaactagataattctctaaaccaaattagacaatcttgagctaacatagcttggataggaatttaaagaattaactctcggtcttgtgaattaaataaatcattcaacacttccaaatcccaatccgatccatccattgtcataagattggaaactttagcattcataagactcgtatgcaaagaggttactaatggatttcctttatcaggtaaccaaggatcacctaacactaaaatatttttgccatcactaacagactagcgaacaccattagccattaggttttgggcctcaagaacactacgccaaacaaaactttgattagagccaataactgctataaggaaagtacctttaggataatacatggatttgaaaactgagataccaaagattcaggtttaacgagaaacatctaaccttgcttgccaaacagtgtcaaattaaagtcccttaaactatgaaagcccattccaccctctgttttgtgattacaaagtcgtttccacgacatccaatggatactggtgttagtgctagacgatgactgctaacaatacttagacatcaaactcttcatttctctcgtgacttcaagaagtagtaaaaagacattcatggaatagcttgggagcaattgagcaacaaactttattaaaacttccttgcatgcttgagatatgaactttgttccccaaccttaaagtcttttccgaaccttctcctttaaaaaacccagtgcagctgttttattacgactcatagagcttgcaagacccaagtataagcttccctcaagggtagcaaccattcccaaagatctgctaagtctttctgtcaccatatccatggtattggagataaaaaaaaatatagaagatttagagaaattgaccttctgactcgaagccaattcaaatttgtggagaatttctttgattcgagtatcctccaattttgtagccttacagtaaaaatagttatcatctgcgaataacatgtgggaaatcctcgaagcactattagctactttacaaccatgaagccaccctctttgctcatacttgcgaagtaatgttgagaagccctctacacaaagaataaagaggtaatgtgaaagggggtctccttgacgaatccctctcgaaggaatgattggtccaatttcatggttcccatgaataactttatacctcatagatgtaacacacctcaaaactagttggacccaactctcaataaatcctaactttcataacatcgcttcaagaaaagaccattcaactcgatcatatgccttgctcatatcaagtttgagagccatgtaaccatttttt

SEQ ID NO: 225380 - DNA, 1384 bp, Cannabis indica
tgcgcatccctaattctgactcgagaccaaatcatttttcacagtgaagttaatttacaacaagcttaaagactcttaaaatcaattacatgccagatcaactagttcaactctcaactaccaaatcagtttcaacaaataaaactcaacaaaaattaattacattcctaagccaactcaaattgagctcttccttatacttgtaaaaactaaactcaagattgaaattttaaccttagaatcattctgcatcagttggaaagagaaaggggggagagagagggccttcgtgccaagtgtgttcatgtaaaagaaagaaaagagaatgagtcactacgtaaaagaaaaggaagaaatcgagagaaatttagggtttactagtcttacctctgtggctagaaatccaagattttaccaggtgttagcaccattgtttatagtggaaatcaatctcttctctaaggagagcttgacagaaacgtagtccttaatcggggtgaactttggtaattgatttgtgttgtgtgttcagagatgtttgaagcttgaacaggctctgttagtgtttgaatgttctagatttggagtcttttgtgcgattcatgagtaggtgaacatgctttgtgttttctttgttttttttttttttaaattattatcaaaacaaaatgtagttttgtatgtatggagtgttgtttttctcttttttgattttgcttaaagagaaatgtcaaaattaaccttatgttggattaatcttttgagttattggtgtaggtaaataggtatttttccttacattagatgtagaaagaaatttcttaaaatatcccacatagaaacacaattgaagcaatgtttgatttatgtagttaaaatgatgtgcaaataacaattataacagatatggtcaataaaagtcaccgtttttaatgaattgtctcttaccgtaatcaaaatataaagggttcaagttcatccacttcaagtcgtgagcactccgttgataatcatctcaatttgctaaatccaacaccaaaacattatgctcattcagccaaattattctcaacaataacactcctcataaaggctaatgattgtaaaaatcgacgaaacagcaaagaagaacttatgataagaaataatgaactattgcacacgattcaagtttttaaagaaatttaccagaatagaataaaacatatcaatattctactatagttttcttaagcgaaaaaatctcaaattttaccattaaacgtaatatcttataaatttaaataaatagataaaaaaaagattccacttggtagatgtgaaattcatatgtatatttattataatttgataatattgtatagttttgtaaagatttttttgg

SEQ ID NO: 225381 - DNA, 2413 bp, Cannabis indica
tattgaaaatggcattgattttactcactcttgtccccacacctctgctcaaaatggtagagccgagaggaaacacagacatattgttgaaatgggactaactttacttgctcaagcaagcatgccacttaaatattggtgtgatgctttcatcacagcagtttatttgataaatagactgcccacagctgtgttaaataacatttcaccattcgaaatgttacagaaaagaaaaccagattataaatttttaaaaacctttggagttgcttgctatccttgccttagagcctaccaatcccataaatttcaatatcattcaaccaagtgtgtaaatttgggctatagtgaaagttttaagggttacaaatgcttaagtagcacaggaagaatatacatttctaggaatgtaatttttaatgaagctgagtttcccttcaaaaccggatttctaaacacttatcgagcagaacaaagtgttagtgttcaagttccatcatggtcaacattcataaatacctcatccaatttttctcatgatcagccacaacaaaacatcaattctcaaactgataaagatcctgacttagaagaacctggagcatcatcatctcaatctgtaacctctgctacagatcaaaattctgaacacaactttgatcaaggtgaaataaatgctgctgttgaaccatatgaagaaccgactgcagtgaacactcaggtcactgaaactcagcctagtgcagcacctgacagccaacaaccagctcaagttattccaactcatccgatgttaacaagagcaaaagctgggatttttaagcccaaaacttacctgagtaaagctcagttcagtgactattatgcagaaccaatttctctcaaggaagccttagaacacgaaggatggaatggtgccatgagcgatgaaaacaaagcattactgaaaaacaacacctggatattagttccaaggctgcctggtatgtatattgttgataacaaatgggtttatagagtaaaattgaatgctgacgacagttttcagagatttaaggcgagattagtcgcaaaaggctttaatcaaaggcctggtgttgattatggtgagacattcagtccagttgtgaaggcttgcaccattcgaattgtgctgaccattgctgtagcaaaatcctgggaggttagacaactcgatataaataatgcattcttaaatgacactctgaatgaggatgtttacatgaaccagccacctggtttcgaagacaaaactcatcctgatcatgtgtgtaaactgactaagagcttatacgggttgaggcaggcaccgagagcttggttcgacaagctaaaacagacattgctaagttggaattttgtcaattctaaggctgattcatcattatttaactacaagactgtgagtgaagttatgcttgtgcttatttacgtagatgacataattatcactggtaataactcagaaaaattgcagcagttcatcaacaaattaaatatggcttttgccttaaaagatctcggatcactcaattatatccttggcattgaagtatacagggatgacacaggaatgtctctatctcaagccaagtacataacagagttactaaagaagattaacatgatacacttgaagccatgtcctactcctatgtctcttggtaaaaccttgtccattacagatggaaattttctccaaaacccgacagagtataggagtttaattggtggtttgcaatacttgactcatacaagacctgatctcagctttgctgttaacaagttgagtcaattcttgaaagctcctacagattgtcattggtctgccgcaaaagaattcttagatacctaaagggtactctaaatcatggtttgcacatcaagtatagtgagaggatgactttaactggtctttccgatgctgattgggcctgttgccccgatgacagaaagtctgtggcaggttattgtgtgtattttggggataccttagtgtcatggtcatccaagaaacaagctgttgtgtctcgttcaagctctgaatcagagtatagggcccttgcccaggtctcggctgagttgacatggattcaatctcttctccaagaacaacagttccctctcaaagacactcctatagcttggtgcgacaacatgggagccaatgcacttgcttcaaatccagtctatcatgctcgaacaaagcatatagaactggacattcactttgtaagagacaaagttttagcaaaaaccttggacatcagatatgtaccctcacacgatcaaattgcagattgccttaccaaaagtctctcaagctcaaggtttcattttctggttgacaaactaagtgaggtttgcatcccactcagtttgagaggaggtg

SEQ ID NO: 225382 - DNA, 4582 bp, Cannabis indica
gtttctttaattcaaaaaactgtatttccaaaattttctcttctaaagaaaaccaaaacagcaataataatttataattaataaaagtaccaaatcctgatgaatgatacatacaaaagaaaataatatatgagaattactatgtataaatcaaacgatacacatataatataaaattcggatgatttacacggttgcatgcagctcattttataatttaaaaacaaaaatagtaaacttaaaatcgattgttttattcttttaattggcaaaaggtgaacgcgagagtagagcgcgtagaagaaagcggtgggtgggagtagcaccgcacgcaatcaatagtgggtttgcagccgttagataatgataataatgatgatggtttgctctctcgacagcccacatgccacgtaattcgggaactaattttactaaaaacccaaccccacgctctttcttccttagccgcccctctcgctctctcactcactcactaatcctcactttctctctcctctctcatagtcaaatccttcgctgactgctctctctttctctctccctccttcctctataaaaccaaacaccctttccttcacttccttaggtcctacacacctcctcttcttcctaacatttcctttcgttttttatttcaaaaaaaaataagaaaaaccatttttccttttatataaccgaccgagtgatatagtttttattaatggcgcctagagataagtcgtccaccgccaacaccgcctccgccgccgttaaacttaacggtaacgtcaaggaggtccatttcaggggagtcaggaagaggccatggggcaggtacgccgccgagatcagggacccaggcaagaagagccgggtctggctcggcaccttcgacacagctgaggaagccgcccgagcttatgacaccgccgcaagagagtttcgtggtgccaaggctaagaccaacttccctctcccttccgattgtatcaacgagaataatctcaacgttttgaatgttaacagaaagaatcttaaccagagcccgagccagagtagtacggtcgagtcctcgagccgggagccggctctgatggttgaatcctcgcctttagatcttaatcttggccacgggtttggctcggccaattcctccgccgtccggtttccgtttcaaccgctccctgctgtcggagccgtttatggtatgccgacgactaaccaacaagtcctgtatttcgatccgtacgttcatgctgggttggtgaatggtcatcatcatcagcagcttcaacggctgagatttgatcatcaggcggcccgtaactaccatgccgcttctttcgccggtggtgctcagagtgattcagattcatcctccgtcgtcgatctgaaccataacgatcaacctcgtagaatgttcgatctcgatctcaactttcctccgccagaagttgcgtaattttttggtcggtatttaacataatcgctggagatcgtcatcagattcagattccgatttcgtttttaatttaattttaaataagaaaaatagacaaaaaagaaaagaaacataattgaataggaaaaaaaaaaaagaaaaaaaaacaaaacaaacacagcttgggagagcaagtattaacgcttttttatgtgaatacaccaccgtttagctgattcggtccccttttttttgttgcaacagtaaaacgactgagttttgttttgttgtgatttatcagctagaattcttatttaaagttttacatctcatgtcggcaatatttatttttttaatttttttttctcattattgaatggacacacggataataaaaaaaatccttaatcttctttggtattctatgttgtaattattcgaattataatttaacgctacagctactccattttgattccggcaaactgagtattatcttatctgaatctgatctatttccgcacgtgtgattattatccgtacacagttgcacacgagttttattgtttgaagagacgaactgatgaacaatatttccgcgatgcctttgtttttcatcctttaatcacgttcttgttgggttaatttccctttgtcctgcctaaaaaaaaaattcctcgttgctaggttagcatgcgtgaggctagagtgaaattaggataaacaattatgctttcacatttatattaatttttgtaaaagtgattttactcttctattaaatgcaggattccctaaaagaagataaagtattattttattaagggtaatttgctatctaaataataaatatttaagttaaatttttagccttaatatttaaattatattacggatataatgattaaatgtaaataaattattatgtgacaatctttgaatagtctacactattaaaaaaattagtttaaatatatttataaaaattttaataaaaaatatcaataaaaaaaatgatatgtagaaatataagttagttattaatactccaaaaaaattaaatttaaatatttatttacaataaataattaaggtatttatactgtaaattattttttaagttaaattttttaaataaaaagttaaaattaattattttattaagtaatttttttttctaaatgaaaagttaaaataattgtaactggtcctttactgaaggggtgataagccaatgaaatcgacttaatagaaatgaatgcgtttttctttctttcttttgtaaagtaatatgaattgatgttaaggacggtgtacgagcattcagaagggctgaattgtgattgaaatgcctgcaaaaattttattatttttgtaataaaatagcctctcttaagaatatgtataaattataaatgtatatatatttttttgatggaacaaattataaatagttggctgtaaattaagaggacacagagcatgggaggtgaagtgtttggacttggagtccagaacaagaagtaataataaatgttctcatataataataataataataataataaatgtgtaggtatgtaaacgtggcaatccgtggttgtagtgaagaggggaacatgtaggcgcgtgagtgattatgggcggttttctggttttaagaccgaaagcaaattctatgttgactgagtaataggtctcgagattcgagatgggattgtggccactgcacgtgatatacagccgtccgatcttggtttggatttattatttttaattaacaattgttaataaacaaatagttcgtaattagtccaaaaatagagtttgcttaagaacgcgaaaaaggtggggaaagggagacaaagctgggtcccacgtggggaggcgggcgatgcgagtaaaagtggggaagcgcggctgcctcttttggtgggcccacctgcccttttcatggtcgtatatatctatgaacaagatttttgctttcccattatttatttatttttgtcaggactttctcattatttattatttaatattatttaatcaattccatcaagataagctaattcaccaccaattttggcttctttcgttgttattaatagtatgattattacttttttgcgtgatttggaatataaacttaccttctccaattaaatccagataataacgataaaaaaaaaattcgttacaaagaaacgaaaacaagggcaagctaacacgtcttccactatcgtatttgcattgcttttcaatagtgaaggttggctcaaattgcattttactttacgttataagtttatacatatataattccccaaccattttattagatgattcatatttcaaaataaaatttcatttactttcggagtgaaacaagcaacacaatacttagaattgctaaattgtagcgcatcaagaaatggttgctacctctaggaatatgtttggcgcgtaataatgggcccatgaaatgaaagcatcttaaatatgaaaatattatattttaattttacaacacaaaggataaagtaaaaaaaaaaaatacatttgaataaataaatattaaaaaaaagtatagtacggcgcagagaaggggaagccaggagtgagggatgacgtgtcggatagagacagacagttgcgccggcgggtcggcgtgttagtgaaaaagctgttggtatgtatttgtggggtccgcccttttccacatatctcccacacggagagcggagaaaaggtgcctcgtgaggcgccacgtttcgagcccaagacgaagtaaatgaaagaaacccctccaataggccatatgcataattgtaaaagcaaccgctattatatattttcttgttttaggaaatatagataataattaataaaaaaataaatagcggtttttctttttttattgttttaataatggtgggtaaattaaaattataatatactcagtactcacctctaaaactgttgataaatattggggttattatatttataaaaaattggggttaggtgtgggcggctgctggccttacctgcatctttttttctttagtggtgactttgttgcctctagaggtgacacctcccccactgtctttatctagaccccagcgtttttttact

SEQ ID NO: 225383 - DNA, 2719 bp, Cannabis indica
tattattattattttcattttcacattactctttaagatgtatgatttgtgttttgagtttcattggcttttgcttctttggttcaccatgactagtttgtaattcaatttggtagtaagttaaagtaatacatgatatgatgtttctcaatccactggttatgtttagttgaaggacacttctcagatcttccttgtcttttattgttagaattgagcattgatgagagaaaccatcagttaagcaaaaaagataaaagtattaaagaaatgcagaagataattcaggataaatcggataacatttcgttgttacaaatggagataaagttgcttcaggtaaggcctcattattcatgtaggagaatctttttcaaatttaaattaaaggttatatctgtagaaactattcaagaattattgtaattaaattcatgtttgtgggaagaatctgagaaatattttaaaagatacatgtctgttgtctttctattttctattttataagttttgtcattcttttcgctaagtaaattgtgtagagatagcaatatgttaaaaatttgttacctttgatgtttctaagtaaaaagttgatccttttcacttgactctagctcaagtagttgcagggtgttgctgtaactatgagttctgaggtcgaaactctaggagggactaattaatataaacgtgtaatgtaacatcttactgtttctatataaaagacaatgaaaatcctttttgtaaccttttaattattgtttatgttatgaatgataggaatcttcatatgggaaggaatatatgagtaagtcagatcaacaagtagacgagcttgagaagcaggttagttttctataaataagcttctattattacaatttacaccttttcatgtttaacaagggttctactcctcattccaggttgaaagactccggactgacatagataagcaaaataagagaaaatatggattgggactccgagcatatgtagcagaaaagaaaatacaacagctgaatgctaagctagaaaaagtaagaactgctgttttgtagaggcctgtcttcctcttttccaataaagtgttagccaacatatattcttgtgtttagttgcaactgtcctcattatctttgactaaactttgaaaggcacgttttaacattagtcttgcggttactgtctaatctcatttatattccccactgtgcagctttatacagttaatgatgaacaagaaaccataattcgcaaaaccgcacatcttcttcaagtggcagaggtattgtttcattatttttcaacttgaaaatattattactgctggttgatattagtgatattctattttctacaggaagaactgatgaaagtagaattggagactactttactatctacaggtttgaactgggtaagaaagatcattaactgatattttgttatggcttttttactgccttaacttctgcttttgtcctctcctctccatagtcctttcaggatttgttgtgtttcttgtgcagcatcatagtagactgtcagtagctaaaatcatattttgaatattttggtagattgtgaacatcaaatagatccttgcatttgtatgttattgctttaatgtggttgttttgagtgaagctatataattgctatcatgtcttttatgactttgtaatcaggttccattggactggcttccacattggttttcagctcattttgactgtttccaggtaaggatataaatatatattgttgatggcaaaaacttgtcaactaagaaatggtcggaaaattaagattgaagatgatattgaaaacttagactcaagaattagaatcaaaacataaaagatgaatgtttagaagtatattgcttgagagtattgtgtattacaaaattttccaaccctttcttacatctgagaattgggtatttataggctctaatggcttgggatacacatgtggtccccaagggacaagctggcctcatggggctgcaaatcgcaggtgcgggaggtggtcttgcatcttgtactattgtcgggggtaaggtggtcctgaattgcagaggtggtggatttagagtacctgctatcgggacgtcaggaactgcaaacaaagtgtctccactatttgtaccctttcgtcaccttgtcatgctgaaggtgtggccgtactctgtttcgtacctttttgcgtgcatgtcttgtcgtttgattcctctcttaacggtcttctctccaacacttaggcaaactttgccttcatctctctcccgcaccctctccttttcgcactctctcctcgcattccttctctctcgcaccctcttctctctggccctcatctctctctctctctctctctctctcaccctcttctctctcgcaccccctctttcccgccctcatctctctctcactcatctctgttagcccaagatatgttttcaagaggggaggtgaattaaaatttaaattaattttggtaaattaaaacttttaacacaaaattaagcaattaaatacttaattaaataaatgcaagtaatttgataaaaaatatattataacaaatattcaaacttgaaaagtaaagagtttaaggattagaaattgcaaactctcaatttttaaaaggtttggtagaactatgccatttacgtccttgatcttcaaagctatggacctagctttga

SEQ ID NO: 225384 - DNA, 3707 bp, Cannabis indica
aataaaataaaatttaaaattataaaaaaagagagaattaaggagaaaatagaaaaacctatttgaagtgattttagaccgccatgtcactgccacattcttctcctttatatatatagatactttttaaccaagtaactttttaattttgatctcttttcttctgattcttgtcttatttttcttgaataggtgattaagcagattttttaaggaccttggcaattttggttcgaaaatacacggttgagggagcctcttggtgttcggattataaaaaaaaaattaagacgatggaattaatctttttatctagtagaaaattcaaaattgtggagaggtgcttgttgtttgggaaaattgctatactggtgatttcaagaataaaattatggaatgtaaagttcaattacgtcagcttaaaagtaggaaggatgaagattaacgtggtatggggaaaccgagaagtagctgtttgaagttcttactaagctgaaagttttcttaaaacaaagatcaaagcaactttaacttaaagaaggtgacaaaaaaaataagtatttcaatgtctctactagtgtgcataaaagacataataagaaccataagttgaaagacgaaagtggtgcttgggttgattgggagttggggttgaaggacctcatggttatgtatttttcggagatttttttgacctctatcactcgatgggaaaatgttctaaattgcatccagacatgaatgggatgttattgtgtcctgttactgatgatgaggtaaggcgagctttgtttcacatacatccagataagtctctaggcccagatgagatgactcttggatgttaatagaagtgatggtaggtggtaggtaaagatcttatttcgttggttcatgctttctttcatacgaattcagttctgtgggggtgaatgatagtaatctggtgttaatttcaaaaaataagtgtctttaatctatagcttatgatagggtttaatggccttttttggtggttatgctcttgaggatgggttttgatagtccacgggtggagttgattatgacatcgatctcatttgttaaatattgggtcaatcttgtggtttctctttagggctgattactgtaactcgaggtattcgctaaggggatcctttgtctccttacttgtttatcttatgtgcagaaggattgtctgctcttattaacgactatgtacagaggggctggcttaaaggttgtaaagttgtttagggttgacctattatctcccatatgttctttgcggatgacagttatttgtattgtcaagcattggaggatgaggctaatagggtaatgtcgttgctttgtagttttgaaatagcttcgggttagaaggtaaatctagcgaaatcttctgttttctttaccaagaatactgatgttattatgtgtgctccatcttaggtatagtggaagttggcgaaaactgtttgtatcttggactcccaaatactatgaaccgcaacaagtcagtcatgttgggctttcttaaggaaaagatgaggaatcagatcaaagggtgggatggtatgtttttatctagaactggtaaagaggttttgttgaagatggtggtgcaatctctccccacctatgctatgagagtttttcttttgcctaaaaaggtgtgtgatgagatggaaaaattaatgtgatctttttggtggaagaattcggctaaaaatggtagtgcaattccttggatgagttgggaccgaatgtgtgtcccaaagttcatgggcgacttaggttttgaatgcttcataattgtgttgcttggaaaacaggtctaacatcttcattttggtcaagattctttagttagtcatgtgttcaaagcttgttattatccttgtgggtcctacttggggtggagttggaaagaaattcgagttttatattgaaaagtatccatgaagcacaatctcttatttgaaaatgagggtttatggttgttggatctagaatgagtattaatatccttaattagggacccttggcttccgagaacccatttgtggtttcagatcaccctagtttggcaaatcaaaaggtctttagtcttatgaaggttggagagtcatcttgggatgaagaggttcttaaaatatttttgtagagagggacattaagcctattttgatcattcctttgttcccctcaatgtctaatgatatttggcagtgcaatggtgaaagttctggtgtatattcggtcgagagtgtgtattgacttcttcaagagcttaaaggtgagctagttggagttggtaactcggtcttttggaaaaaattgtgggatttgagagtgcctcccaaataaagtcaaggatttggtttgcagggctgcttccaatagtcttcctacccgtgtctaattaggcgtgaaacatgttcctctccccttgttgttgtgtccaaggtgcttacaaatctgagagtatttctcattgtcttgtgggatgttcgtttacttttgcttgttggatgatggcgagtatttttgtggtagagattggtgacaattcttttgggggatggcttcatgatagattccagtgttaggattatgggatgaaacatagatttgttatgctttgttggttgttgtggtctgtgcgcaataacaaggtgtggaatggtaagaaaatgttaaagaggtggttttgttggctaagggtaattttgatcaatggagttgttctaaggataaaatatttggtttccctttgttttctttacaagacggcaaagggcacgagtactggattgcactagttggtaatacgataaaaatcaatgttgatgcagctatctttagcaatctgaataagtatgggtatggttgagtggcacaatactcttctggtcaccttattatggcttggacaataagtcgaatgggggtggttgatcttgttcttgctgaagctatcgggcttaaggaggtgttgagttggttgaaagaaacagggtgacatgatgtggtggtggagtcggacagtttggtcacgatccaagcaacctgaagtttgttagatatgcttctattttcgggttctgcatttctaagtacagacggattctttttagtttgaataatatcttcttaattttatcaagcgatccgttaatcgtgttgcttactaattggctagagtttcgtgattaaatgttggttgtacctattcggattctatgattccaaatagtttatgtgatgtacttttgaatgatttgagctaaggaaattgcatctttctattaaaaaaaaaaaaaaataataataataataataataataataataataatatctttgatgtgtctacctactgtccaaactccaaaagagaaaaaatatagaggaaattatacttacaatagtattttaaaagttcttatgataaatatggcacatttaagtttgacaaatttatatggtatttttttgttttaggtctttttatggtatttgatatgccatatatatgtaattaggttttcaaatcccatatttaatgtttttatttgtttagtaaagttttatttttctattgattgccgaaaaagtcaccggagtttgctgttggtgccggaaaagtcgccggagtagcggtcggtgccggaaaagtcatcggagttgctgctggcgccgag

SEQ ID NO: 225385 - DNA, 2764 bp, Cannabis indica
atactacacattccattattttacgagaaactctaaataatttatgatactaactgaactaaattaatcagatgtattattacttatatttttaatatttttttataaatgtatattccattattttgaattataaattattcataattttttttttaaaataataaaatgtatacattattatataaaaaatttctactataatataagaaatatagtaaaaacagtgccaagtaaaaataataactgtaatcatataccggatcctatcaaaactccgtaactaaaaaatattgtgcttctaaaactttatttcagccgaaagaaaaataatgttactattgtgcatacatttaacagagaaacttcattataaataattgtatttttttaggtggggaagggggagggggtgtgttaaggacaaaggtgaaaattaaaatctagtgatccaacaatggccagcttttcttttctttttctttttttgttccaagtaagggaaatgcaaaggtgcctgtgttcatggatctgaaccatgttgccaatgccaaggcagggtgtgatcatccaaataaaacccttttaattcatatatttaattcataaagcaacctttttaaattagtctaaaccaatctaataatttgacttaactaaacaaagggttgtcaatttcaacctcttaaacaccgtagacctcgtatgtacatcattaacataaaaataaaataagataacataaactatatcaagtgtagggccatactatgtcacccctataagtacattacatttatatattatcatatattatatggtatattatcattaattatactccaactctctgttttttttacttccttttacacccttattttatgttttatttttacattatgtgtatgtatatatatgacaaagagtatccatatctctgactctttcccccactttaggcttatccttatgtagtgcctacattcatggtgattttgcttatttatttatttatttacattttgtgttattggtgcttgatctacattattcatggtggacaactgaaaatgaaaacgacctacacctatacatgtaaagtgttatgtatatataattggtaaatcaaaggaaagtgcacataaacatataaagtttaggcctttaggtaagtttacagtacactctgttaaatgagtattttattagactgtgtatttgtttcggtactcaaaaaaactttttagtttttttttttcataatttataattattttatttatgaatatctgtaaattttttataaaaattccgagtaatttataatgcctaatataagatttacatattatattgcacgcgcgactgttatttcttatacgtttggtaaataaatgtttaaactctatttttggaattgaaaactatttgaaatttttaaatatttataagtgatcttaaataactataatgcacacaattattttttttttataataaaatatctactagaatgattcttttggaatttactagataaatttcttataatttatataatatgtgaaagtaatttttttctccccttttttgattattttttatgatatttcaaaacctgtcttgaaacttatgttgattatgtcacacttggagcatcttcaaagtgtaccatgtgaaatatttacactatattttatactattttgctctaaagattaaagagatactaaattagtgtgtattaaattacccacccttaatagcattgaattttaaatctttacaaaattagtgcataattttttctttacattctaactcttcttttaacttgttttaaaatgtaaccattaattctttgttgataatatatataatgagcattgttataagacaccagtggtgcctaacaccttctcgacatgtcacgttgtgattggctagcgatattccttaaaaaactattatgttaaattatatgggacccgatatttagttggaccaatagcgatactgacacataagagaatgttaggcaccactggtactctttagcatttctcatatataattatattataaattagttattattgcctattaatataaatatttgttaattttgtgtgactttataatgtgtcacctcaacaagttagagagaaactaacttgattttactaacagttagtagctgttagtttctatttcatgtattgatctataaatatccctaatattgtaattagaaacttagtctcacttgtaaattagacatagagtaataaaacaatacacttcagttatgttctttgtgttcaatcacgttggagtttgtttgagctttgagggttgttcttggatgttccttgaatcatcattatatgtgagattgtgtgtgtcttatccaacaagtggtatcaaaacatttgatgtccaagagtcgtgatcaaaagtttttcaagatttaggtggagtgatctaagaagatagggagtggcaagttcgatctagaaaagtttacaagtaagaacgattttggtttgtggcgtgtcaagatgagagttcttttggtccaacacagtttgcaagttgctcttttgggagagaagaacttacatgaaggtttatcggagaaagagaagtctgagcttctcgacaaggcacacagtgtaataattctaagccttggagacagtttttagagaagtctcgaaagaagaatttgtaataacatctttcattaacatgtcgttta

SEQ ID NO: 225386 - DNA, 3795 bp, Cannabis indica
caaaacaccaccctgattgaaccatgtgccacattcatatttgttaacaaccatttatatatatattcactgttttttactccttcacgtttggatttcgaatacggtaaagggataagcttagactgagcttgggcttagattaggtcctttctctctcttccttacaaaagcttccttctttccttcttttgtttgtatgtttgtaggattaataacactttttcagtcaaaaaagcattaattagctgagaatcttttcaagtcttatttttttcttatctttcttctgtctgggttcttgagtttagagttcaaggatatataggaataggataatataataaacacttgaaaaaatccctaactgggtctgcaaggaagaaagaggaaagtgaagatgttggaaggaaaagccttgatcgaggacactgacatgcctgttaagatgcagatgcaagccatggccgctgcttctcaagctctagatatctttgatgtttttgactgcagatctattgctgcccacataaaacaggtctctctctctcccactctctctgtctatacgcacacatatatatatatatacatatatcttaaactgagctgttaggtttgatttatgacaggagtttgataagagatatgggtctggttggcaatgtgtggtgggtccaaactttgggtgttacttcactcataacaaaggaactttcattcaattttaccctggagactcttagttttctcatcttcaggggagcttcttcctctcaatgagctcaaaggccaagtttttttaacacagctatggatgttcgagagaaagaatagagggggcaacagaaacagtaccgtacagtttttttccttctttaactgtttgatcattgtggagacaaaatggttaaatattgagggtagtttgattttggcttcgtcatgtgaaagggtgactgtgtttgtggcctttctttgatgatgatgatcaatgctgtggttttggtgagatttccttcgaaattttcatacgtgggacttcttcctccctcctaggactactgcccattaacttcctagctggtttttatgacccattaatgtttttggtctttatttctttggatattttcgtaataactttcaatagcttacttgctctgtttttagtgcctttgtttttgggtggttcatcaccttcctttgtttgtatctttctagatccttatctaataatttggacttttaaggtatagtgtagctatgtttgtttgtatgtattgaagcttagctaatgtagtgtctatcttttatggatttaccttttcataaatgatgcttggctgctaagaagcctaaaaaagaggaaactttactaggaaactatgtaaaggtaacatctttttacaagttcaatcaacaatggctgctattttcaaaatcagaaaacaagaagcaaagttctaaataatatgtctaacaacggtttccctcaaagtgaaagtacaccaaaagctaagttaacaaaatcaaacaactggtgttaacaatggctggttttgaaagtatgcttctaaattctggacaacaaggtctgccattgcatcgcatgtttcatgagtgtcagtccccacatgaggtaaaacaacaacattttcaagtccaaacaactcttcaggaacttccggttccctttcaaacacatcaagaccagccccacctaaccggccttccattaaagcagaaacaagctctggttcatcgatatggcagcctcgtccaatgttgatcagaatgcccttcggacccaatgcatcgataacttgacggttaataatgtggaatgtttcttctgtcaaagcgcacgccacaacaaggacttcacaattggttgccaagtcaagtatgttggagtagtatttgtagtttggatatggtttctcagttctagacaagtaactgattttgcagccaaatgcttctgctcttttagcaattgctgaaccaattcttcccagcccaacaattccaactgctttgccactaaactgaaaattgtattttatgtaatatttataaataaaattgtgtgttattgacataatattatataaaaaaatataatatataacccaattcaatataatacacaacataacaaagagctcttaatttctaacataatcctcatcttcatccaatataatagttttgtaaattagtctaagctactaaaacaaatgtaacatagaaaaacactgtttataaggacaggaaacatgccattgtttaatcaaatatattagtaaaaatattcaagaaaaagccaaactttgcaataaaaaaataaagtaattacctttgtagtcaatgggaaatcgcctttcttccatgacccatttctcaaaaatccatcacagacacaaagcctccttaaaacagccaagattaacccaattgcaaggtcggcaacgtcgtcagtcaacacatcgggggtgttggtaaccctaatccccttttgttggcattttctcaaatcaattttatctaaaccgacgctgtaggtggacacaatctccaaccccgggaaggaatcgatgagttgggcatcggcgccgattttggtgtctccgactactgctttgactgaattcaagttctcattctctttcaggaaatccgccaatgaaggataggaccacagtttgaagagcttaaagcgcttttgtagttgtgtttcgaggtaactagacatcgggcatgtcatcagaacgccaatgctctccatgtgtttgtaaaaatgatctacagaaaagaaagcaaaaaatttactaaagaaacttttttttttaacaatagatcctcttatgtggtgtttattttatttagtgttttcctaacattttttttaattaattttatatatatttttttaagttaattagtaatttttttctttgaacttttccatgtattaaattgtgtctctgaattttttggccgttaaaaattcttccgaactattcagattgttaaatttaaagacttttgtctaatttcattcaattttactctttcagtgattatttatgtactaaaacatactttccagacttttgatatctactaaatcatgtctcttaaattttaatatgtatcttaaaattttttactaaaattaaaaaaaaaatttaacgggaaaaattactaattagtctttttttttattagcagaatagtaaacaaaaacatgttttaaaagtgaaataacatgagaatttactaataaagcaagtgttatttgactgcagcaattgttttttcttcatctaatttacaaaacatttggaataatttacagtccaatttacaggcacgttaaaatgtgctactcctaacatgatgcaacaacaagaaattatcaagctccaatagttgtggtggaacattaggcgagtatggtgacagcttcattcatcttttcatttcttcctcaattcaatttccctcttttctgaacttaattatctgtatataaaaatccgcacttatttttcttttattgggttgtgaaatagggttcaatttaccgattacatactcaaaaacgtagctttgtaccaattccgttatgggattcccctaaccactgctgccgcggctaactttactcgggccgagctcgccaccgctttacgaaaggtatttcattagtttttcttttcaattttgtgaattttgttttcatttggggattatgctccacttaaattcctagtttttttttttttt

SEQ ID NO: 225387 - DNA, 5727 bp, Cannabis indica
ttttttttttttggattgatttaggatttgggagtaagagaaaatgaaaaagaaatgcctctattcttttttgttctcatgaattatgggtattatctatttctttttttctcttataatcttatttggttggttagaagaggatttagtatatgatctttgctataattcattgacggctccaatcacttggttgattttctattgagttaggatttggaggaagaaagacgattttttaactcatcaacaactgtctacattttaaggattttacaagaaatcatttattatattaaactcttactcatttgtgtaacaggaatttagtatacaacttattttccttgtttcttatcctaattctatgttatactgaattcatgaattttgccatctatatgaagctcaagttgtctagatttccatcagtctgtactttcatatctcagtgtgtgcgtgtgtctatgatttaattccttataatacaagtggaatctagttaaagtggatgttgttactgttttggttacttgattgagtttttagtaacttgataatcttatatttacatttttttccttggttataattttctgttgaaaaatgaccaatgtttaatactatatagctacatgtttgatcttttacatttgtgcattgcaatataatatggcttgttagaatatagtgataatagcactagctgtaagatctgtgcatcctttaaagtttaatccgactaagttgctgtaatttaaaaaatacatatttcaggttcaaatggcaatggaagtcacacaaatacttttaaatgcacaggccgtggatagtagcgtacgtaatcatgcagaagaaaatcttaaacaatttcaagagcaaaatcttccaagctttttgctttcacttgctggggagttggcaaacgatgagaagcctgccgagagtcgtaaattagctggtttgatacttaagaatgctttggacgcaaaggaacacaacaggaagcttgaacttgtacaaagatggttatcgttggaccaaactgtaaaagcccatgttaaagcatgcttattaaagactctcacctctcccacccttgaggctcggtcaactgcatcccaagtcattgcaaaggttgctagcattgagttgccacacaaacaatggcctgaactaatagaagctttgttgtcaaatactcaccagcttccggctcacacgagacaggcaactttggaaactcttggctacatttgtgaggaagtctctcctgatgtgatagagcaagctcaagtgaataagatacttacagctgttgttcagggcatgaatgcatctgagagtaacaatgatgtcagacttgctgctactcgagcattgtataatgctttgggttttgctcaggcaaatttttctaatgacatggaacgagattatattatgagagttgtttgtgaggctactctctctcctgaattgaggattcggcaggcagcctttgagtgtttagttgctatatcttcaacttactatgaacggttggctccttatattcaggatatttttaacattacagcgaaggctatcaaggaagatgaagaacctgttgcactacaagccgttgagttttggagttcgatttgtgatgaggagatagatatcttagaagagtatggaggggagtttagtggagactctgatgttccatgcttttattttgtaaagcaggctctcccggctcttgtgccattgctgttggaaactttacttaagcaagaagaagatcaggatcaggatgaaggggcttggaatattgcaatggctggaggcacatgcttgggtttggttgcacgaacagttggtgatgacgtagtcccattggtaatgccatttattgaggagacattgcaaaccgagattggagacaaagagaagcagccacttatgcatttggttcgattctagaaggcccatccccagacaagctcatgcctcttgttaatgtagctctgaccttttatgctttaatgccctgatgaatgatccaaacaatcatgtgaaagacactactgcatggactcttggaagaatttttgagtttatgcatgtatcaatctcagagacaccaataattactcaagcaaattgccaacagattatgacagtccttcttcagagcatgaatgatgtgcctaatgttgctgagaaagcttgtggtgctttgtatttcttagctcagggttatgaggatgtggaacaatcttcctccccgttgactccgttctttcaagatattattcaggctcttctcaatgtgactcatcgggctgattctggagagtcgcgtcttcgaacagcagcctatgagactttaaacgaagttgtcaggtgttccactgacgatacagctccaatagtgttacagttggttcctgtcattattcgggagctagatcagacatttactgcacagtgtaattcatctgaagagagagagaaacgcaatgaactacaaggtcttctctgtggttgcttgcaggtcatgattcagaagctaggttcatcggaaccaaccaagagtaattttttgcatcatgctgaccagatgatgaccctgtttctgagagtattcggtagtaaaagtgccacagcacacgaggaggctatgcttgccattggagctcttgcttattgtgcaggcactgacttcgccaagtacatgcaggagttctataaatacttggaaatgggtctgcaagattttgaggactaccaggtctgtgccattacggttggtgtggtgggggatatttgcagagctctagaaggtggtatattgccttattgtgatgggataatgactcaactcctgaagaatttgtccagcaatcagttgcaccgttcggtgaagcctcccatcttttcatgctttggtgacattgctttggcaattggagagaattttgagaagtacttggtttactcaatgcccatgcttcagggtgctgcagaactatctgtcaatacttctggggctgatgatgacatgatagagtacaccaatactttgaggaatggaattttggaggcatactctgggatctttcagggattcaaaggatccgcaaagatccaactgttgatgccttttgcgcctcatgtcctgcagttcttggacagtctgtttatggagaaagacatgtatgctcagttttatttgtgtacatcttgttcataatagtgacttcttttccttttttataatcattactattgtttctcatgctttctgctacttctttcagggacgacgtggtgaccaagacagccattggggtccttggtgatctagccgatacactgggtagtaatgctggtatcttgattcagcaatcactgtccagcaaagactttctaaatgaatgtttgacatcagatgatcatttgattaaggaatctgctgagtgggccaagttggccataagtcgtgcaatttctttttgaggctgctggtacttgccatatttttcttttctctgcatgcattgggtgtctagagttggagtctgggattgcataccatgagtcaggtcatcacatttttgggaaaatgacgttgtttgggtcggtcggtggcaagggcagtatttcaatcagcagctcggggtcaattatttataattttccgttgtccttgcattgccgtgcaggaaagtcagtggcgatgaccatgtgtgtttttctgccatcttggcagaaaatcaatgaaattatgaatgaatgagatggaaaatttgccccacctgccctgtcatactgtttttctggggttgtaactcagtctttcggggcggccccttcagcggccatggttaaatcaaagattattctgcattggtacaacatgtcagttgtcatagagttcgtcgccatcggtcaacatcctcccccttttttttctttcttttttgtagttgcattctgtatacttgttcttcgtcttgtgggattagtgacacaaccacataatatttagcttcatgcattgttataaatgtcatcatttgtcacattcaccaatcatcaatcatacatgttttgctttaagtcattcattattcaatttcttcttaatggtttaggcattttatatgggttgatacataaaattcattggtcatatatagcatagtacagagcatattattttcattttttctctacaagaattgttactctattttcatattattcttggatggagcaattggggctttattatttacaagtttaggttggaattgtgacacttatggtggctagctctcgaaagcatttccagtggctatgattctatggagatatgagtaaaattggatgaatgtcaaaattagattggttggttaagacatcatattacttcttgggataagtcaagttcttctctaaagcacaaatcattgttgaaagtttccaaaatatggaggtataatcaataagtagggacataggtaaatatactgaatctatagacctttttaatttttttggcttgatgtgtatatatttgaaatacaatcattgttctatactaaagaacaatgcacggtgagtaaatattgtaagtaaatacataaatgcattttttttttttttttgtaatacttgattaacctaagttgtctaataccttaggcatatacaatatgacaaaatatattccgaaatcaatttgcatcatgtatttttaggatgcaaattaaaaataagaacaattaatatatgaattatagaaataaaagcacataaaaagaattaatatagaagttaagatgagaatatcgaaataaaagttaagatgagaatataaaaattacactttaatcttatcaatattactaatttaatcactaaaataagtaaattcaaagcatgataataataataaataaataaatgaactataattttgttactctaaaattttgatgtctcttttattgcttaaagcccttcatttatactaatttgatcccaaactaataagattcgtgcatttaggtatgggagaaatgttgattaagtatttttgttttgggttagtgtgaatgtgcttacttatctttgggcttttcacctttgtcacttttattttattttatcaattatacacaaaatctgcaatatagcacaaatttgattgaattaaatatttttcaactataataacctcacaactaaaatcatgaaaacaagtaatttaaatggaatttacttgtacaattaaagccttgaaagttgaaatatacatattttagcattaattagtcactaagggtaaatcggtgcacctcttttacgggagtaaatcggtgcaccccttttaaggaaggaacattactatatgacacctatagtgcctagtaccacgatgaagagcgtcttataattagttagcaattttttataatatttttttaagtaaaataagtgagacacgatattgagttgcaccaatagcgatattacacctcgcaaagggtgcttagcaccatgggtgtcctttagcattactctttaagaaagtgcaatgtagaattttcctatattttattgtgtctaaataattttcatttaaatttggaattatttcacaaatacacaaaaacaaacaaaaaaaaaaaatgacaaaaatatggttgtacggaattctaaatattttta

SEQ ID NO: 225388 - DNA, 4621 bp, Cannabis indica
tgcccccggaaatttagacaataaagctataacgtcctcaaacatcacaccaaaatagctagagcttcaacttgtaacatatcaaactgctctaccaaatatctacaaaataaaagaaaaagaaaagtgaattacccctaatgatgatattaaaaactaataaaaaaatcttaaacagtaaaaagatgacaactctcaaataaattatatttaacaacttatcagcaaaatctctgtaatagtaggccctccacaaaatcgacctacaaaagaacaataaattataaaactctattactacacaatttaataaaaatatgtaatgtgaataaagattgtaaactcaattcatataataatattaagacttgaaacactaatctgtcaaatttaaaaagtcgtttgcggaagccatgaataccaaatatgaaacatttctcttaccattgatcatactacaaatctatcctaaacaattagggataagccataaagatagcacaaaagccatagaagacatccaaaccataacaagaaaatggtgcaaaaacaaatgctaataaagtactaataaaagtataaaaataaaataaatatttaaagtaaatataaataatctcaaaaatttaaattgtataaacaatactaaaaatttctaattataactatcatttaaaactttaatttgatttgtaataataactttaatttgatttaccataaaattttaaagttgatacaatagagagaaacctggtataaaaataattttaaaaataaacaacaataaagaaaggtaaataatatttaaaataattaagaagtaaataataaaaaccgtttttgtaaaataactaaaattaaaaaattaacatatatagttatataattaccatttaaaatttttttgaaaagtcaaattaataaacacaaaaccccaaaaagagataaatacaattataaaattaaaggacatactaaaattaaggaaattaaagtaataaatcttttattataaatgccaaactaaaataaaggaaatcaaaataaaattgtaataattaatagatacaaaatatacgccaaaaacctcaatttattgtgccaccaccattagcctcggattgatgctccacaccgccttcgtctcctctgtcatttgctttattgattgtctttgatgaattcaaacttttggctaacaaaaggtggtattcttattgtcagtgataagttgagaatagaaaaagcaaaagaaactaattcatatgttaacgataataaacaatcacttatattagaattttgataaataacactcattagattcaaataaacaataacaacaataataataagcatataaaatctatatttaatatatatatacacagaaaaagaatcagagaaactttaagagagttattgtcgctaaacatatctgtgttgtgtgataggtggtagacttatcggaattgaccttgtggtcatgcgaatgacaatggacaaatgtaccatggcgtcttcggaaacccaactagaaggactcttgacaaattttgggtgcgggtacgacggcgttttcgggtcctgtgactccatgttaatattatcttttggcaatttaaatgtattacaaaaatatacatttggcagtctgcatgtaattacaaactaaaatttggcattcggagccagagctaaattttaggggggccaaaaatatatttatacatactggtatatctaatttaatatgagtacttaattaaaaaaaaaacatgctggctagtattatttgatttaaaaatgatacctagctattgggtaagtattttaatactgttttttaataagaaaaaatgatttttattaacttttaattttcataaaaaaaaaaagagaaatattaaaaatcactataagtgcctaacatctttcttgatgtctattggtgtaattaagtatcgagtctcttattacttaaaaaaaataacttttagggaatatcgctaaccaatcgtgtggcatcacttataaaaggtgctggtcatcactagtgtccaatagtaatgccttaaaaataataataataatgtggattgttgtttaagaaaaaaatattaagaagtatcttaaggtgccaaacactacaagacgttgcatgtaggcatggcaaattgaagctttttcgcggatcgggtcggggccccgacccgacggggcagtcccgccccgacacaatcgggtctctaatcgggtctttgccccgccccgccccgccccggttaaattttttcgggtcggggctgacccgattcgataatttaaaaaaaaaaaaaaaaaaaaaaccaaaattttactaaaaccctaaatccttaaacgttatttcttcactgtctcgataattcaaaacaatgtagaggattctacgtttgattgatttttcaatttggatttttggttgatatacatatgtgaatggccttatgtagttcaccaactgctgggagggtcttccttccttcctttcattttttttctttacggctgccttatgtgaaattatgatatagcagaagtaataagtatggtaatctgtgaatctttggttcattagttatttttcatcttctttttgtataaactatataacattatatgtatttatttatatatatatgtatgtagttcttttttatgctacaatctactactcactagtaaaaatgcatataattattggtcacagattgataagttacctaagctcatgttaaaagagctgaaacatgagaaagagaacttactggacccaaaacttaagtgtaatccttttgcttgcagtttttattctttcgtctataagcaagcattaagctgttccaatgtcaaactttgagaacagctatggccttgcttaattattagaatcatataatttatgaaaataatttttattatagatgccaaatatgaatgcccaccgttaaactccaacttctatgctctggttatcttcgttaataacaatgtgcttctaaaatacattttctttcaaaatagacatataaaagaaaatgttgaagatattggggtgcatgctgaggtggcagtatctggtccttacaattttggcgatgaatggctccaattccaaacaaagacacattgttttgttgcttctagaatcctctacatgtaatgagaaaatgtcttcttaaaccctcgcgtacccaaagactaaagggtttttatttttagtacaaacacttcacacttcacactacacacttctcctctcacacacaacactgttatcgttgcttacgtgaagtagatatccttcttctccgcaactctttctagggctcaaatggctcctgttcttagcagaagcttagccacggcttctctagcttcttttccttcttcttctccctttactgtcagaagccccaatggagtcttcaacttgagaagtgcgttcctccctaaaaatgggctccgtagaaagggcctcccttctagtgccttgaaatggaagcttgagaggagagacaatcgagtctctgtacgttgtgaggcttccgttgccgagaaagaggagactgatactgatggtgaaaaatttgagtaccaggctgaggtgggtttttctttaatcccacagaagtttgagttttgtgaccgttttatggactctttggttttggaagaaattgagtttggagtaaaggtttttttttttttccaaaagaaaggttttgaactggtttttcgaagattgaagagttgttatccttttctcagaaataaaaaaaaaatggaaaatgtgtactttggtttggtctagattatgaggttgtcttttagcttctcagaatattaaaaaagtggataagtttgaaagatttgtaaacttttcaaatattcatatttatgttgatagttttagaactgaaggctgagaacataaaccatttgcaggttagccgattgatggatttgatagttcatagcttatacagccacaaggaagtgttccttagggagcttgtcaggtaagctgcttattcttgatatattaaatgtatatttatatatatgatatttatatattccatactaatttgtttagtgttcttttattctctattatttgctttctttaaaagcctttgccaatttatgtgtgaatgtgttctatctaaagtctttatattgaggatcttcctatagctcgttgtttatatgatgtaattgtacttttctttttcagtaatgcaagtgatgccctggacaaacttagatttttaagtgtaacagagccatctctgcttggagaggctggtgacctagagataagaatcaagcctgatccagacaatggcaccatcactattacgtatgtgtgtttttttttattaagaaacttcttgcataatagataagggttattgtgtaataatattaacataatttagttcaacgttgttttagggatactggtattggaatgacaaaggaagagcttattgactgtcttggaactattgctcagagtggtacttcaaaattcttgaaggcattaaaggtatcttctttttcttcttcttct

SEQ ID NO: 225389 - DNA, 2591 bp, Cannabis indica
atttataaataaaaattaaaaatatatttcttcacataatatacataaaattataaattcccctattatatatattctttttgataacgaagtctttcaagtcgttaaatgaagtcaaaagagaacttttcagaaatctacatatattgagaaatagaggggtgtcaattgtcaaacacctaaaaatggtagatccttaatgtattttaatatcaaatatgcaattattggtgtattctaatatctctcatattttaatttaataaataatataaaaactgttaactaattataaaataatatttgtataatttatgaagtaacaactctcattatttttctgaggtaagatattatttgcattgaaaataatagtataactaaattacatttcaggagatccgagcagtgaaagggaattttacacgctattgtggtttaacactgctccaacctcttcagtcaaaaaaaaaaacattgctccaacctcttgatttggcaataatgttggcttgtgaataaagccctcctagattttgttcctagaaaaaccacataatattcttctacatatcatgaaacagcctccttatttggtccacagtagcaggcaataatgtgactgggcagcgcttgtactgtgacattggttacccaaagaaatgaaaataataattaagtgggaattgtgtaaagatttatcagagtaacatggcagaagcaacaatgtaccagattaagttcaagcattttgggactcacctgagaaacatacttaaatatgcaggcatagcaaaagacaaaccctgaaactgtaactaccgatggatttgctcgtttctgagaacacagaggacaaagtgttctgtctgatggtagcggaagaccctcttttgctacctgttttatcgcagtaatttgttaagttattgcttataagatgtgaaagaaatagaagagccaagaatattttacctgtggggtaggaggaggtggaggtggggggtatacagttggagctgacattctctcctcagcagattggtaccaccattccatcatctatgagtgaattcaaaacattacaagaaaacataagttttttaatatcgtacgtaaatagatcactataaaatataatgaggggaggtattctcatgattataatgaatgtaatgtaatacagcataggattcaattatataatacataaataaaaatgtcatttctacattcttattccaatatgggaacagcaggtttcttaatcccatagaaatcaagttggtgaccgaaaaagaatgaaaagcaggatacaacgaacatagcataggatattcatactttaaaaaagaatactgccgcaatcagcccagtttgtgcataatcgagcattgtgtatgtacagttgagcagtactccttgcaatgtctgtatagtgaaatatagtcaaaaaaaataatcaatttctaatcggagtagaactgtaagtggcaacttaaacgacatggcataccaagtatcaacagattatgttttgcatatttaagaagtctgtgcaatatatatgtataatcctaccaactgaagtaatataccttcaaccatggagggccacgaagtctctcacgttcacggcttcttatctttgaaattcttgatgtggtatccatctaccttgacattaaaaggttggtttcagcattattcaaattgcagaagaataaaaatgaatgaaaaaatcgcctgctgtatgaccatgttagttcaaatcaaagaaaactgaatagagaagactgaaagcatcttaccagctcttgtccagtagctcggcacacatggataccaagtgcatgcaatcctaaggaatagaatcccgttgcatccaacaaatataacaattgatatgaaaatgacaatcctgccaagaaaaatatagctcataaaggattgttttaactaaggttactacacaaatccccgaaagaacttcagatctaccaaacaaattaagaaatattttttctgtttgcaaacataataacttctgggactgaaataaaataaacagaatttctcagaaaatttatgcctacacaccttcgctactagcgtgaacccatgggtagcaagcccctataattctctggatcttcttcaacagctgtgctctaaccgatgattctgtcacagtggttgcacttaaaacaagagagtcatcccctctatcagttgtgttaaaatcattaaatctttcatcctcatgtccccataaagttgcttgaagtctggcttccctttctctgttgtagattgaatgcaatcttgacttcaaatatggcagtataacctacaaatattcatttcacaattttttatataggctagccacagcaaaagaatgttaataatagttcttacataaaaaaggctgattgatactcttgaatgggacatttacaagaatctctaattaaaggaaaaaaataccaatcatgcagcttgtgacaaagcatattgcagaaagaaagaacaatgtaccagaaatactactgaaagaactttctgacgcctttttaacccagagtggt

SEQ ID NO: 225390 - DNA, 4734 bp, Cannabis indica
aaaaatgtcatatttagtgtaattaagtttttatgccatatatatcaaaacttatctttattttcccatatttttgtaaatagccctaaattaaatttaaagtaggccggtgcaaatgcaatacacacactctttacctttatcttcacttcaatttcttcgccttattttttttttaaaaaaaataaataaaaaataaaaactctatgagcaaaatatcgctgtcatgacacgtatccaactcaaatgtgccgtcaaagaaaatagtacacgtggcagatttattaaacccccaaattccaattcgattctcaaaattaccacagcctcacaaacactcacctctctcacatgggcccagccaaccccattccaatggcacaatcgtaattatcttctcaacccaagcccatttaaattccactattaataagaaaataataataaaaatttaaattttttcgaacttctaagacgagtaggagtagaactatcatttttcttttatataagattaaaaggaaacagttaaacactttttataagtgacaaacgtcttattcccactctaaaactctctctctgtgtctactttagtagtaagttctctctctgctcacacagtaaaactctctctctttcgctttttctcagtgtcataaataagtacgcggcacttattgggccagtgtcttctctcacgcgaacgaagaaaagggaaaaaggaccgtcaaaaaaagagccttgctttgagttttcttctttcctcccatggcggacacggcgaagtacgtacctgtacatggcggggggacaatgatctctgacttcagaagcctcttctcaatcatcaagcccagaagaaccttcgcctttctatttgggttcatgcttgcttttggcgttttcaccggttttctagtttttaacccttctcccaactccggtgctccctggttttctaatgtttttagtgttaatactccaactccaaccagatcgtcctcagactcacctggatctcaattcccttctgttttttctactttttccccaataattacacttctgaagaaatttacaaagtctcatctccaccgccacctccacctacttctctaccttcacctccttacatagaaaccaatagtactagatctaacaacgccactctctcatctcctgcagtgaatataggaacacccaattcagagaaccgtacaaaaaccagttctagccctcaaaatccggaaatttccacgaaaaaccagacctcggttggtccaagtggtccaaccagcaatgcaagctcaccttcttattccggccataaaaaccaaacccaggttccagaaaacgccgctgagaaaaacccttctcggccgacggttgcttccccgggaaatccgccggcggcgaagaatcaaagcgttagtgaaccgaagccggagaagaattcagggaaagatgagaagaaaagtagtggccctagtagtagcagtggggaagtgtctaaaaaaggcggcgttttgaataatacggcgccgtcgaagtcgtccagtgagcaggcaaagaaaattgacattgttgagtcactgaaaggttgtgatttttttgatggcgagtgggttaaggatgataaccgtaaaccttattacaaaccagagtcatgttctgtgatcgatgagcaatttaactgtgttgtcaatggcagacctgataacgattatcaaaagtttaaatggaaacccaagggctgtaatcttccaaggtaaattaaaagattattcattgacttgttttcgttacttgtttatatatatattttgaacaaactataacattgttattttttgatttagattggagggaaagaatttgttggagatgttacgtggaagaagattagtattcgtaggtgattccctcaatagaaatatgtgggaatcgcttatttgcattcttaagagctctgcaaagaacccaaaaaatgtctttgaagctcatggacgacaccgttttcgtggtgaagcagagtattcctttgtattcaaagtaagttaatggaatttttcaagaaaaagaaatgatcaaatatctcaatgccatttatagtaattgatggatttttggcttctgtaggattatgattctactgtggagttctttgtggccccttttttggtccaagaatgggagatgaaagacaagaatggcaccaagagagaaacgcttcgtttggatttggtaggaaaatctttcgagcattttaaaactgctgatattattgtcttcaacactggacattggtggactcatgataagacctccaaagggtatgtttctagattttcaatatctttataaattgcataaagatattaccaagaagaagggactcattcaaaattctttatttaccttttgcagggaagattattaccaagaaggtagtcatgtttataaggaattgaatgttcttgaggcttttcgaaaagctattaccacttggggtagatggattgatagtaatgttaatccaaagaagtctttagtgttctttagaggatactctcactctcatttcaggtaaaaatataaatcttatttggcatagatactaaatattttgacttcatttttgtatcctatctgaattggtttctttcttcatcaagttactcaaaatggtaaatgataaaaaggatataaccaactttaatttattgtattagacaagtaatataaaaagagcaacatgagaaactagaaacagagaatcatatatacaatctttacttaaaaagtacaaaatctagccaatttcatgcttttgaatatttgatcttttcacagcggcggtcaatggaattctggtggtgcttgtgacagcgagactgtgcccataagtgacgagaagtatctgaggccatatccagacaagatgactgttcttgaaaatgtttttaaaggaatgaaaactcaagtcacatatcttaatgtcacaagattgacagatttcagaaaggatggtcacccatcaatttaccggaagcagaagctgacagcgcaggaacgaaaaacgcccctgctgtaccaggactgcagccattggtgcctcccgggcgtcccagatgcctggaatgagcttctctatgctgagctcctagtgaaacttagccagctgcagcagcagcataagagaacataggtaaaaaataaataaagaagaaatactaaagcaattaaaagaagctgcaaatatatttatttaattcttggagtataagtttatacacacaaggtatagatattatcttattcatttgttgcattatagagaacaaacaactaagtgaaggtaaagagaaaatgaggagactatttgtttatattgatcggagagctgaggatttgagggtacataggaagagatttcatatagtgattttcaaccttcaagttggaaggttccttctactctttttataaacattcttttggccttaaaggcttcgagaattgtacattcttcaattattttagttttgcttagtttataataaggggatcagtgagttgtaattagtgagttgcaatgcaatcagtttactttttcattgttttgggttattgatattagaataaattctattcaggatttaactgttttccctatctaattatacctaaaataaaatgaaagatctttatttaattttatattattttttgattgagagaattgtgctttcttggaatcataaattcattttaatattaagctatttctatggtcgatttcttaatgtagaagctccggccagatcctattttaaattgctaaaaaggaaaaagagaaattgatgcttttaatgaaacataaaatatatttttcttgttatttattctcaaaaaaattacttgtcaattatttagtcttctgaataagaataatttgtcacatgggatgtttgactattaatagaacagatattcattcagttagatataggtcaaaattataaagcctattatgttgaatacaattgaatatttgattaattctatattggaattccactataaatatagtaccaattgcataggtgacataatgtatggttttcgatgtctccaaatacatgagcgttttttagccgtcggtgcttgattgattcctgtctaaatttaaatagtattatatgtttgatgaggctgatgaggagggggtatggctaggctttagacagctaatattggaagccaatgaatgagtaatgattatctttttgttttatgttcttctctttagaacattttcattggaagccaatgcatatgtatttatctctattttgccccattaataattatattataacttgaggtaagtgatatttggttggtgtgtggacaatattcaataattttaattggaaagagtgattattgaatgttaatcttaaaatttaattaaaaattgatctaaattaattacatctaatatatattataatttttttttttcttgtaatagttagttgttttattgatttatttttagaggaatttgctgtgaaattttttatattttaatttttatatacttaatcttcttattttttttttgtggcgaaattttcttatgttttaatttttatatacttaacctcttttatttttttttttttttgtggtcaaaaccctcttaagtttacttttctttgcaaa

SEQ ID NO: 225391 - DNA, 4047 bp, Cannabis indica
attaaatttcaaattttgatatttttataaaaactttattatgatataagtattttatcaaactttcattttatttactcgtgataacacaagaaaaagaaagtatttttgcgtaaaatttttacacaaattaaagatctatataaaagaaataataaaattgataatttttatgaaaaaactcagtttttttttttttaatttttaacaccaaaatatctatgcacgagtaaagttcaaaatatttcaaattagtttgatttttccgaaaaaaaaaagattggcttaacatcacaatttttttttatttattaatacataaattcataaatataatatatttttgcatataaaagtataaaattaaattgataatttaaaactactgtgtttaacaagacttttagaaactaattaaataagagcttaagaaataataattacagtgataaagaaagaagacaagaatttttacgtagttcaagcattaatgagccatagttcacgagtcagtatattgaccttaagaggcttatatgttattttacaatagtggtaacaagaaaaccctaattctactctcttagtttctcttgaagaagaagaaagcttagaggaaatttgacagagcctcggctatgaattttctgtcccccttttgtatgaaaatcaaagggtatttataagctaaattgcgggtatggacatgcccatgacccgcgtaaggttttcgtcaaaaactcactattgtggtaaaatacatgtaaataactgtttgttgggcccccaagaaggtgtttgctcatgtcgagaagtagttggacaatgaggattattggtggtattgtacaagtgttgctaaaaagtttcaccttgaaaaggagatgcctaaacaaaccatcaaggaaaaaggtatgtttagaggtggggtgcgcgcactaccatggtttgacatagggtcaagatctaatattgtgtcagagaaagcataaccgtcactggggagatctgaatctctctttatatggtagacatccgactttctttgggcgattaatgtcagtgctagactcttcaagtgccctccgaatgtctcttggacatatattaagcttggccatctttggattctgaagaaatagtaaggtctctgggccccccatggtgatatgtcgagagataaacttccgagtagttgttgagcttaatcccttcttggccctggctaattaaggggacttaattaacgatggtttacatcgatactcttcactttacgccatgtatctctcgtccaaaaatatgaataatatttacccccaagcttttgagactctcaagtggtggaagcttgtagccttcttccagattataaaagcacatttgtgacatgtaggtgcttttggagaacgagaatgcattcttcatatttagcccataataataaggtcaagaaatttttcgtgagcacacctgctgttacacgtgtaacacatgtttcttaatctggtgagtagcacgtgcctgagaaaggcgttcttcatggagtgatccaactaaacagcagagttatgacgtgacaactcttgtaatgtacattgggttcaatgtaggtaatgatgaaaaatgctttgatttagaggagggaaattaaaggccatctcttcgacttcctagccatcagatcgattcgtaatttttgttggggcaatctaggtcgttgatttcaagtcgttcaattcgatcttggctataaatagacgtaaagccactcatcttcatttccaccattttacagctttaaaacttctcttgctttcaagaacttacaccagaacttttcttctagaaaccagatagaaaaatctccaccgtttccgacatgctcactaggggatcaacgagagctttgaattttttatttattgtcttcttcgaattggaatatgctatttcctagacgcactgaccctcgatctctacccaacccacccccagttaaatgaggagtttgacgttcaagtgggttgtgaccaagttatcaatcggacaggaagcttttgggccactctcaacaactatctctctccttcaaattgcatcacaagtaagtgctctagattttgtcattttttttattttatgctaggataaaaaatcatatttttgagctttgttctgaattcttttgcatgcaatttctttcaaaagagtatttagggtgttgcatgatattgagtcaagaatattgaaccataaatgtgtgtatgcattttttcgggaaatgggtgtaaaaactcaaactcaacaaagatgattctttggaagttctaggttgattttacccgtctgcccatctagagttggtaaacctctcgatgaggttaacttctgggttttatattgtccagtgagtttcttgtgggtctccgacctattgctttgaggtgtgacttcctaagggtgacactttttgagtgataggtctggtggggatctctccaagaaatttcaagggagaccatccctagtactcgcattgtccttaagatattgggtatttaattgcttgggctcttctcttttcctttttcttttcattgtctgaccttaatggaaatttcaacattggagtcgtaaatatagaggatacaagggttgatgcccctgtagagaggccctgtcaggaccctactcatgaggctatcccagagagaagaagtaaaaaggttgtaacaaagggcagagtgaaaaccatggcgaagggtaaagtaaggcttcgtttttgtctccaccgtttataatgactccatttgggagatggaccaaaacacaaaattttgggaattatagtatgaaggagaacttgtctgctgatagaggggttcacaacattcctggcttggtatgttatatgctttcaattatgggtaaatctacttcttaaagtaaagacgagtttagctcttggagctggggccacatatcttgtggggcgcacctacccctgagagcatattttgccaatttttatgctcggggtcatgattgcatcatttcagatgatcccagcatcctacaagcttctatcagggtggtatgtgctgtgtaagatggggaagttagaacccccgagttcggaagagattttactctattacacctttaagcctcatcctatgcgaaccaacaagcaaaaagtcaatttttataaactggagaagtatcccgaagtgtgatgcccatcaacttaacatcgcacgcccaagacctccgaattaagttactaatatttataagggaatctctcaaccacttgagagaatatctcaacaaccttaaaatatcaataactactttttgaattagatatttatccaatcaaattaattaaatacttaatcagcccaagaaaaactttatagggacagggacaagctataggtgctgaccttgttgtttaggacaaggttggtgtgttttatcctaaaaaattttgtctcaaaaatttttgtcttaataattttttttttattttttccttatttaattaatttggaagattatttattcattacaaaaaatattattattttgccaattcaaaatagattttttcgaatatcttaatacaatttgttatccctacccttgacagtgtttcaagatagtgattcggagaccattgacctataattctaagctctaataaactaaattatttattgagtctcatcaaccaaataatcccttgtttattaattctatgattactccactataaatatggaattgcactcttagtaattacagaattatatttattgagtttaactgtagtgtccattgatataaccaatttcagtgattagccctctatgtgtcagttcgtaattagttttagtcaaaatacttttttacccttataattacttctttatcctttagttccattacttcacttgtggaagtataattcaagatcccatctgaatttgcacgcaactttcaagtgccagaattagcacataaagggaaccaacattc

SEQ ID NO: 225392 - DNA, 4599 bp, Cannabis indica
agatcctggtaaaataatatccaacactggccagccctattactagcataggctggccaacctccaacaaaggaagcaccgaccagcttctcccttatagtgcctctgcagctttcaatctgaagaacactttcagttacgaattgggcttaaacaactcataaagataggagaaaaacttcctccaagtatgtccaatttaactttcttgagttacttgaacttgtcctacaccaacctgtcacgaagagttccaaccaaaacccatttacaaagttttaatcctttaagctttattggtaactcattgtatggacctcgaggaagctgatcaaaatactggtttcgattgggaatataggagtgggatttggtgtgggatttttgagtgtcattgctccttagttgttttgtagaatttggagagttttacttatggttttttcaggagtatttgtggtacaaaatcttggattgcttcatcaaaatgaagtacttcttgaaaaagtaaccatttgttttttggctaattaaaatttttgtcccttaaactttgacatgtatcaaatcatgctcattgaatatttctaaccgttaaaaattctctctgaactattgaaattatcgaatttaaggacttttgtccaatttcattcaattgtactaatttagtgattgtttatgtactaaatcatgctccccaaactttaatatttactaaatcatgtccctcaaacttgacatgtgtcagatgatacctcttagtctttcacccatgttataatttccttattaaaattagacaaaagtttttaaatctaacaatctcaatagttcaagaagattttaacgaccaaaaaaattcatagtacataatttggtacatatcaaagttcgaaagacaaaaatcctaattagtcttatttttttatgtccaaataatatagtatgataaagtggcgtgcatgtaatagtaacaataataatagtaatgtaagtagttcaagttttaacttcattctatttcaaagtaataaattgatggatacacaacaaattatactcaagattacacatagacaacatattttaaaaggtcatgaaaaccttaagaaattacattgtatatctactttacttgttttaatttttaccttcactttcatattctttaagatatacccacttttataaataatatccaccatttaaattaatataaaatatatactagacttaagtaaaaaataagagtatattgagcaactcattcataaaagtggatatattttaataaaatataatatgagagtattttttatttatgaataccaaaaagagatattcctcagagaaaaagagcataaataggaaagaaaaaagcgagagaaaaaattgctttttagattgagatcctcacttaaggtggaagaaaacgtggttacagataacaaaaataacctttaaaaacaaaaacaaccacctcataggataatttatcaaaacaaaatatttccccattctctgctcaaatctaaaatggagagttcctcaaaatacttatttataggtccaagttgctacccaaaacttaatcttttcccacattttctctgctgaactttctgtatcctaaaaaattctaataacttctctcactccagattccccacataacagccaacactgctgatctccaatgttttgacagtctcttgctccctcctattattaccttgctctcaatcatttgatatcctcttcatggcataacccaattaatcccgacttctccaaatagtctggaccgtagtgtctcagaaaaattacggtccaggagtaaatgatcgatggactccccgctagctttacaacacacacaccagcctggagagattgcaatgaaaggtcttttttttgcgtctgtcatggacattcaacttccccaaagctgctaaactttagatggaacacaactcttccacaaagcctttgcacatgcaacatctttatgttgttgtcccgaagtgaacgacgagaaagccgataacatactactacacgagtaaaagagcaaagacaaagcgaacataaagtataaatcatgttatcaccactatagatacaccaaatcatgcaaaggtaccacctttagatccatgaaaaatgtttcaaaagttcagtttcatacctgatccttctctagaagcgactgctgcaatgtcgcaattcttcaatattgtccctgagtctggatgtaatggcattccataagtttggtataaccagtaattataactatgtgtatctagccatatgttctcatttaagatcatggatttcaaacttctgaatgagagagaggtctcgggaggaatttgttggattgagaagattaccttgcttgcactttgcagtatctgtagttgagttaaccaaaatatcacatgtattgggccaaccactgtttacacatatctagtacagggagtgcatttggtgcatgtaacgcctgcaaattgaattgaaaagcacaacaccaaaatcaaacacaaattatgtcacgtaataagcagaacataccaaatgaattactctcctaagctacaacacttgtcatcaaaccatttcacacaggacattgagaatcctccatcaactaagccagaatcaccagctacaaatacacctaatcacttacatggaactgatagcaatggaaattaaggaatacctgatgagctacatactgaacatcagctacacttccactgcgagaagcaatctggaatgcactttttagacgaccacaaaccacacaagcaagaactttcctgtacattgaaaacaaaacacagaatgtaatctaataatgacagaacgatgtacttgagggagcataaatttgcatattccttttgtaacaaaaacaacaacaataataatacttcaccacaccaagcaccttcccaaaaacaaatctgtttggacttcacaaagaacttcaccaacagccaaaattcttcatatgacatctagatgacaacccatctcccaatcttgtatcccacattatcgtgagttctgtacttaatctttataagcttgtgccaaagacaccataggcatttcgtaaaagtgttattatacccaatccctaggcccccttttatctttggcttacaaacttgttcacttgaaacctaatgttcccctccactaaatctccccctttttaaaaaaattatcatctattaaatgtcatctcaataaccgaaattggtgatctaaaaattgacaaacaatgctcttgtaagttcatgttcatcaaatggtctctctagccaataggacatgacccgtgttatacacttccactaaaccgttacagaaaacaaaatctccactgattgattcaagtgtattctgttttcataaacaggatactagaagtgtctgcatgtttcacacatatataaactctgtatccatgaatcagtagttaacagcacatggatccttacctcttctcaaaaaaataaaaaaaaaatgaaaaaagtatatggatccttacctgtggctactagtcaacatgtcaatgagacgatcagggcgttctttgtgtttgttagcatatacatttatagcagctcccagtacctacacagcccaagggtaacttcagcgtaacagctcataaaaacaattacatttctagcatatacaaatatttgtcaaatacttcaccaatcggttacattttctacacatttaggcctgttgataaatacacctctattcttctgcaatcatttcatttactagaccaattcaaaaattgcatgtccttcctcaaaagaaaaaaagaaaaaaaaagctgtattgcccattagctaatggtgtccacaatactaaaagttaccatattacctgatcccaatcatcatcgtcaatagtccctttgatgtttctaaagaattctgtcaactggcttcctttttttctctcagcaagtgatgcagccacaccagcatatatatccacagctgcaacaaaagagaggagactaggtttataaacagtagcagctgtacgcgacaaaaaaagcttcaatcaacataacataaacttcattggctaccaggaaggttgaattcataaatcacttggaaagccaagtcaaaattcttttccacaagagactctgcaattttgcatctcctcctgcaaaggaaagagcacataaatctcatcataccataatatcacagagaaaaccttggtgaccaggaaagaggatacttaagcaacagtaccaacaactaagaaataggagcaactaaataaatatgtgcaccagctcaccccctctcccccctcataaaaagaagaaagaagggcaaaagtatcagcattctgacaaaaagtagcattatagggaaacttttcttgtatatacattatgtaagcacattaaattttcttgtattacatgcattgtagtctatgttcaactaatcagttaagatgaagtcacaggacaacctcataacaggatagatactagaaaaatatttcgatagcatatgaaagccttat

SEQ ID NO: 225393 - DNA, 4842 bp, Cannabis indica
ccaagaggtaaattagagatacactgattagaatggataaatatatgctcatgttgtgccatgttatgacatattagttaacacgatagttggtgtacataagtttacacctcgatattgatgatatgtgtcttacaattctagaaagagaaaattgatattttggcggtacaatcatattgccaaggctcggtaaaattatagtactgaggatatcaaatgaattgatgttataatggtatgatcatagtgttgggtgatacaaattctaggaagtatgaattgatgatatcatgacggtacaactatagtgtcgggttgatattatggtcaattgtacttataatgtggattggtactatcgtagcaataagatcttaatgtcgattcaccagcataagcatgatgctggttaatagtggaggatagaaagttaaatgttgatcttagtaaggatccttcacagactttgacattatactgggatggacttttatccaagtttatggctaatttaacagtataacaaagatagtaatcttttagctggtgggcgaggaaccatggattatttgtgggattaatttggggttcctaaatcccaattatattcgggttgaggtgtagaacctgattacgagatgggtacataagatatctagcggtaataatttatatcggcagatctgaaatacttgggcctgagaatgttagtatggtcaagaaattcaaggatatgtctccctaatgagttatctagatattttacccagtaagatcgattttgttattgggttgatactaggaagcaagagttacatactgattttaagaaattagtctagttagcaagcaaaataggcacttgtagttaagtattgatgacttagttgaataactttaagaaaacttaacctctttccgaaattaccattttcttagagttacatcaattaaagactctagaggaagatcttttgatgatggcattccatattaggtttggccagtatgaatgtttagttatgacctcgaaatactagtacttcgatagcttctataagtatcataaagagagtgttaaatggtctcctcagtaattacattatggtatttatcaaggatacccttgaatacttacagtcaggagttggtcatgagaaatgtttgcgagtagttttataggaagttaaggaccataagttttgcattaattcaggaaagtgaggattttagttattattagtagactttcctaagtcatattagtagcagagacaagattatagtagatctgggatagattggcgcagttagagtttaactgaagtattaaattaagaaacctccttgaattagttgggctttactaatggctattagcggggttatattaatattctacagtggtaacagaaagagctaaggatggttaagagtttgtgtggattgatagggataaaagtatctttgctacatctaagtaatgattagtcatgactcatcattgatttaccattggaacaagcaaggttcatggttatttgaacatctttgttcaaaatctagagtgtgaatcgatatatgttgataaagtcttcaattataaatttcaacattaaaggggtatagacagtataattcaacctgcaactggagctcaccatagtggtggttgcaataagattttgtaatttcattacgacgaagggaaatgtcaagtttatactaactacaagagtctcaagtaattctttgccaagaaggatttaattatgagactaagagggtagttagagatagtcaagggttatgactatgtgatgtattgtcattttagggaatttagtattatagttgatgccttaaaatgggaaataactttcatataggtataggatgatataatgctttcttcaaagttaattgctgataggattgggttaagtgttaagttgttgcaaacaaatgtagtgattgaatacttcaaaaaaaaatctattaaaatcatccatggtatttgattgggagaccacaaagttatggaattcaatcatgttatggtgaatcatctcagaaatttaacgtccttcctattagtggaagtcaggtttaggacgaagcagtgcataggagtataaatgcaaaagatagtcgatcttcatgaaattatgaggttcattgttttgaacagtgattacaagttcacttctaagttaaaagtgaatctctagagagccacaagtacgagattgagtttggtacaactcgatgtcttcaataaatggtcagtccagagaggtggcgcaaatattagaagatatatatgaactggtgctacaaattccaagggattatggaattggatttctactataactatgattagtagattattacaggggtgactccctgtgaataatatgatataaagtattatttttcataatcacttcagcagctaatgatattataatgagaataaagttgaaaagaatacttttctagtaggtagaaaagttatatgcatccaaagtgtaggtgggaggtgttatctcacaagtctcaccaaataaaggtgtggagtgctttggcagaaaaagttatgtagattttatacgtgagtagaaaatcatatcttacgagtctcacaaacctgaggtatgacatatttcataagaagagacaaggtaagacttgagattaaatagacaggtagcatacggtgtaaatttattcccatggtgttagtcatgtattaatgctggataggtatagaatggcatatgtaggggatgtaggatcacatacctacagtcagatacatcatatgaggaatgagtttttttagagtaggacgctagactccataatacaaagttaggtggagaagaaacttgggaagtgaatccaattagaggattcattatttaaagatgttcagattcaatttcgagaacgaaatccttttaacgagaggataattgtaatgaccgcatacttaaaacataaaattaattgacaattattattaattatttataatatctaattatgtgtgtatcatgtcatatgggacctattcttaaaaaataggcatttgatttataatttatcaatttcagggactttattgaattttaggtgtatcacagaggatatacatgaattttaatatttttcatgattttatacccagtaacggtggaaatacgatgaatggctattttagtcacatggatacaattttgtgtcaagtatttgatggagtattattattgagtgttttagaatatcagggtaacggaattggactattttacccctaggtttaaaaggtttattagcgttaaagtaagggtattaatgtctttttctacttaagttaattttagaaatttgtaattggatgattatgttagaaagtaagtgctatgttctgaagttagtagattaattaagaaattcaagattagacagaaaaccttctctctctcctaaaacattatctctttctctcgacctaacctagaaccaaagaagggaccaactttcagacttggattcttcaccaatcaacaaggaattagtaggacttaagtgaagaatttctttgtaggatcaaaggtaagctctagttccttttttccttgatattgtaaataaaagttttgtttggttatgtgacttttagaaatagatgttatccgagtttggagtgtataaggatttttttctggggcaaaataaaagtgtttgggactggtttgattggttttaggtggctgagttgaaagttgaacaagtttgagttcatgaactcaaactttgctcaacaatggcaacttctgatttcttgggttatgcttgttgttgcttgatgaaatatgttcattatggtctatttagatgttctagaaagttttgtagcgtttgagtttgattggagcaagttgtgggggttggaagatagaaattttttgagcatttcttctcagacaactggaatttcggttggttcggggctgttccaaccggaattccggttggacaatatcgggaaaggccgattttcatgtttgggccataacttctcgctcgggtgtctgttttagacgttctatataccgtttcgaagcttgcgatgagctctactatatggtatatatttcagagtcaaagtataaattttattttagggtgttttcaccacataatttggtagaaaaccctacattctttttaggaatcaagaagtgttatggagcaaacacttacaaatttttatggaaatgtgacatagggccttcgattagcagatggtatttccactcagattaactggcattaatgaatccaaaattggggtaagattagcatagaatgtatatgtatatgtgtatgtgtattatatgcatgttatttatatgattcatatgctaccaacactagtacggtatcggtattgagtgcatgtggtacaacatatgatgtttaaacgtacaattcagtgttaccaatactagtatagttaggtacgtagtgcatgtggtacaacacttagtggtacccagggtacggttcaaaccctaccaacactagtatagtatgttggggttattttaccaggatctagatttactaacaaatatgttgaattaacatcctaaatataaatatctctaaaattatgaaattaaacccaaagagtttagaaaaccttacattggttgcagtagaataatatgactcatttcgctcaaatctctaacccttgttcctttctgtcgcagagtattatcaagatctgagcctagatctctttctctccttcgggtttgg

SEQ ID NO: 225394 - DNA, 3231 bp, Cannabis indica
attcaattcatcaaaaacaaaaacaaaaaaaaagaccaacttttatatcagcctcactttacaaaaacaaatagcaaacataataatatatattgtttttattttatattatcataatttttttccagccggcaaggccaaccaaccaacaatgatattactgctttgttactttgtataccaaaagataacaatgttcccgtcatatgcagaaatttgttccaacaataataccaaattaattaaccatcttcataattaaatataaataatcaactaattaaggaagtgttgaaagagatattacctaccttcttcaatcttcaccattagaacaaataaagtcaagatcttgctatacagaaatataaaagattccactaaactaaactttatgtgctaaagacatcactacactaaacaaagactcagattataacatgagatttaatgtcagagacatttgataaacttatctcttccactccttgagaaaattaggagaagtaatgtacaacagtagagagctattcatgatcaaactttatcaactatcattatgaggagcaattcaagaattcgacatccttaccactatgtttcgatccatgtcaaggttcccacaatcagatatttgctcgggagatcaccagcagctggtgcaagatatgtgatcttcttcctgcaatgtcagatgttgataaactagtcaaaaccaagatagactcagtttataggtgtctgtagaaactattgaaactcaaaattctaacctctgaatgtcaatgtcagtaatgtatataaacccggcaacgttactgcaataaaaataaataaataataagcaaataagtgattaataatcagtattctaatggtaatctatagaagaatggaaggggtaaggtaccttgaaagaatttcctcaggctctttcgcaaatgaaacagcaagaactagatggagcaaatcctggttgatattcacagggactaatcttgtaggatctgctgcaggctctgcaccaattggcagggctgaccggggtgcctgaggtcccccaccaattcgatagaccaataaatcactaaaactcgcaatattagaatgcggggagagatcgtttatccgtccataaaaatattcctagagaaaaaaaacaacattagccttgtcaattaaaagagaaccccaaactagtcctggaacttaagagaatgtatcaaattgtgttatatagaacaacattgaccacaaaaaagttacccttatcctcaaactcctagcctttgacgatatttgacattcctcgatacaactcctccagatctttgaagttttacaacatccacatcaggcttgtttttcagaacatctctgagcatactgcaaagtttttcctgaatggaaaaggaaattcttataattttgtaaacatgctaaccagtctcaaatccttaaataattcagatacaatagtagcacttaggcctcaattaacagcaataagataacacttgcggttgagaattctgtagctcctcagacagaattcgaaacaaagttttccttacaaattagaaaaactaatatcgtgtgcccatttaaaaacatcgatttttcagataacatacctattaatgattaaattctttctctaaatctagcttgctttaggtttatgaaaatttcaattgcacgatacaccttattaaaacatgatgcaagcaaataaacagtattgttgctcagaaatttttcacaagttcataacaatttagttatgtatcaatatctaccataaaaaggtatggacaaattatataaatagttattgaaataataactggacacataaatatataaacaagggcatctacctgacccagaaccaatacaacgttgatattaaatgtgtcgattgcatgaagaagcaactgtagaaagaaacaagttaaaaaatataaacctcagcaaaaagaaataaaaaaaggtccaagaagtataaaatccataattctgaaacttgcatacctcatatcctattccttctatccaacccatggtattgatcaccatgccagcagctcgagattcaatattacccgcaaattgtctctcaagcagttgagaaagctccctcacaaggattttgtatagttctacattgttactggaaataaatagttcttaataaaatctaacaaccttaatccaaattgcgaaaggggaatctctagtaatcagtacagcttggagaatttcattagttgatattgcatttagtatatagcatatcacctgatcaattgttacctgggagtggtgtgtccatagaagtaaaccaaaggcatctcaagaggaatcccttcaactgggtcaataggcatttcaataggagtagcagcaatacatcccggtagagttatggatccttgaccaatatccaagtccacaaaagtaggtttccaaccctgtttagctgcccaactaagaagcattcttgacaatgtactcttcccagaatctgtaggtcccacaacaatgacccgaggcccctggtagtggaccatgaagggacggaagaggttgaaatgaaaatgtgcaaacactaaagaacacaataagagtttcaacggaatcccatgacccattggagaattgaatatagcaatattagcaaatacttgttatttgcctaatacaatagaatagaattacacaagagaaatactaactcttttgtagataacacatataaaggaaaatattgttatgggtgcatttcaatattggattccataaattttgattacataaataatacgagaaatcactaaccaattattgggtgtcacatcggtatgatgtgaccactttaaggtgtaaaatagaaatgatcaacatataaatataactcttgttgacgaaacgaataaacaccaataaaatgaagtacctgaaccgtactggaaccatcagaggacgaagctttagcacggtttcttcgaccatccaatatggcatggacattcacgtagctaatcataggggtctgggcaaaatcaagcgcttacagtgactattgtacaaactagtaaataatccataatgaaattagaaaattaagaagaagaagataaataatacctcatctgcagtgtagtcagtttcagtactaccatccagttcaattgtggctccataccaagtgaaaacctttcacagaat

SEQ ID NO: 225395 - DNA, 2717 bp, Cannabis indica
tacatagtaggttgcctaggttttaggtgatattagccttcatcccttcttgattgatgtgattcttcataatggagctgtcactagctcccttgattatcatgtaatcgcccaaagctgggtttataacgtctgacacgtcctcttaagggtattcccagacgttttccccatgctgcattaaatgtgaagtgactattcacctctagcctcgctggtccggaggagttcattcgcccttcacctcttggagaagaagtggagctatatcctcatgtccgggagcttacccttggatcatagttagtgatccttctaaaggagatttggttaagtgttttgttcatctccggatgatgggttacttctgccacatgccgtatattgtgactgccacgtatattgggagaaacttgggcgaacatttacccccaagttttatttagtcgcaagtaactgaaacttgtacaccatctctggcctcaattaatgcaatgacacgtgcttcgggtgcgtgggcgatatttatgatcgtcatcattcgtctgtctctttagcaggcaacgatttatttcccgcctattgacagacccttccatcaatcccgatgtaagaaaggtactgaaacgtttcaactgccctttctcctcatcatgcttttttatcctatccgttacatcaggggatttgaatcgttgtgaacccccactgcacgatggtgctcactcgacactgcttcacaccccatatggcctataaaaactagcacttctctcaactgggtcatttttactgcccttcgattttcagatttccaaacccactcaacaaaattttagacgtccccgatttccttttgcttttcctccgacgttgccaggtgaagtattaccgttacacggcgtcctctacccttgccttgccctcattgtgtaagtcctttttgcatatatacctctttttgtttgctagggcaagtagtgatagtaatgtccatgtttatctgctttgtctatttttctcgaaatggcggccatggtttccgtctgtgtaacgcctccttcggtgaacgtccgatgacgcatttctttttctatcacaatattttatgcttattatttttattattattttttaaaaaagggggaaaaatcaaagagttctttgtgtgcccctttctggcagtttgaggttgcccttgcatgctttctattccttttctctgatttccatgtgttgcttggatattttgcacccgatgtctgtctttgtaaatcgtttgattcctttcgacagtcatctggatggggcctcttttcagcggttagggacccccattcctctttttgacttagggtttgatgcgggggctaactgttggatttcttattcttttagatgagtgaagttcttcgagatcttcacaaccacggtttctttggattcgaccgagaaattctcgatctttaccaggtcagtcctacgtcaacccctgcagccactggagcaaagtcttctaagaaggggccaaagaaattggctaccttggaggaggttatgaagggcccggttgccaataaaaagtttgtgtgtcgttccaatggttgggaggccgacaaactctacccaacgctaacttatgcccaccagctggagaagatagtgatcgtagctgggattaagccatccagttccagagtataccaccgtctcccgaaggatgaggagacaccaaaccgtaattacaataactttggggcctagtgttaaaccacctcatgtccggggccatgctacctctccaagattacttcatcgatttcctcatctttgttggactttcaccataccaactgattcctcaagcctaccgcctgttatcaggcctatttattttttatgttgccaggggttgggccgcacccaggcccactaaaatcttgtatttttacaaactgcttttcgtccccaaaaaaggggacaagtttaaagacgacttttataaattagaggcccatccagccaacgagacctcaataccctttaattttcaaaagaatgtaaatgaataccgccataggtttttcttctcctccgggttcaaagcctttaagcgtctggatctactaacggactagatcaagatccctccgatgcatcgtactgcccccacccaactcttcctgaatcacgtgtaagtgtttgctagctataagaaggaagatttgaatgtgggtgacttggtaacgaacgtcaattgctggagggccaagttgattttagagagtcaatctgttgacgatttcaatttgtccaaggtcctaacacccgaaaccctgggagtgagaaggcgctcagggcggacattatttcatctgttgaggacaaatatagtaagtataggtacaagagggagtaggagctcgcctatgcttgcctccaggctgcccccgggaggaggcagggaaagagaagacgccagccaggcccaaatttttgttcccagtttcaaactctggagcccccgatgcaagtacgtctgaagtttgtaagtctcttttgaatattcacttcattccttctgtccagaattacgctaacttaaggccagtggaatttgataagagattgtatagatttcggatgcctcattcccgatggggcgataatgccaagaatttttatttctccaatttaagtcatttcttgggtcggtc

SEQ ID NO: 225396 - DNA, 2090 bp, Cannabis indica
aatgagatctcatgcttagttatttttcattaaagaagtcttttattgtctttatcttaaatggttttaaatggactagtaagtgtgacgcctcgggaaatcgtggcgttacatgtgtatggatttatattgaactatataattgatttcaacttattgatacttgtagtgcccactatgtgtttatgcaacccaattgtgtcacatatttttgaaaataagctcattggagctaacttcctcaattggagagagaacatcaatattgttctcataggtgaaaattcattgtttattcaaattgaagaatgacctaagatactaggtgaaaattctataaaaattgatagagaatgatatgagcattgggagacagtcaacaataaagctctattttttatactgtcaagcacgatacacaccttgatagcaaggtttgctagcaatttcacgatacctgaggatatgaatcagttgaataaattgcttggaaagacatcagatcaagcttgttttgatgctactagaaactttacaaatgcatggatgaaaccaaatcagcatgtccatgatcacctacttgatagtgtgttatttccacgagtttgaactccatggagatatttttgatcaagagacacaagctagagtcatccttaatagtctatctctagcttttctgcccttcacatcaaactatcatatgaacaagttgacatttgattttcacaagttaattaacaatcttttgaaatttgtaagtttaattggaggaccacataaaggaggtaaagctcgtgccactgctaccaatggtgcagctcaagctgaagtaaactctatttttgttgccaacaacaattgtaagaaaaggaagaaaggaacaatcccaatcctgaatctcctaatgctgtcaaaacagctaggaagggaaagaaggcttccaaacctaaagcaaaaggcaaaggaaagtacttctcttgcggtgaaaagagatactggaaactttagtgtcctaagttttttgtaaagagtcaaggtattcctcacttttttgttcatgagttttagagaaggattatttaattgaattatcaattctagatctattaaccacgtgtgttcttatttacagttgttgctgcttgacttgcgatacatctcttgatcggaaaaagttgatagttgaagacaacaacatgatgttggtccaggctagaatactaagctcgctatttcaattttagaataaattagttatgtttttcaaacattatttattctagttaatttgttcgactttattttattatttccagttatgtttgcaactatcactgtgacattttagagtaaaaatttcagttttctcctaatgaattttattgtgagttgcatgtatggattgagctttgtattttgtgatctattattatttgtcctattaaccatcactttagtttttgcttatattatattatgtttttataataatgactactatctatggtattttatcttattatggtggttttcacatgattattctctgcaaagagaatcatgctagataatcacttggataatatgtatgttaacagaaacattattccaaaaataattatgagtaatttgtcaaattcttagacttttacttatataattaaatcatattacaaatttgaattctttaaaatagttcatgaatttctaatagattaatataaagtcattaaagattttgcaaactaataggggtggagaaatttttgtatgcagtttaaagatcaattaaagatcgaaattgcattttaatgataccgcttcagacatatctatataaaatgaatatatattaagcttataatcaaattattccttaacagcatccttaaaaaaataaagatatgttctctctataactttaaagtgattaggggtggactatgattatcaactctgtacgtgttttgtaagttatgagacactacaaaatataagtagtagaatcatctcgtacatgttccatcatcttaagctattagataagatgaacatactatctctaatcagggccggccctgagggta

SEQ ID NO: 225397 - DNA, 2356 bp, Cannabis indica
agtttgaggggcatgatttggtagatatcaaagtttgggagcatgatttagtacttgaaacagtaaaattgaatgaaattagacaaaattccttaaatttaacaatctcaatagttcaggggaaatttttaacggctaaaaaagttcagggagcatgatttggtatatgtcaaagttcaggggaaaaattgctaattagccaaaaataatttataatatttcatataatttaattagtagaaaatagttcgtgcttaacgcatataatataaaatttgtccatgtgttttggtcaaagctcgtttcgtgcagaaagtatcataggaggtatcaaagtccaaaatttagtattaatatttaaatttgtgggtatgtcaaatgttgtactagttagaaaatggttgtcttttccaaaaagagaaagaaagaaaatggtacaccacccttcttttgaagactcgagacatttttcattttcaactagaagagttgacaattgcaaaatatgtttttaagtgtcatcaaatattgatcgatattaggattggatatttcaatgctattagtatattacaatctcttacatggatttgagagttggctttagtaaatactttgaaattctacttatagaatgcccttgtatcaaccatggccttggctttttattagataagaactccctttaagagtttttttgtaacattgaacatttattattgaaaattatttgagttaaatatattatcatcggaaaataatgagaagttattattcaaattagttcgtcatctatcctaagtgtatgaactgctaaatcatgtatacaacaaacatgaatcaacgacgcctcaagaaaattagataattaactaacaaaatcaatctaagaaatatttaaataataaaaaatagatctcataaagaaatgtaaaaaggcaagttcatgtacgagttacagctacagaatctactttctgctaatctccttcgtgacaaattgctaagatgctatcaacatgtccccataatttgtataaatgacaataagagttcctataaaaatgttaaaaaaaatgtttgaaaaacaataaactaagcaaaactaacaaatactcaaaaactaattgcaccaaaagaaagagtattaaaaacttatcttattcaaaaactccaaatcttcgtcgaactgtatgtgaaagtcaacaatctttcaacaaaaagcacaatcaaacaaaaacataacaatactaagaacagaaaaattacgactacaaaatactcacaaaaaacttaagacataccaaatataaaattgaacaaagacataacaattgtatttatatataatcaatagggaatgtatgccttgttagaatttttcattactcataaaatatgcaataacaatatctaattttatagataaatatattacatataattataagtgtataaccatagatctaaataatacctaattcaaaaagaaaaactcaaatagcggaagtgtaccttaatctatagataatgattattttaatccatcttgtagagatgatcattttagggttcatatcaaagtagcagctgaagagaataaaattagatttaataaaatttattgaatccaagatgaaccataaacctcgaatctcaacacaattatacataacacaaactaaattattagtttagagattcttacctcttgttgcctatcagagtttcatcgctatctttttgtattacactaacgaacatccaatctagaagaatttgttgaagagttcacaccagggtctttcaagtcagcctccacactccatgaatagagtgggctattagattcaatttagatgaagatatttttataattaaagtgtgctctcaattcatgagacactgtgattgaataggaaagaacacactcacacacaatcaccactggagagaaagtgtagaaaattcaattgtatttttaaactaaaactgatatctcttcagagtcatgtattaattattctaatatatatcatatataatgttataaacaagcccttttatttactaattaatatagtttcatcaaataaaattaaatagttaaatatcaattatacaatttataattgatataattattcaaaataataatttttacaaaattaagatttttcccttaagatatatttctcttagaaattaattctttctcaaattaaaccttcccttgtacagtgttgtttagaggtgacttgaggaccatggacttatatttcgaaactccaattcatatttgatttataaaactcatcaatagaataatcaggtttattattactctactataaat

SEQ ID NO: 225398 - DNA, 4683 bp, Cannabis indica
aatacatttaatcacacagtcttaattactttccactgtgttgacaacacaataaataagaatatcattgtgataaggatttggatgaatttattaatcaaataagtaaataaatgatcagatgaaccaaataagacactaaacaagtaatgaaattaaatctatttctttattgataattgaataaaaagattacattgaaatagagttttatttagggcacaaagcccaacagtattcgtgcaaagattaaatacccacaagtaaatttgcgaatattcacatagagtgacgaatattcaaactaaaataatgggtagtcaaatgttaacagttaatatgtaaagaaaaacaagagatttataatggttcagtcagagcctggtttgcttaattcacttttagaagatgtttgttattatttttattcaaaatggatcacttttttacatatgatcaaagtgatcctttagttcatacaacctatcagacaggagctttattacatttaattgaaataaaaacgtttaaaaataaatgatcagaatagttttgatagttcttatttaatacccaaatgggtctgactatcgaagtcacacgttgatcgttcatattttgagtaacacaaaattaccggttctttgatactactcgagtatgaggtctgcttgaacctcttaggctcttttatcaaatagaatgcatgtaactacatcgaccgcatattaggcattcatcaactgtcaacatagaactcacaggttctaagtgagttgtcgtgcacattagttattcggacctaatgatcgtaaagatgcgatcttcacattgggcataggggaaacattttttcatcgcatataatcagtatatgtatgacttataataatttctctgtcatggttttatttagttatgccatgcatagtgcacggctaggccttgtctcgatcgcacattctcacaagtttttataatgcgaggatagccttactagggttattgacacatcatccttttccaatcaggaactcggtccacgtgtcattcatatatgagactgcactcgtatttcaagatgaaaaattcatctcctaacacatgtccctagttgcatgacgacaattgtttgtcacaccaagaaactattttgagggacagtcaagttgttacgttgccagtgatgattaattaccttcttgaggtttataaatggcggttggaaattatgagtttatcttcccaaggcgccacgtaatcaaaaccatttggggtttgtgcagaattgtctcgcgacagcttttcaatgacgtgtctattggttttctaatgccacatgtcacgatcgtaatgaggggctataattcctataaaagccccaagtacgaaaaatgagagtttcattttccctctcatttcatcttccaaatctctaaaaaaatatctcaaattttccaaaaatctctcttggttttagaaagttactcaagaatgttgttgaaacttttggagttggattcaggtttatcttgaagggaaatatcaacaagcttttgtatttcaaggtagattttctttacttcttggttttcttaaaaagattttgaataatcgcatgtattttgggttttattggttaaaagtgcatgaaaataaatggtcatattcttagcaaataaaaatataactttagatgaaccgaaacaagccatttgttgaggaatttagacaataccaaataatgtaagtgctaacttagagtagcgactactcgaagaatataatataaagtatatatgtgagtatgtaaataatataaaataaacacaaaattatagtagtttagcaggagctcgagctcgacccccctagtccattattgaaagagtactcttgctccgtatattttattatgatcagcccagccccatttgaatggagggagagcccctacttataggtagtaggtggtggttataaaaattagtcataatgagaccgctacaaataataataaaattcctattaattacattgattacagcagttataaagtacataaaaagcttgctttaatgatacttaaatgcatgaccgcttatttccattgattgttgtctattcacaccttttatgttgatactgtagttttatctaaatatagggaagcctctttcgataccgcgaggtacctattttatctaatattgtaaggtctcttttgatactatgagttctctttaatgtagtccatcttgtggtggaggagaaatttatcccaacagcacatgcctctagttctttaacagagcttgttctgtgctagagaactaaaagttaaccaagcctgcatttatcatttgactattaaaactcacatgtttattatatgctcatcgcataataatgattatgtgaccctcaagttttctatatcgatgcatgaacctcttagggttcttatcgatgcatgaacgtatagaaggttttatcgatacacgaacctctcgaggttttatagacgtatgaaactcacatggttattaatgatatatgagcctcttaggatttgtattgatgcatgaaccttgtggggttcaaattgatgcataaacttcttggagttcttattggtgtgtgaacctcgctgagtttatataaatggatgaacctcttgaggttcgtatatatgcacgaacctctttgggtttgtataaatgcatgaacctctcggggttcgtatagatgtgtgaacctctaggggtttttagtaattcattgaatgcttgcaattatactcatcacgtattggctacttatgtactgacaacatacaatttgcaggttcaggatgagttgtcatgcacattagtcattcagaccaactgcttgtaatgacaatctttacatagggaatcgggagaaacacttttgtcgtcgtatgtttcctacatgtcacaactgtactaacttctctctacgtccaacttttattctattactatgtgattcgtagtgcacgattagaccctgtctcgatcgcaccttcttgcaagttttgatcatgtgaggatataattttgggaatcgctccctcatcatgcctctagttctttcaatgataggttgttgtctaatcgttgagctttactcgagggacatttaggttgttgcctcacgggtgatttttggttttaccttattgaggttttcttaattattgttggttgttttttttcaagatgctttgtgagcacaacccattagggtttgtgctgcccgattagacatagagacgtcttttcataaattgcctaaatgaggttgttgacctcacttttagccaacaatactgactcaattaaagagattaaaatgatagataataattaataataattatataaaattaagaaataagaatacagagatttatagaagtttagtctcgtgatagtggtaatagtctactcccctttcacttatattacttgtgagaaaagaagaaagaagttcttgatctctcttgaaagtttataattttgcagcataagagctctcttgaatcatcgaattcggaaccctgaatcatgtaatgattctattatttatagggaagaaatacatcaattaggtttcgcaaatcaaagagaaataataaaggaaattaggaatgtttcctattttacaacaataagatccatgtgaagcaactccaatacttttgaagtattgatatcagcaacacttttgtgagtgatttttaattgtttaccaagttgacatggttcacacttatcaacactttctttacccagtttgagacgaccacgaacaatacctgcatttgacaattttttcagattttttataattagtatgtccaagttttgcatgccacaaatctgtgctgttgttgatggttgaatgacaagtgaacacaggtgttagggtataacaattatcaatagatcgaaatccttgcaaaatacgttgattatcatcattaagtacataacaatgatcactatcagatgagacagtatacccttggtcacaaatttgaccaatgctaagtaaattagcccttagtccttcaacaaacattacattttttaatctgggcaatccttcaaaatcaagagttcccataccaacgacttttccagctaagccattaccaaaagtgacttccccacactgcataggcttgatgttaatcaaaaagtccttgtcacttgtcatatgtctagagcaaccactatcaaaataccacatttgagaagcagcacttttatcagaaaaacgagctagacatttttttcttaatccatttttgtttcatacatctatgtttcttttaagattttttcaaattactaaaataatttgttttatacatattttgcatggtgaaacatttaggtctgatatgtcccttcctaccataaaaatgacaaataggcacacatctttttacctgagatcttactctttttgaaattccaggagactttgcttcagcagaaatagcttctgcaacgacaggctttgaatctgttgcaacaaacttcaaatttacagcatcaggaaagttcgttgtaacactagattttacaaatttcgtgatttcagaactttcaataccatttgatctaatgccagcaaagcctctttgac

SEQ ID NO: 225399 - DNA, 3258 bp, Cannabis indica
ctgtaatatgtaccataaatcattccacaatggccactttatgccttgtttttttgaccaataaatgcatctaatactttactatagaagcctttgttgaacattttcttagtaacacataatatctatctgctccataatcttcatcttaattagtagtggaaaaatctatctagaaaacttttaagaaatttcaaatcatttggaggttgctttgggatcaaagaaagatgctaagatcaaccttaaccatttttttttttatatatttttagattatcaaaatttattttttaatttatatcaaatttttagattatatcatcatcaatttttttaaaatattttatttattttaaatatataatattaaactataaatacatacacatttcaaaaaaaaaaaaaaaatatctatatatataaagaaattaagaataatgaatagtagtctgtctctatttacattaattagtgatgagaaacttgtacactcatgaccagtaggagaaagtaggacgaatcgcattttgacaaagaccggtttcaaaatcttccaaagaaaaaaacaacgctaattctaacccaaaaaaaaatacttaagtagcaaaatttttgtctttaaaataactgatacttataattcttaaagttcctcgtatgtttttttttatttattttatataaagccaagtctttgattaagggaaaatttttattaaaggattctccgagtctttccattggaaattttttatttaactaactccactgcccactagctgcaatgaagcaattttttttaactttggttttgaatttatttaaaattaaatctttgcttctgtacaagttttcttctccagtggttcatcaatgtttcgaaccacgtatttcacaaacttaaagggaaagactaactgactccaagcttagatttttgcatataagttcttcccaagaaatctcatttttgcaatatgaactatgccaaaattttcctgaaatcagtgttcacagtccttcttctccattattgttctgcttcagattcaataaccgttgaccagcccatcaaagacgacggcacagttttagtctccaacggaggtactttcgctttggggttctttagtcctggaaaatctagttctcgatacctgggaatttggtttaacttttcaaacgcaaccattgtttgggtagcgaacagggacagcccaataaacgacacgacaggagttctttccattgatgaagctcaacgaaatcttgttttaaacgacggtcaaaatgttcttcactggtcaacaaatatttccagctcctcaactaacaagatttcagcccaaatcctggactcgggtaacttaattttgcttcaagaagacaacaagaaggtcatttggcaaagcttcgatcacccaactcatgctctgctttcgggtttgaaattaggcctaaatttaaaaacaggtctaaaccggttcatcacgtcatggaaatccaaagacgacccgggaaccggaaattgctcattgagaatggtgccgaatggttcgccgcagcttatactgtacaaagaccggaccaaatggtggcgagcaggacattggaacggcctccagtggagtggcataccagctttaagcgctctcccacggagtagcttcttcaacatttcatttgtcaacgatcaggatgaaatcacagtgatgtggagcgtactggacccttcgatcttcacctacatcaccgtagatggctcaggatccattctacaattcgcttggcaacagcagcagcacagatgggtccaaatttacaacgcccctgtcgacacatgcgataactacgccaagtgcggtccgtacgggaagtgcgacttgtacaacactagcgggttcgactgcgggtgcctaccgggatacgaccccgtcttgccacaagactgggcgttgagggacaacgccggcggctgcggcaagaagcagggagccttgtccatgtgcggaaacggtgaagggtttgtgaaattggcaagtgttaaagttccggatgcggccactgcggtcgttgagcaaagcttgagcttgaatgagtgtcgagagaagtgtcttaggaactgttcgtgcatggcgtacgggcttgctgacgtgaggaatgggggcagtggctgcatgacatgggatgggcctttaatggatatgaaacagttcttggaagggggtcaagatttgttcgttcgtgtggatgcaattgaattaggtacctctcaaaattttaactctaggactaaaaatccttgatgaattcatgtgattattctttgtggtttgttttgttaccgcgtgaggtaggagtttgtactttgttctcttactcatcctttcactcttttcacttttattaatgatttttgttatgagaggcatgcaatgatgaggttaccttttctcttttcagctaaatattccaagtcagacgcgctatccccgaaatggattttgtctattgtgggattgtcagtcactgctgctgtactactcattgcctctgttttgtactgtttaaagcaaaggaagagaaaaggtatgcgtttttacctttttacttttgttttttgttaactagtcttttcaactttttgtagtacctaaaatgttcaagtacaactaatgactggtaaaattaagtccaattgtaaatattacgacgtacagagcatcagttatagttaactagttaagtactaccaaaacggctatatatgacagcatttagtgaaaataaatggaataagtactgagaaaaaatgcattcaaattgtatatcgtagagccccacatacatattgttatattattgcctgtgattcatctgtgttttacttgaaaagttgtaaaagtagaatagataattatatgagaaattaacaacaaacttgtgttacatttgctgttggggccagcagatgttgttcttggacagccatcgacaatgctgaatgatatttcaggtagcttaatgagatttgaaaattctccaagcaaaactagtagagagaaaacagatgtgcttttcttcgatttttccacagtggctgctgccacagacaatttttctcctgttaacatgcttggatatgggggatttggctctgtttacaaggtacattcccttcaatattgcagaaattattcataatgtcaacagtaatctttgtaacaatttctgtatttttttttattttatttt

SEQ ID NO: 225400 - DNA, 2764 bp, Cannabis indica
ctctctctctctctctaccacacgacactttatctctgtagagaaaggtgtcaagactacgtttctacatggtgatcttgaagagtagatactcttgaggtaactgtcaggttatgtagagaaagggaaagaggatcatgtttgtctattaaagaggtcactctatggtttaaaacagtcacctaggcaacggtataaaagattttatgaatatgtaatcaaatagagtttcaagaggagtgcctttcacagttgtgtgtatgtcaaaaatgagaagtcccctatttttctacttctatatgttgatgacatgctcattgcaagcaagaacatgagtgagatatacaaagtaaagaagttgttgaacaaggagtttgagatgaaagaccttagttcagtcagatgaattttgggaattaaaattgagagagacaaaaagaaaagaaccctcaaactgtctcaaagtggatacatcaccaaaatttttgagaagtttgggtttggtgatttgaaactagtcaacaccactttcacaaaagtttagattgtcatgctcacagacaccaactacaaatgaagaatgcagctacatggagtcgattcgctacaccagtgtagttggcagtatcatgtacatcatggtctgcacaagaccaaacatttgtcatggggttagtgttgtgagcagatttatgagcaaaccagtgcaagaacattggaatgtagttaagtggattatgagatatctaaaaaggacaataaatactagactgctatatggcttgaacacaatgaatgagggtgttgaaggctatgtagattctgactatgttggggatctggacatcaagagatcacagtcaggctatgtgttcatgcttcatgaatgtacaattaactggaaagctaacctccaaacaatggtagctctttccactattgaagctgaatacataatttgtgtagaagctgtcaaagaaggaatttggttgaagggaatcacaagagaactccaaacaatggtagctctttccactattgaagttgaatacataatttgtgtagaagctgtcaaagaaggaatttggttgaatggaatcacaagagaactaggaataaaccaaaaaactgctaacattttctgtgatagccagagtgcttttcacctaatcaaaaatcaagtgtttcatgaaaggaccaaaagcattgatgttagattatatttcatctgacatgtgatcaatgaaggaaatgtcaaactgtgcaaagtgtcaacagaggaaaatgctgcaaatatgcttattaagggcccatttggcatagcttttggaaaagctagaagttgctttttgaaaaagctgtgataaaaatgtgtttggtaagttgttaaaaacagctttttgaagaatttttagataagttacagctaaaagctaaagctacttcaacccaacttttagaaaaagctcttttgattaaaagactataatattttgttttactaaaactatatttacttatttattgtatattaaaaaaataaaaaataatttaaaataaactaactataataaattaaataattattaaatctattattttttttttaaaaaaaataatttatattttattttaatattaacaaacaacatcaatttagaatttttttaatatatttgagtttctaattttttttatatttgataaaatataatataaaaatactataaattatttttatcagatacatataaatttatctttgcaaaatatatatatataaaaataaaatattatataaaataaatttttacatatttgtgattataataaactagattataacattatcattattattataatagatcttaacaactcacagtactttaaaatttataatttaccaaacactcagctcagctttttctcatagcacaacgacaacttgctttttcccacagtatagttgtgccaaactggccctaaaacacttactatagcaaagtttcaacactgcatcactgatatctgatatcattgacaccgtaagttttagtaattttttctacttagattagtagttgtgtattagcagttcagttcaggtggagaattgtaaatgtaatgtctgctaatatagtgtacacgtgtactaaaccacttacttgttttgttaagtggttgttatagttagttaggggtcggtacccttcaatttttagcctatgtctacaaataggttttgtatcccattgtaacgattgattaatcattgtactaaagcatatatgcaatcctatgaatgtggaataaggaatatagattaaacatatatgtaaaaagatcgaatgtgtgtactttcagccattgatagatgtaaattccactaatatattaatctgattttcatatctgtagaaatatgagagaaaagaaattagtggggtatatggttctattccaaggtctctttaactctctgtgatgatgatttggttaaaacgactgggacaaaattgtcccagaaaaattcgatttaaaacaaatccaaacgacaatggatcttgtcgtttctttcctgcacaacagatcgtttgatcaaaacgatttgtcgttctccttcaaataaaaccaagagaaatcagagctaaccctagctcatttctctctttcgaaccttcgagagttctcagactctctctctttctctctgccttctctctggttctcaaaccctagaaccagagattctcctcgatct

SEQ ID NO: 225401 - DNA, 1654 bp, Cannabis indica
taaccaaaaactatgctgaatccgatgctcacaccgttgatgaggtacgtccattgatctcgttcgcctcttttatagagtataactaattaattagtagtataattacatgtttatctatatatcatgaattcaaattaagtaagtggcaactgaatatatatatatatatatatattgattaggcggtggggtgacattaataaaagctactgtactgtagtctgtcttctaaataagactatatttgcaagctgtaatatcacctgtacaactacctttcattctttgtagcaatcacctaattatttctcaattataataacagcttagaaaaatccatgattcaattattttttttcaaaaaaataaagaagacaaaaatccctaattatggaaagtctttaattttgagccagctttccaaccacccggtgttaaaattctttggcttttcttcaagcaggatatatatatttatatacatatactagttatataaacgtattagtatataacccttatccttgatctctatattataaaccaatgggtcctataattacatatgtgggatcccacaaagcctagatatattacatgattgagatgagtgttaagtatataaatataattcatattatctacctataaaatatactaaagaaaacattttgaaagatatttcgccatctatgattatctcccctccgaagtcctaagattgtaatcaaatttttctatagtttttattaattataatattccaatattacaaaatctaagcctttccaccaaataattattctctataaatatattttataactaattaatgaattagaaaaatactttggaattgaacttatccttacaaaagcgacattgacaggtagcagctttcttattatttttgttttctctgtgtagtactatttttattgtgtttactagtttgattgtataaatatatagaataattagtaatttgtttctctcaattttcaaaaatatttatttgagtccttaaaatataatttattaagttttttttttctgaactgttacatttacaaaaatttatagtccttctgttattagctacatttcgtctcgttccgtttaaatgatgatgtatttttgtcaattagtataatcttgccccctaaactttgacaactatcaaaccgtacccttttaaaacaaaaatgagaaagatttaatatttttttttagtaaatcttaaaaaattaatttagatcttaggaaaaattattttgaatgtttaagaaaattaaaaaataaattaaaattttaaaattaattacgtgatataaaaaattatttatttttattagaaaattcatttaactattaaaaagtatatataaaatttaatttgtaaaaatatattaaaaattaaattttacaggaacaaacttgaatatattttatttttatcgaaaaatgtagatttaagtaaacataacattttttttaatttaatctataactgtttttcaaaatagttttatatttttattaaatttttaattaattttctttatctagtatgagtttataactataaataagtttgtttttttcttcaaaaaattttagttcatttaaattatttattagattctcaata

SEQ ID NO: 225402 - DNA, 3051 bp, Cannabis indica
taattatttaaactttattttttaacgcattaaattaatcaaaagtgtacagtaaattttataccttactattaaaaagtatgtatatatatacgtatgtgtatgtatatgatgggtgtggaatgacacatagctatgattatgaaggatgaaactaaccaaagtagaaattatgagtgcagaattgttacttcatctacagaatcaggactcaaaacagcagagatatcatttaataaagccaaagggaaaaaagtgtaagttaatttaatgagaaatggtaaggaagatgttttaatgtttaaggactttttgttacatgctttatgaataagagtatgtatgtgataattcacagtggaaagcatgaagttcggcgtgtacaaaggaaattgctcatggaagctctctcaaatgatctcccaaatggtactatcagattctcctccaaattggttgctattcaagaatctggtttcttcaagcttcttcatcttgctgatggtactatcattagaactaaggtaatataatataattatatgatttcaaaacccaaattcataaattaaactttggataagtaacaacttttgagtttagcaatacaagttgatggtaaaattgtaatttttcgtcaaattttgtcaatatagaatctgtttatgtcttaaattggttaccaaacttaattttttaatttatataagaaaactgttactacatgttttcatctagataggcccgacttgggtatagatggactgacctatgcttagagttcacctagctcagggttcaagaaaaatttacccttttaaaattatacatttttttttactgattttgaaaaatatcatattttttttccaaataaaagcccaaaaatatattttttcttctaatagctcactaaattttaagggcagtcctgcgtcagattcaatgatttaaaatttgagtctcacatgcttacagttagaaactctaatgaagtttgtactaacaaaattagactaaagtaatacttttattaacattaggtacttatgctgctaaaaaaattattgaatttacgtcggttagaaatttaaaactttaaatacttatacggtaatcatccctaaaactttatttttttggtaacgatttgggtctgattcataactactgttgatgcttgttgttaattattatgaaataaggtgttaatagggtgtgagggagtgaactcagtggtggcaaaatggctaggattcaataaagctacacatacagggagatatggcattagaggatgtgcaactaattttgccaataataatcatggacttgagccactttttagtcagttctttggacatggtgttagatttggtctcgtcccttgtgaccccaaattcgtttattggttttttacttttgctgcttcccatgaccaaggtactaaaacaattttattctttaactttgttgatatgtgttgtgactgattttttggttgttgcattttatatgtagagaaagagcttgaagagaacccaactaaaacaagagagtttgtattgagtaaattgggaatgattcctgatcaagtaagaggtgtatttgagtccacagaattagaagccttcaagttaatatctccactaagatatagaaaaccatgggagcttttatggaaaaacataagcaaaggtaatgtttgtgtggctggggatgccctccatcccatgacaccggacctcggccaaggcggctgctctgctctagaagacggtgtcgttttggctaggtgtcttggggaagtgttgctgagaaactcgagtaagaaaagtgaaaaacttgaagaggaatatgagaacattgaaatggggttgaagaagtatgcaagtgagaggaaatggaggagctttgaccttgttgctacagcttatgtgattggttttatacaacagagtcataataaagttttaagctttttaagggacaagtttttggcttcatttttggctacttgggtgttcaagaaagctgactttgattgtggaaaactcactaacaattaaaatagtttcaacttgttctttgtttttggtattattaatgtgtttcacattatttctagccgaaagagtaactcagtttgagctatgtatacttaatttgagatattatgattaaaggtacaaccgaataatgtttgatattgaagacatacaactaacataataatgtattatatttagagattatttttactaattcatagatagaaaatgtattatatttagactagtttagggagctcaagtcttgttctttgttctagtagttctgatcataaaacacactgtttcatagattagtctacacaatttctggtgttattattcttttactgtttcaattgttaatttggttattaattaatttcttgttagcagattaattctttgacacttgttcttgattgaggtgttttgactcacaacaaatagtattagagtcaagttaaatttaaagagatcaagaactgtaatgccttacttgtttaggcacgttaaagtatttttcacaattattgtgctaatctttttcatggattagtttggttagattttcaattttttcaaactaaattagtattacggttttttaaaaattataatcaaaccataccaattaaatgatcaaacaaaaccaaaccaatcaacacaaaaacggattggtttgatttaaaattatagttcgtatttcctaattgttctaagtttttacaataattattcattttttttaatttttttcttttaataaacttataatacataaataacaataaaaaattattatcataataatattaaattaatattttacttaaaattattttaaatattaatatttcctccaaataaatagatattaagtatatataaaataattatacagttaatttagtttgaaccactaccaaaatttttaaaatcataattaaaccaaaaaattttaaactgattcgcattgtaagtgtttggagcttttctt

SEQ ID NO: 225403 - DNA, 2720 bp, Cannabis indica
cttactttcttacttttttacaaaaaagaaaaaaaaaatcatgcttgcagagaaacaaaaaaaaaaaagagagagagaaaaaaaaatcatcaaaaacacccaagtaaatacaatagaggtacaagggctagttactcaagcacatatgtctaaaatgtggaaataaactcaaaagtagaacatcaattacatatatgcagatgtaaatttaatttttggcaaaaaatatagagcttgactgtttgcataagtcataatcaacaactttaaacatcaaaagataaagcaacaggagaataaaacaacctcaattaaggaagaaaaagttttacctctcttcgaactttaagttcttcctgaataagtggtcggccattaagatacaacatatcaaacgcaaatatacaaacattgaccttgatctcacttgtaaccacattttttcgagctcgagtgctgagtatctgccatattcatttgtaaaagacaaaatatcaacactatttcagcaaaaataagaaccagcaataccaactaaaatggtagaaatgtactaactagaacattttttcaaaatacagaaaataaatgagaaagcatagctgacaagcagagaataagtacagctggctgtgtagtaatactactgtactatttttcagcaattctcctttttttttctgcaattctcttaacgcagttagttctaccaatgtacatggagacagcaaatttcaatatgatgcaacacggatagaaatcaaacaacgtcaagccaaaagaagctaacaaaatctctattttaataggcagttttcttaagtttcatttatatttacaaggtaggtaactagtgattgtttgggttaattaagatttttgtcccccgaactttgacatgtaccaaatcatactcttgaacttttcaggccgttaaaaatccccacgaactattgagattgttggcttcaagaacttttgtccagttttactaataaaagtctgacgtggaagaaagtttagggagcacgatttagaaggtgtcaaagtttagggtagatatcaaagttcgggagacacgatttagtatatggacattcgatgcgttagtaaaaattgaacagaattggacataaatccttgaattcaataatctcaatagttcggaggaaatttttaacgacctgaaaagttcgagagcatgatttggtacatgtcatagttcagaggaaaaaatcttaattagtctttgttaaattagacctcttgcatacaataaaaaaaattaatatttaggacaagaaaacctgaaagcaaactagaaatacatggtagcttgaacaaatatcctaacacactcttttatttcctcccaagacaacactgaagcaactgcagaaaggatatttatcataattaataacttacaatcgcctgttttatttttatatttataataatcaaaaccaaaaatctgtaaattgatacttctgtaaagaagacgaaatataaattacctacaaacagaaaatacacactacattcttccatttctgccacacttgcagagcataattcctagaaagtttgagatagatggagagataataaacctgaaagggaagtatttctgtttttcacggtcataagcaaccagttcacaatccaaaacaaatgattttacagatgacttctttaacctgcaagctgacagaaaatattagcaaatgacgaactgaggcaagacctagttacaagtgttacatagaacataaatgatgcaaaatatagaactccatgagcatcaccaataagtgatacaaagctcaaatatagctcacctagcaaaaaatgtgctccaatagtgtaccaaaaggatgcagttttggcacataattgatcaatatcaagatactaatcttgaattctttcaataactgagttggagttttggctataataacatgctaaaaaaaactattagattggtctaccttgaaactgcgacaacaacatcaggaaattttccagtattccgttctgcatttcgactatatatctcaaccgaaccatcctccaagtaatgtatctgtttggaaaagggaaaaatgaggcccatggggtataactagcatgtgcaatcaccaattgtatttgatagtttcacctgtgctcgttctccatcatacttgtactcgcatgtatattctgtgttctgaaatttttgtactatctcagaaacccctttagttggtttagctaacatagggccaactggaataccaggagtaaagttacaagtctttggaagattccatacaccatcccccaaaagggcaggaataattttatcataaacaggaagtacagagtacacttgtttaacaatctttatagcctgatacacacacaattataaagaacttaaacaaaagaaaagaacaaaaaataatttttgaagtgtattcttgttagcattggtgcagttgactataattaacatgatcctacacaaaaaaataaataataataataacatgatcttacctcctctaaaggagaatgtatattttttggagtagagtgttgtttactatatactgcagcttgtcctaaagcagctaaaagtgtctgctctgccaacccaattcgcaactttgcctacagagaaattttgttaaagcttattaacgactaaaagcaactaacaacaaaactca

SEQ ID NO: 225404 - DNA, 2871 bp, Cannabis indica
agtattatttttaccatttaaaaaaaatataaaatttaaattattatttaaaaaaacaaaaaaaaaattaaccaataacttttaagtctaaaataatatttactcttaaaataatattaaatttaaccttttaaaaataataattacccctacctctcttgttgccacctttaatttgacattggtgtccacgagaagttatattaatgtggaaagtttatcattgaacaatcaaatttgtttcaacaaaaacttgaacatctctaaaaataaataaaaatctcattctacactacagccacgagagtgggaattatcttattttcacgaggagataaatggtgttggtcaatagttaattaaattgataatttacacaagtacttgtgccagtgccactgcccattggtttctccaacacaagggatgacccctcttatgtgatttctatttttaattttagcataatttataattatatattttctttggattcaaaatagaaataaattaagttccatgtaaaggagaacaaaaatgatattttaagtttgaattcccattctgtatattgaaaaaaaaaaaaaaaaaaaaaaaaagttagtaggactgaatattggcgcttcctaaaacactttctaccgaaaatatgtcctaaaataatattgcgtgagatatttttgttaaaatgtgagaataaaatgaatgaagttccatttcaaaactaattggcaatgagagaagtagctcattcatcttatatatcacaatttatttctacatgagactaacttttaataattttaaataaaatatatttatttaatgtaatatttagtataaattattagaattgttacacaatatattttgcacctaattaattgatgaaaaaaatccagtaaaatggtacaagttggagatgtgatctaaaggagactaatagtagtggggacaatttggaaaatagtgaacattaagtggacgatatgtgcaaaggaggtacgtagctgccttaaagttacctttgaattacttatagtctacaatgatgctcttactccctactttgaaaactattctgacctattatatatctaattattctcttcatcaacgtcaataatgaaagaaaccaaaaacttttattattcatgcaaattgcaaacttatatattaagatcagttcaactcaagtaggagtgcatatggacgcaaactcatcataattaaaaagctttgaaaaatattggaaaatgcttttctttcttctagagagattttgattattcaagtctgattttgatcatttgcataaacaagtaaattaattaattaaattaagtcttggtctcttcctacgtcttggtcgatggtccaacacatttcgcatagcttattatttgatgattcacatattattaatttcaaccttatccctatacgtttgattaattagtagactagaaagttaaataacaaagcgatatcgaaatatataaacatagacaaaaaataattgagaccatatatataataggagtatatactattcataattggctggaattgggatttttgaggggagagataccctatatttaattaattattacttctaaacaatcggtatattgttctttcctcgaagcttggtctatttaattcaacagaaaactaattcagttgcaaaaaaaaatatacgaaatttatatggaaccaataaaactcttatatttttgttaaaatttagtaaggtgagtgaaaggagtagctcattcaaaattttcacacattaacaataataatttttacgtaaggtaaaccatatgtatataacagtcttaattagttttgacgagaactcgaaaatttcaagattttccactaacgtgcaagtatattgtacatatactatgtgtaaagaaaaaaagtattaaatatatatacttcatatattacactcaaataatattttttttcgtcaaaatatatataatttctaatagtgaaatttgaattaatattcattcatttggttaaaattagtatactaaacttaaatatattaaaattagttagatatgtcactttttattaaattcaaaaatattcctttcacaactcatccctcctttctctctttctttattctctttgtctctagctctcttcttctcatcactcacacaaaaaccctagcaacccatggctgccaaccaccacgcttccaatcaaagaccaccaacctatcgaagaataccaactcaagatttaggatcttcgaaagcatgaccaccgggccatgaatgttagttttccatttttattttattgtatattctgtgtgatttagggttgaaatgtatgattttatttataggtttattgatttaggaataaattgtatgattaatgtatgttacatgtggcttgatgttagatttagggtcgaacacggtcggatctgagttttgggtagaaaactaattttttttgccaggcccgatagtagtctgatgccttgttgttaaaataagtaaaagttgaagatgaaggtctaatgatggtcagatggtggtctgatagtgacccgataccacctataaatgtaggatatagcccgatgtcttcatgacgagcttaatgaatagaacttaacatttataaatataaactgatggtaattcgatagtagctgatgctactattttttatgtacaaaaatataaaaaataataataattaatggatagcatcggattaccatcaaattactattagatcaatatggatgtgggtatagtaagtatgagtggtgaagttagaagaaaaaagaaagaaaaaggatattatgggtattaatataaa

SEQ ID NO: 225405 - DNA, 1490 bp, Cannabis indica
tggttaaataattaaattttcttgtactgtttttgttttttatataaaataataaagaatataccttttcgtgtaatttatatatataaaaaaaaattagtgttaaaatagtatttatttgatgttgatttaacactaaatttaaattttaccattgaaattgcccatagttaaattctaaataaaataaagagcatataataaaaatcatatttttgctctaaaaaaaatcatatatgtttttaatatgtttgattaagcctatagttcaacattaatttaagcaaaatgaatttcattatttttataggtagcaataaactacttacttggaaatttgggaaaagaatatggagaaacagttggagtggttgatcttggaggtggatcagttcaaatgtcttatgctatttctgaaaaagcttattcaaatgcaccaactccaaaaaatggagaagaaacatatgtcaaggaaacttatctcaaaggctccaaatattatctctatgtccacaggtttaattctcattcatttattattaatctcattcttaatcatcattaaatatatatatatataattatattgacatgttgatgatgtattaattcttatgtatatagttacttaggttatggtttattagctgcaagagcagggcttttaaatgtcactggtgattatggaagcccttgcattttggatggctataatggtaattaatcttaatcactttcactatatactaattaattagttattattatatccttcttttgcttataatatctcatgattaatatgttctaaaacaaatttacattgagtagcttaattaattagaagttggtattaagttaattaatctagttcgactaaattccttatgttttaatttttacataattaatcacttcatgtttttttttggtcatattcccttttcacttctatttgtaaatctgaggtttcaccattaaatttttatttgtggcttttaacttcatttgtgtttgtaaattcgaggtgtaaatttaatttcaccattatattgagaaggaattgtttaaacacaatagaaaaaacaaaaacaagtaaaaagcaaatataaatactagaaatcttttttcctttctctaatttttcaagtgagtatattcgaatacctcgtagcatgagcattgctattggtcactataaagtgtccaacaccacattgatatgatacattgtgattgattaacgattttctatttatttattaaactcaaaatgtatgagatcgaatattaatttgcataagagtatgttatttctttgccccttaccattttttcctcataagttataacatatgtgtaagaaaataaatctttatttttgttccaataaaaaaaaacaattatttcttgtttgcttagaaaattgaaacctagctagacaataattttttctttctaggtgcttatacatacagcggtataactta

SEQ ID NO: 225406 - DNA, 2533 bp, Cannabis indica
tccaatcctagttttgtatggcaaagcgtttgggaggctcaaagtttagtgactaaggggactcgttagtctgttggggatggctctctaatctcggttattggggattcgtggcggctggatgacactaacccttatattatctctacacacccaagccttagtaatgccaaggtctgtaacttgttgtgtcttgaggatacttgttgggataatgaaattcttgaagacttgtttgaccaaagagacagggagttaattagaaagatatctttccaaatttcccaaggacctgaccatatggtatggagcaaagaaatttcagggcattataccattaagagtgcatacaagctgcttcaagagatgaagggaagctgggatacagaggatacaatagtcacaaaattctagaagaagctttggggtctaaaaaactcccttcaaagatgaagaacttgttgtggtgggcgcgcaaaaagtgtcttccaacaatggtgatgcttcgaaccaaaagagttgaggttagttctctatgccctatttgtagtgtggatgatgagactattttgtattctctagtttcttgtcctgctgcggcttcatgttgggaaagagaatgaatcgttagcaatttccatccacaaactacattccttgattggtgcatttcctattttcatcttggggatttggataaaaagtgtctaatggtggccatctgttgggccatttggaatgcaaagaatgattgggtgtggcaaaagaaggcagcaaggcccgatagcatagtgtcattagcagaagggtaccttaatcaatggagagttgctcaaaactcagagattgagtcatcatggtctaactttcagttgggtgagtggggcggagcaatggatgttaccaccgttgaatagtattaaggtcaatgttgatgccgctttgtttgatgaaggtcaaaggtttagggtcggctatgtggcccgtgattctaaaggtttatttcttgaaggttgcacaaccctccataattgggcggataccctaaaacttgtcgaaggtttgagatttcgtgaggctctaagctagatcaaagagcatcaatggcagcgggtaattcttgaaacagattgtttgaccgttgtgcaggctttacgaagttccgtgcatatgatttcgttgtttgttaaagttattaatgattgtaaaagtttactttctgttttgtgaaatgtttctattgtctttgttaaagaattagctaatatggtggctcataactttgttagagcttctatattatatcctggtcgtcaattcagtttggaggatgttccaactgacttgataccttacttggtagctgaatttgttggttaattttaatgcaagaattttccattcaaaaaaaaaaagggaaatccagtggtaacattatggaagagtccttttatatttagttactaataaaaatatatttttagaatattttaattaataatatatcattaatagaataagtatatatacattaatactctcttgtaataataaattggtttggtattgtggtaagatgtataacggttcatgttgaagatatagatttaacacttggttggactctttattttatattattttgcactgaaaattattgaaaaaaacagactcagtttcagttgggagtcgaactcagacaggcaagcaaaatctcataataagagactcatacccccattaaattaacgtagttttgtgttaatagtagtacaaataaatattcaactattacattaatatttttttacgggagccccatcttactttgcttaccccttgaaccagtactatatttttattttcatttatttatgaggtaaattgtaatattccaaaaattttattgatatttatttggacatattttattaaatatgtaaagatatgtatattagagtaagattataatcttacttaagctaattactagttaattagtgaaatttaagtaaatgaataaataaagcgtaatttattaattacgaagattttatcggattataagggtattgtaaataccattttttttaaattaaaatatttttgggtcgctggccgtgagaacttgacggagtggtcagaaatgtcatgacattaaaagatgagttgaaattggaattagaccggactagtttaaaattctaagttgtcggtttggcagattagttagaaatgacttaaatacccttaagtatagtatagtttaagttttatcaagaggggtaatatggtcatttcttaggttaatttcactttgtcttttaatattaattggtctgaattttatttaattaatgttagttaaatgctgaatatttttgaaggttataagttattaacttagaaatcaaggaaacacctaatagcctcatccctccctctccttcatgagcaagctagaagccagccaaccaagggaaaattcttcatcatttttcttgaattctagcagatttttgtatctaagttc

SEQ ID NO: 225407 - DNA, 4046 bp, Cannabis indica
tatttatatatgatcaattaattaatttattgcatgcacagtcaataatatatctatttggcccattaattttatagcagtacaaaacagtgacacatatcaatatttggcaacaaaaagagagagagaatgaaagtgaattttcaagctgcgaacagtacttttcaagcaattattgcacaatatagatctcaaatcaataattgatcaactttttctctctcacaataattattattattattatctatgcttaattaattcacaataatttaatcaactaatctctttattaaaaaaatatgtgaaattcatatattgaatcgattaataataataattacctggagttcctggaagatttcttttcttcttaggcaaaagtactgattgttgttgttgatgatgagaagaagaatcgttgctattagtactactaattggtatctgttttttctgttgatgatgattattatttccctgaataacttcttcatctccagtagttgtagtactactgttaataatatgaatattattattattattattattgttccctgaagagaaacttccttcctcacctgctgctgtgatatttgacatttttgaaatgaatattaatgaccacaaaatataggtattgatagtagtgatgataataattaagtatagagactatagtttgtcctaatacactcttctcttgttgttggtgatgaaattaattaattaataataataataataataataatctaactaggtagcaccctcaaatcaggagtttgatattggtagaggaagacaaaaaaccatggaaattagctccttcatttctggtcatgatgatgatgatgaggagggaataagctagaccaaagtataatattattactactaataataatcactaattcacacatctatacaagaagaagacttttaagagtttttacacattggaacttggtgatctttggccttttatatattatatatagtgctcataaagagacaatagctatatgcctacgtatgatgattgatgcccttaattaacttccatgtaattaattttcttaatttatataattagatatcattttggtatgaattttgttatttactttatgtttagtgctattattattcaatgattgtaaattgacttcaatatttaatagtataattgtttaatttttggataaaatttcattatttataatctataattataattattattacattttttttttaactaaaattaactttatatataaatatgcatagtgtgtatccaataattattaatatttattggtccatatatttctaacttgataattagtttattaatttatatttattaaattataatgatatatatgcattaactttttaattaagctactttagaccttatatttatatcattattatatataatttaacaaatattttaaataaaaggttatctcaccaaatgaataggatctattagttaaaaatgtaaataataattatattttatgtttgtaaaatttaccgattagattttttattttattaaataacaaattaaatgatcatatatttcttaaaatgttagaaaataatactctaaaattattttttttcttctgtaacaaatttatcatgaacaactgaaaaaaaaaaataacaaatttggtaatgacatattcatgtcaagctattaataagcttaattttgacaaagttttgtaatatctttaaagaaatacatgtctaaattgtcacttaattaattaataaaatagagagagaacttttataaaatacaggtaaaaaataatattatctaataaataatattttatttaatttatttattttgagtgaaattcatcaaggtgtgtgcccctcaggaagcggaaggaagtctctctttaactagtcaccactagtagctagctagcatgggtttcaatggagagagatgccaaaaagggtcaaagtgtcattattgagtaatttgatgaatgaaaagtggagtgaattatctattcattttgtttcatatgaaatgaatttgaatgatatgatgtacaatttctttattctcatactctaatttaatagttcaatggatatgtgaagtttgatgatctagcttattttattttttaaaaaaagtttattgagtatgtatttatttggtatttgggttttatcaaaattaaaagtattttgaataatacttataacgtatatatttaatgttgaatttaaatttaataattaaacttaatttatgaattgtatttagttatatgtgtaatgattaacaaaacaaagagaagaggaaatattttttttcttacattgattaaatagcattgagttagagtttatatatatgagctagaaagttagttaggtgaaaccaactaacttaacttcttttgacagctagccctgagcccccctcaaacgaagtgttttctggagaagagacactgagtttacttctgagaagaggaagctgattgcttgatattggctttgtgaggcagtctgctacttgatgttcaactgggacatgctgcacttgaatctctttgttgatcactttgtctcaaacaaaatataggtcaatttctatatgtttggttcgagcatgaaggatgagattggtagcaagcatgacagagctaatgttgtcacaccaaatcgtaggaggagcaacaatagggacatgtaattcagttaatagggattgcacccaagtgatttcagagaccatagctgcaagacttttgaacttagcttctgttgaagaccttgagattattggttgctttttagactgccatgatattaaattttcaccaaagaaaacacaaaatcctattgttgatctcctatcatcagggtctgctgtccaagcagcatcacaatatgcctcaagttgaaaattagatactatgtgcaattgaagtctataatcaagtgtaccagccaagtaccttaagatcctctttactgcaacccaatgagactgtaggggattatgcataaactgacataccttattgacactaaaggtaatatcttgtctggtgattgtttcatattgcaaagccccaataatgaatctgtatagggtaggatcaatcacatgatcactttcatagtttgaaagcttcaggccactattcataggagtgctatgagtcttggcatcttgcatcttagccttgcaaaggagatcttgtatgtaatttttattttgagaaaaagtagcataccagtagctgtagacaaggctttaatgccaagaaagtaattcagtgtcccaaggtctttaagagcaaaagacttaagtaatctggttatcaaggcagagacttgagtagcattagactctattatcaagatgtcatcaatatagactagaacacacaaatagcatgttgaattaatcttgacaaatagagaatgatctatttttgctgaagcaaagccaagtgagagtaaatcaaaagacaatttatcaaaccaagctcttggggcctgctttaatccatagattgccttctgtagtttgcatactttgtgaggagttgatcgatcaacaaaaccaggtgactgaaccatgtatatttcttcttgcagatcaccatttagaaatgcattattaacatctaattgcctcaccatttaaaaatatcctgttaagattattacttttgtaaaagttaatgtttaaaaatttataaattaattaagtatttttattttaaaataatgagatctcatacttaattgtttttcaataaagaagatattcattgtctttatctcaaattattttatatggactatcgtgtgtaacatctcgagaaatcaggatgttacaatataatatcagagccttgacccagttggaagtgtggtcgatgaggacgtcggaccccataagggggtgattgtgactgtcagtacgtagtcccgtgatccgtaaggggaaatacagggtaagctgtgcaatctcacat

SEQ ID NO: 225408 - DNA, 2671 bp, Cannabis indica
tttctgatctttctgcagttggaataacccatgtttggttaccaccttcttctcaatctgttgctccccaaggtaataattttattatattaataatcaactataataactaactttatttgttaattagtttcttttttaatatgaatttaattgttgcttgttcatttggtcatgtttaatgcttgtaaaaacaaagattgttaagagtggtgtccgacacattttaaggtgtgtggtgaaatttagtatcgagttctacaaatttcaatttagagaaatgttacctcttaaagtgtcgagcaccataacagatagtatactgttattggtgaaatttaatatttagttttagacattttgattttataaatagtatagaaaaccaataatcactcataagtcataatgcgctatgtttatatggtatttgacactttaaagttaagattgaatatttttacccggactcgaccaacccaaaaatgtcactatttatcttttattaattgaaagcttttttttacgttttatgcattcatttaaaataatttttttttagcacagttacaaaaattaagccgaataacattgactaattttgtaagtcatattttgtataaaatttattttccactgaaaatgatctaaagttacgttatatttcagtattatgataaataacatttagagaagtgttaaggaaactctttatgacgaaacaacacatttgtgttatggttaagttatgtatattttttttaattaatttttatttattaagaatgatgtaaattatctttgattaatgattcaaaaaattcataaggttatatgcctggaaggctatatgatttggatgcatcaaaatatggtactaaagaggaattgaagtcactaattttggctttgaagcaaaaaggaataaaaagcatagcagacatagtcataaaccatagaacagctgaaaagaaagatcaaagacgaatatattgtatattcgaaggcggtaccccagacgatcatcttgattggggcccttccttcatatgcaaagatgataccgcctactctgacggcacaggaaaccctgacacaggagccgatttcgggggtgctcccgatatcgaccatgtcaacccgagagttcagaaagaactctcggattggatgaattggatgaaatccgagattggatttgtcgggtttcgattcgatatggtcacgggttacgcgccaaaatttactaaaatttatatggagcaaacaatgccagagtttgcagttggagagaagtgggatccacttgcctacgggcaagatggaaaacctaatctaaaccaggacgcccatcgaggcgccctggcagattgggttgcgtcagcaggtggggccgtgaaggcgtttgatttcacaactaagggaatcttacaggatgcggtgaaaggggagttgtggcggttgaaagactcaaatggaaagccacctggtttgataggaataaaggcagaaaatgctgtgacatttattgataatcatgatacttggtcccaacaaatttggccatttccatctgataaagtcatgttgggttatgtttacattttcactcaccccggaactccatctattgtaagtgactatttactctctcaactttagtacaattttttaagtatagtattcaattttttgtgtgaaatatacttttatctaatctcatatttattatttaaaataaaattagtataagaaatatatatagcatatcaactcatttataagatcaggacttactttattttagaaaaatctcatgaaatcttataaatagttagcggttttctaaacatcatatataagtatatttaatattattattattattataaaagagaattggtaaaaaaacactatgtagaaagtactgagtaccactggtacccaataacaatgctgattataaagtgattgagattttttgtgggtttttttgtttgcagttttatgatcacctaattgagtgggggcttaaggagcaaataagcaagttaagtagaattagaggaagaaatggtataaatatgaatagtaatgtgaagatattagctgcagaaggtgatctttatatggctgaaattgatgagaagattataatgaaaataggccctaaaatggatttgggtaaccttttgccttcttcaaattactacaaaattgccactgatggtcaagactatgcagtttgggagaagaagtagactagctataatatattctactacttatttacatatatagtatactcaataaaaaagagaagaaaaaaaacacaagtgcatcttctatttaatcataatatatggataatattcaatgttgttattggcctatctactaatttttgttgtataatgagttctactaatttattcaaagaagtttcatcaccatatgcattggttgaactaattttacttactataaaactttgctgtgctttcttcttaatagtgataacaaataataataatgattttttattttctaaataataagaaataccattatcaatctctttctcaatttttcgatctaattttttttttaattttttatcatatcaatatcgacatcaaaacaccaaaattcttcatatatcagtttacca

SEQ ID NO: 225409 - DNA, 3241 bp, Cannabis indica
actcaaaccgtaaaattaaaaaaataatatataaggtaattcaaaaaaaatttagtctattaaatgcataattaatcaaatttttcttatttaataattataatttccaagattaaagaaccaaatgacataacatagattcgaacgaaggcaccgtggttggcccacaatatcattcatcttcaatgctggcattgacaatgctcaccggagccgaatttcgccaaccaccatgaaggccaccgccaggtccaactcagtcgtagtgcatagatatagatgaagaatccaattgggacatttcatggtttttccctgcaatgcgctctttctcttccccggcgactttcgatcaaacgacaacgcttcgtacaaatctgaagaaacggtatcccgggaccaagcttccctgtgtggtccaaaacctcatcaatgaattctctcggggaaatatttctcaattaatctcttctcttgatctattagtttacaaagggattcgcttaccttccaaaactcttgctcttcttctccaacaatgcggaaacagtaggtcgcttagagaaggaaaatgggttcaccttcatttgaaggttactgggctgaggcgcccaggaacgcttttggaaaatcatttgattaatatgtatttcaaatgcggtagtgatgttgatgctcgcaaggtgtttgataaaatggctgtgaggaatttgtactcgtggaacaatatgctttctgggtatgtgaagatgaagaagttgaaggttgcccgtaggatgtttgatcaaatgcccgagaaggactttgtctcatggaatacaatggtgattgcatatgctcagaatgaattgtttcatgaggctttagatctttacagagagttgcggagatcatcaattggctataacgaattcagttttgcaggtgttttaactgtgtgtgttaagttaaaggaattagaacttactaggcagattcatggacagattttggtagcggggtttttaacaaatgtggtgctttcgagttcagttgttgatgcgtatacaaagtgtggtgagatgggagatgcaagaagatattttgatgaaatgccgataagggatgtccttgtttggaccactttggtttctggatatgccaaatggggacatatgaaatgtgctagtgaattgtttcatctgatgcctgagaagaatcctgtctcttggaccgcattgattgctggctatgctagaaatggtatggggtatgaagcactaacgttgttcacaaaaatgataatgtttgggtttacacctgatcagtttaccttcagtagctgtctttgcgcttgcgctggcatagctgcacttaagcaaggaaagcaaatacatggctacttgatacgtacgaatttcagacccaacacaatagttgttagctctctcattgacatgtacacaaaatgcgggagtttggtaactgcacacatggtttttaacctcatgggaaataagcaagaggtcatattatggaacacaatgatctctgccttagcacaacacggtcatggtaaagaggcaatacagatgtttgaagacttaatcagatcaggattgaagctagacaggatcacatttgttgtggttctcaatgcttgtagtcattcaggtctagtgcaggaaggacttagaattttcaattccatgacagcagatcatggcattattcccgatcaagaacattatgcttgcttaatcgatatcttgggtcgtgctggacgttttgaagaattgatgaaccagattgacaagatgccatgtgagccaggttatcaagtttggaattctttacttggtgtatgtagacttcacagaaacttggagctggggaggaaagctgccgaactccttatcgaattaaacccagaactccctgatgcgtatgtgtttctttccagcatatatgccatacatgggagatgggaactggtagagaaagtgaggcagcttatgaacaaaagacatgtgagaaaagaacgagctgttagttggatagaaattgataataaagtccatgcatttactgtatcagataggttgcatccaatggcaaaagccatatactcagttttgagagagttagctagccattctttaaaccttaacaccaagaggtaaatgtttgaggaatgcatctttttgtgaattgatatgcttgaggaataataattgttgatagctggagtcaatgtttttaacatgtaacattatttttagtcttcttctatttatcttcagatttcattgattttgaatcttcacaatcttgtatacttgtgtgattctgtccaaagttctaaataagagaccaaatataacctgtcatgatttgtctcttttgggacgtttggtaagagatttatacttgagaataagaatgtaaaacttaaattaaattttaatgaccaaaaggttattgttttcaagtgagtttattttttaccttaaaatagttgtaatgttaatctcttccaacacttgagtttcatataaccttcaagtctattattttcaactcaaactcacataataaatactcccgccaatatccctttaaaatataacagtttcattattatgtccctcctgttagattctatttattttattgttatcaattagcatttttatctctttaactttcaccaatacaaatttttgtcccttaaatacaaaaattaattttcaaaattataatgttctattaattttaaaaaaattatcaaagaacttgataaaaaaatataaattaattaaaaaaatattaagattatttaaaaaacttaaattattcctaaaaaaaaattcaaactttattttatttataacaacgtatcttaaaaaatcaaatcaaaactattaaaaatctaataaataatttaaacaagttaattttttttttaagaaaaaatcaaatttaaactcatatcttaaaaaataattaaaaattcaataaagatataaaattatttttttaaaaaaaagttagaaattaaattaaaaaaatattatgtttacttaaacaaatctaaattttttagtaaaaaaaaaaaaaatagactaaaatgtattcccgtaaaatttagttttacacaaattaaatttttaatatttttttacatctaaataaatattttaataaaaaataaataatttgtttaatcacttatttaattttaaaatttcaatttcttttt

SEQ ID NO: 225410 - DNA, 2691 bp, Cannabis indica
aatactccccctgcatgaaagtatacgaacacataaaataaataactttttaaactgaaaagttcacaaaccacaaacaaaacaactccccctaaaacaagggtccagagttgtaattaacaatccaaaaaataaatactactctcccttttgtctatgaaggagccaaagaaactaaacaaaatagacaaagtcatcatagttcaacaaaaaacatagaaaaaaagtaaagataaaaaatggactacttaagcatgatcatttgatcagaagaattttatgatgttgtccatcctcctgagaagtagggcttgacttgtctccattctttccgaacgcaagttgaattcagtcatttctaagaacaaaagtagaggcagatgcagcagcatgttcatcagtaacaccaagagaaacaaatcgagtcattttcttagcaaattttctttaacttttagatggttaaactctaacttaattatattacacgagttctttgatttgttcgttactatcttacccatttcaaaaatattttaaccatcacgatatagtcatgtatattatttgcaataacaacttgagtggaaaatatttttaattaagaagggcataagcattgccactactttttatagaagagaacatatgatccaatcaataatctaattccataatttaattaaatgatggaaacttggaatataaatcaatttgttattataaaaagtaggctttggaatattacatatttatagaatattgagcatgaaatatgtacatataaagatagaacttttttggggttggtggtagccatgtaggaaaacacacacaaacatatataaatgaataagattagtatgaaaaaaagaaaagagtggcttaggtgtgtggatatcttactactccaccatctactactttggttagcttgatcacttcattagagataccttttaattctttaaaagaaaaaataaaataaaaatcaaagccttctttttctctccatataatataactttttctttcaacttttgtattattattgttaataattaataattattattattataagaaatgagtttcatcatcaatggtcatgcttgatccttctcttgctttctttatatcaatctatatacaatatatatatatataaaaaagaagactatatataagaatattattatatttatatagataattgtagttgtccaagtgaaataatgtaggtccaaccttaatcaagttgcctaaaccatgatgtcacatggtttattattaactgtttttttgttgttattataaatgattaaacttctttttcttctttttagtgatatatataggtatgaagcaaattaattaaataataagtccttttatcatcatgcccagtacaccatgctgatcatgattcttttgtttgcccttcaattgtgggccctttctatatcttctcctttttgataaggctatttttagtgtcaaatcaattcataaacattaccaaaactcacacgtaatataagattaatttaaggtgtaaatatttaaatttaatttttgattataaataaatattaaaatttaatttttagcattaataatacttaaattttatttttgaaatttttgtaagtatctgaccattaaatatcaagtcattattcatgtgttatttttttttattggtatatttaaattattcttttaaaaaataaataaataatgatctgtaccattcaggattgccacgtggtaatttacttaacaattaacagttaggtacctatagaagttttagaattataatttaaatattattaccgcaaaaaattaaacttatgtatttatttacaacaaagttaaacttatttatttataccgtaaattactctgtaatataataacataacatcacacaaattaattcattattcaattactatatatatatacatgtataattatttatattttgagctatagtaatcgacatcattagatgttattctatttggcatgtttacttaaagagaatatgagaattaatggtatggtgttgattctcatacaattccttactaaattttgcaaagggaaaaataatgggggcacacaaattagaaaaaaaaaaaataaaggaaaatgttttatttttataggaaatacttttctcaatccttacttagtttatttaattttattttattaattaaaaataattacattttcttataatggtaatgttgtcaaattaaagtatttcgattaccttttctagtttaggtaaataaaataatatgattatgattttctttccaaacagtttagtaaacaccataataaaatattatttctgattattttctattttaaaccgattcatttctctcattaattattttgattccagttataatttagtaaaggcaccattaattattatgaatgttcactactacaaaattcactattcacgtcggtcaacgcgactattcatcgcgttgactgacgtgaatagtaccatattcaatatattcgtcatttgtaaaatgtcacaaaaaataaataaattgcgtcggttatatatccctcactaattacccaaccgacggtaaaagtcaaaaaatttaaaaaattcgttcattattaacgtcgttttaaaagcctcacgaa

SEQ ID NO: 225411 - DNA, 4279 bp, Cannabis indica
taaaaaataaataaaaaaataacaaattataagatgttgtcacgtaaaaggtcagcatccatgtagttagttaaacttaaatataattaatccacctaaagtgttgcaattaataataaatttgttcatattgtttctttttttattaaaaactattttcaaattttgatatttagaattagttaaattttaaatattatttcaaattaaattttaatgttttgatagtttaaccagatgatcatttttattaattgtgaagataaatttaggacgaataataattttttttaattactattacaaagtataatattaatttttatttttatttaaatcacgattatgctttcaaatttcaataattatcactacattgaatattattaattttaaaattatgatactaagaaaaaattaaaaactaaaataaaattaacgtacgtgacttttcacgtaacatcaatctaggatataagaaatatggtaattaattttgagatcaaacttaatacattctacatatacatacacctaccctattcctataaaagacatagttgacaattgttttatcatatatataactataatattacttttcaacagttcctttaactatattaaactcactgcaaatatgtgattacctctatataaattgttaagttaatttttttaagtttaataaaagaaattgaaaatagatatattaggccacttaaataaaaataattatgcaattaaattttatttaaaaaattgtgtattcacatttactacttttagatgaaagccttttattctgttaagccgtagagcagtcttacaataccattaaaagagtatcaaatcttcatcacagatcctcaagttagctctttaatgcctcaaaatcggtaatgtcttttagtccaaaaactactctagccctctaagtcttttttcataaaagactaaacatgcctcttaatgaatgtcatgagcgttacttgagattgccatcgtacttatggacgaaacaaaatggaattattcagcaatatcaaagagaagatttagaaatcgatacactcttggcatgataaactgttctctattagcagtcgagaagtactactcaaagtagttgtccaatcgattcttacatatgccatatcatgtttttagctaccgaaagaaatttttactcaattagaatcaacgatggcaaacttttggtggggctctaacaaagatagctcaaaaatacattggaagcattggaactacatgtgcaaaactaaattgtctggaggaataggattcagattatttttttattacaatcaatctctcttagtaaaataagcttggcgtcttcacgaaatgccaatttcgctccttagccgacaattatgtactagatactttttagaatcatcttttttagaagcttctcttaggcatcagccttcaatgacatggagaggtataatctgggaaaaagagttattaatcaaaggtttacgatagaaaatcagtagtggtaaccatgtgttgtgcctttcggacccatggattccaagttattcttgttttcaacctatttctttcattggcccctcaaatgctactatcttctcatacataatgaaccagagggaatgggatgttcccttattgttgcaacattttcagcattggatgttgaccatattatttctattccttttcagtttctttggacaacaaaatcgcctaatttagcactttaatgacaacggagtatgtattgttaaatttggttatcactttaaatctttggacattattgaccattcttccacctcaagaactaataaaatttggtgaaaacttttttgtctctaaaattgcctctccaacttaaaaatgttgcttggaaagtcatccatgatgctttgcctattgctataaagttagtctagtaaaaagttattacatcagccacttgctctctgtgttctcaggcatggaaatctattgggcatgtcttgtttggttgtaaatacgctagatcaatttggcgatattgaggttatcattttgacttcacaaagcaagctcaatggctcaaggagattttttagtccatttatcatctatcttttctcaaactgagtgaaaaactatcatttacatcatgtagacaatatggacagaacgaaatggggtggttcacggtggtcgtgtcaagcctacatcgaccctttccaactatgctgcaacttttttgttgcaatttaacgcagcccgaacaccatgaccccattatgctggtcccaatggctacaccagccccaccagaaccatggaaatcgcagctgatggggaaggcttcaaaatgaatgttgatgcagctgtcaagcttgatactcgtcgaaccggtattggagctattatccgaccaagtcctcgctgcacttcaaagccactactaggatgcttcaaatctcatgaaattgaggctatgtctctatttcatagtttactttgggcttctcaaatacatctacctatctcagaggtagaaacagatgctcttcgagttgccacagctgtgaatgacccaaaatctgctcaatctgttggaagttattttatcaggatctagatttattaatattcctaaatatgaattccctaaaacaataaaataaacacataaaagttgtagaaaactttacattgatggcagcagaataatatgactccttccattcagatgtctaactcttgattctttctgtcacagagtatgatcaagatctaaacctgaattctttttcaattgactgttacacaatcttcctcactatgttgattattgctttcacatgtgtgggcatattctcaaactaaggaccacgaaatttagtaaaaagaatactaagagaaattcaaaattaatgatagaaaataataggttttcttttgattcagagagtcttaagtcatcatttgaatcaaaacccttaacgttctatttttatggattcattaagtttaggattagagctaaatgggttgatttaaaagatccaatagcttaaaataaatcactcatggtcaaacccctacaaggcccatgagttagatttttgtcattattttacttccttaatgaagcaaacttatctttcttcaataataccattttttgctctagttatttaaatattaattatatctatttaataattataattaattatcaaataaaattactatttaaatatatttattaattagacattccaagatctcttaattaattaataaatcttgaattcatcttttcttctcaattgtgcccttcattggtaaaattcacaaataagacataaactttatttgaaattctaaaaataaattaattaattgagattacaaaataatttattctagttagtgcggggaccatgggcctatctaaccaaattcccaataaatagttctagaatttaccaagtgaattttctatcttattaattcttcctaaatccactatagatttggaattgtactcctgattatatagatcactctattcactaaaaatagatacgctataaattatacattgtttcactccaaatcatcaatgatatttcagtgaactaatataattattgaaataagagctcttccatttatgtttattgacttaaactctaaggaaataatcatttcatataaaataaaacaacatttaaattttatttttacttacctttattagtttttcataaattttgttacacttaattaaaaaaattcctaaaaaaaatcctaacaactcaagtattgtttagtttttatgtattttattagataaaatgataattttctattactaattagattagaaaaaaaatatatgtgagatcggatcggatatatgctttcatttctattaaatatcttttcaaattttacattaaaaaatattaatgataaaaaaaaatctctaatccatccagatttgtttttttagagtaaaaacttggcctcttacatatgttttatggttttctactttatttttaattgaattgagaaattaaaataaaaaaagtagttaaacatttaactagatatatataaattaaaaataagaattaataaaacaaatatacataattatagaaaaccatagaaaatccgtcttcatcgcttaacttatttcttcgtaaatccctcctttgaaactgtccaataagttccaataccacaaaacaaaacaaaaaaaaattca

SEQ ID NO: 225412 - DNA, 5921 bp, Cannabis indica
aatactgaaagatagtgagttggattcaagttattgaagtccaaacttccatcgcagagatctttgagtcaaccttggtgtagggctagggttccctcctaggttgactattatgactcaagtatgcttaactccgcaacgtcatccttcatgccacgtataaagcatcgatgtccatgtcaccagggaaagctttcaggttagcaattgatataatcaattcaagtgattagccctccttgtgttagttcttaattagttttggtcaaattactggtttaccttctaatttcttctttataatttagtactattaattcactagtgaaattataatttagatcaaatctaaatttgtgcacaacttttcaattctagaagtaacacttttttctcccaatgatttcacatctgacgttgcacttacatgtggcataatccagccagttattaaacatgactaagatcttcttgatagaagtgtgcctagcaggtcctatatatagctgacatccataaactacagatgttccatgaaacatctggctgagtcatctacctatcagccagagaataagaataacaccttgcaagggtgcttccataagtaaactcacaaagaagacaagtctcgaggaaggactaaccgggtgatctacctgccaaccagaggaaatactaccaggaataccagacaaggccatatgagccttgatttcttcttcaacaagcatccacaaatatctcaaactgaatcctaaaaactcataatcaacaaatctaatcaagaataaaggagcttcaacagatcgtaactgcaccctagaaaataaggatatttaccctttagtcactccttttatggagccaaatgtatcaaccttccccatataaatagtgaatgaattcacaaggggaagagacctagaactgaaatcttatactcacgtatctaagagcactttgctaaaagatattctctataaatactttgagagttgtagctagaattcactttgtcttccttagtgatatgcacagtattatctcacatgcaatacaacaaaaagaggagtaggtcattacccagaaataagggggctgaacctctataaatcctttgtgttctttttatttaattactattcttaactccttatttgtgattaattatcatgtattagactccaagtcatttggcaattttccaagtcaacattttggtgcgttcattaagagcatcgatattcttacaaagatctcacctctttacacctgataaccacaatggtccttttaaagaggagcatgtccacagagcctcaagatccaatagttgtgaatcctagtctccaagttccaaaaactattgactacccgaccaaccttggctggccacctcgagtaactccatctacagggttcagacccaaaggctcagtcaatgtcggatagaatctaacaagtactgggcaagtctcgatccatgctagacaacctgcctaaagtacaacgggggttcctttaacaagtcctacctccttggtatacgctggaaaaattgggccaagggtcggctaacctagtgtcgacgaaccccatgttgacttggggatgattctgaattggccaggctgagagaggtcatagggcaagtttaaggtcatgcaaacatcctccatgaacaaaaagaaacacacgctactctgagcaatgcttttgcccagcaaagatgcattccaagaattgatggatcaacatgctgtgatcctccaagcccatcaagtggacctgaaccgccagaatagcgaggctaatgaactaaatagatgattcaatgaaagggccagattacgagttgaagaaccgccactcattaccaagtgtcttagacggaattcaatgccttagggatcatgggaaaacctcacagctagaagagccaacatcatcctaaataagactgcctctctatcagcccactgatgatcaaattctacccgaaagagcatatgcaaggactgaccaatttcaaggcctacttagagcgaaagagagaagggaagatatcccaccaaggcaaggttgaagtaggtctggcagtggggagttttacccgaatctcaatgaggacaatgctagtagtcaccctattggtgagcacactaaccgaggaactcataaaaacacagaatgcaatagcgacattccttctgggaatgctcaaatgtgttctgaccagaggccgggggattttgcgtttgatagaaggggccccaaataggagtagatcttcgaactaacttaaactgaagaagaaacattcagggcggatacatcctgccctaaaatggtcaaccaaggggataggataggccaaatcttgctgacccctatggtgtaacccctgttaaccctaaggaggagctggcaggataaaggccagctagagatgatcttgtagtgcaagcacaattggatcaactcaagagccttgtacaaggcctgtccaacccaaagctatctgacctggaacttgacagggcccgagtctcacctttctctacacgcattaacgtgttgcccttaccaaccacgttgaagatgctaacttggaaaatgtacattgggaaagaagatcccctggcccatattaaatattttgaaatccaaacggatttgaaaaatgtgatagacaatacccattgcaagttttttcctaacaatgttatctgaaactacacaatagtggtattttaagctgtccagaatgagatttgattcgtagaacgttttcaccactgagctctacagagagttttcatcctctagacagataccttcccaactaaagggcttggttaaaatgaaaccaaggccacacagtcgttgaaagactatatccaaaggtttatgactgaagccataaaggtcaaagccctaactatagaagggtaatatacaattataattggaggtatcctacctctatgtgaactttagagggacattaggaaaaaaaatcaaccaacaatatgagagagttttcagaccacgctgatagtttcataaaacttgaagaagctgtccgacaggtgtagattggcgggtagacacatgccattgtgtcgtacaagaaaccccttccgatgaaaaaagacattagtaagagggatccctccatgttctgcaaatttcctaaagatttcggaacgcgacactaataagtgtaagaacttgaaggaagagatcgagtgcctaataagaaggaaccatcctcacctatgtttgtctgtccaagctgaccgaaaccagaaataggtccaaaagaacaacgactcgttgccaccacccattgctggccatttacaggccatcatcggtggatcgcacattattggggattcaaacaatgcattggacaaatatgattggactctttgtcatggataaataagtgaagtccagattgtagaggaaagaagtctaaagcaaccaaaggttgaagagcctgcaatcaccttcaccgaagatgttgctgcccatgcatgcaaacaggtccacccaagaaacacgatagacaaaggctaacagaacttggttaattacatgtgaccaagagaccataagacaagcatagtaaaaatacttaagaaaaaaaattaaaaaaaaaggtaatgcaaaaaattgaaaggcaagtatgttaaaaagtggctttgttaaacataaaaggaaattagttcaggataaaaggctccccaaccaaccatatctcttaacaaaaaataaagctaggattaaaaatcgtctgaccagccatatgtcttaaatttaatggcctttatggttgtgcagaaaaataaaagataagaaaaataagatcctcaaagcattggaatgtcaaaaggagttggtggactcatgctataaccaacctggtcctaaacggtaggttcagaagatggcttaagaggaggatccactaaatcaacaagttagtcggcagcatcagtaggatgcctagtagaaacaacatcatgggcggaagtatttcccagggagtttagatgcctgcaattccttgccccgacctattagggattcgagaaatttaagcttcatgtatctgtaatcaccccagggttctgtttccaaaacacggttaaggtttcaatggttaggttgccacactcttccttctccacagcccgcgtctgctctaattccaccagttttgcttctaacttggtcttctccattgccaactgtccagtaatcttcccatctcgagaaactagaagccaaaccaaggaatattttggtccatcaactccctaacccgcttttcagactcttcccagtccttctcaagttgagcggtagatggcatgtcctcaatctactacttgagttccttcacatgattgttgtcaacaagtagctgtttgttcacctctccgagctgggcctctaagtcctcaatcttctttttggtagcaacacctgaccctttgaggcgggcataggtatgcccaaacttcagggacatctagtaataaaagattacaagtcagaacaaaagtttcacatgaggaagataaatctttgaaagagtgaagataatttaccaaaacattatcctttagaaggtaaccttcactcactttaaaaccttcccaggcttagctggctttgtgttatctgtgtcttatagctacttgtcaacgtgaaccaaacacatgtccagatagttatggacaccctttttggatttctctaccccgactagatttttgggactccttccttactcaacctcctgctaggaggacaacgtcctaccaaatttcccaccaggctaaaggagcatatgaaggaggtagaggaagaccttattgggtaaaacttgacccctccttttgagcaacctttgacgggggactcttcttgagaagaaccaatgagtttcctcttgaaaaattgttccagttctgaagccatacatgcaaactaattttgaatgtcataagttcagtataaagtaaatatgtttatcctcagcctgcccagaagcatcaccttggggatgactgtacggaataccctcatcatctgaagtgtactcttcactctcctcactagaaatgcccttacccttgccctcagccattgctgggtgggcagtcttggtagactgttgatgtctaatgagagtaggggccactcctaaagactcactccactcaaccctcttccgaaaactgtctctctctctatctctctctctcttggtttctttctttttctcgagatgtttatcagagggagttgtagcctcgggtgctttcctcttgattcctttcttcttctcaaaaatcttattaaaggaacaaaaatttttacccacgaaagaatagagaccataattgataaagtttttctcttatcgccaacttccatatatttcatattgaggcaagcaatgagaagatatggttggccctatccctaaattgtaaggtgggtattggccgatcaaaggaggagagcctgtggaagtcgtggtgcaaaccctctgccccataaaccatgaagtaatctcaggcataaccaccaatcttggacatggcagggtcattcgtggtgcccaaccagatgtagcccagctggttgaagtagaagtatcttgcctggccctgactagagttggattttaggtcaaaataccaactaatgtcaaatggcaaaggctagggctagcccatttgtgcatatagaatgaagatggcaaataggtacttgatccccttttggagtctactatgttgggcagatctcgtaatagtttgctatgtttcgaaagtacgagtggagcggcaagatagccccttgttcaaagtagcgaccagaccacaccatct

SEQ ID NO: 225413 - DNA, 1862 bp, Cannabis indica
ttttttttagaaattaaaaaaataattgtatgaaaaaattatttaaaaaaacacatttgtataataataaaatagtacaaacattaactttaatcataaataattaatgttatcatattataaaaatctgtagtggccgaaaccttttgagtagtgcacttattaaatctcacatgtcttaaataattgcacttcatttttttccctaattaaaaattgtcattaataaaagctcttgtttttttttattgttatttttatatcataatcttttttcaaaaaatttaaaaaataacatggtacatgagatttgttaaaaaaaattgattttaatactcattcattgtcttattttaattcagagttagattatatcgttctctaagtgtgtccgctcataacaataacattatatttatttatattaagaaaaaaaaaatctcaccccaaccctaacgggtgtagaggaatgcagatcctgaggaactgcatcctcagctatttggaggagaccaatcaaagactccgccgcagcagtaacattactagcatatgaactcaatcccggttcaacctataaaaaaacacaaaaatattataacatatataatatgtataaaatatcgaaatttagttaattacacagcatagtaattacatgatcataaatctccaactcgccttctatagaaagaagatcgagattggagtcgaattggtaaacatggacacgactaccagagctacccgcgtcaaatatgaccgcgtaactacttgaagattcagaagacgaagttaagagaatatgagaaatgagctttcgatgaggattaatagtgtagagatgaagagaggttttcgaagaagaagaagaagaatagtgaggtgggttcacataaagaactagtaataatgccaaaggcactaagagaagaatcaaactagttcctatgttcttcttcttcatcatcatataatgctctctatacttcaatttttttttagttttaagagctcattaggttatggagtttcttctctactcttcatgtctttaaatattatagtactacatagtgtagctgagtcccgacaaagttattacaaaaagaaaatgagtttagcatgtgtgaatttaaattgtcctaactctccaactaccagataatatatacttttaaaaatagaatacttaatataataggtaacctatatgttttgagcaatgattgttaccgttaattttttattacaattttttatttattttttttatggtggtgtttgttataattacaatattatccttgtaaatttttgaatagtttacagtaccgaaaataagtttaaatttttttaaacacgcttgctaacttagaatatcataaactctattttcagtactgtaaatcatttgaaatttttcaaaaatttatagtaatgatattgtaactataacgaatatcgctataaaaaaaatgaaaaaaatatatcggtatgtgattttaggtgtggaggttaattaaaaggttgtaataggatgttataattagcacttcatgaggagcaccggccttaaggtatcaagcactacaagaggtgctccaatattggtgcaattcaatattgatcaagtctcatatattttaatttaataaataacataagaaacgggtaattatttacaacgtgttacattaaaatagtattaaatactttaaaataccgaggtggcgtttggtaacacttttttaatcagttttctgtttttaaaagtgaaaaagtgaaaatatttttaaaaaacatgttctataaaactgtttttacttttcaattttatagttaaaaaaaaaattttaaaa

SEQ ID NO: 225414 - DNA, 3025 bp, Cannabis indica
caaaatcatgtactgtaactatattaatgtacaatagtttgtaattctctatgtaccaaaaacaaaaaaaaggcccaataataataattgcaaaaatatattggtaatcagttaccgttgggtaaggccatctatagtgcagggtccaccagtcaaggagggtttggcgagcttgcttgggtagtttccctttcttcttcttcttagaaaactcgagcttaagagtgcttatataaccactgtattttcgcaagagcttctcctttagctcacgatcctcttgtgtgatcatccgtagaccctccatttctactccaccaccaccactaacctcatgctcctcctcctcctctgacgaaccaccaccaccttctgcatctgaaatataattacacatcaaagtaatttcaataatatttttctatttttttatatataaaaggaaagtccagtccaaacaaagtatactaaagagaaagtgtagtactgctaaggagtattagtggagtgctctacaactctgcatagttatcatattatcaaaaattagtcattttggtactatttcaattttcacatattttaattttactagatatgcaacttatgaaccactgataaaatatgctaactcatgaaagagccaataacaagagtagtactaataatatgaatagcactgaaacattatcatagtattgttttctaaattaatcagccaatctaaattaaataaaaagcttctagaagatcacatctcagtgtaataattattgggtaattctatcagcatggctagacacttaaatgtcctcaacaccttactaatatggtgcgttgtgagtagatagtaatttctttgtctactttttgtggtatttgacaccttaagagagcatgttatcatttctctatttatctcctatagagttggataagcatgcatgcacaaaaatattagaatttttagaaaagggttcaaaaaaaagatgcagtgtgtaaaaaagtttgtatatgcagggtggcacatatcagtactaaaagaaaagaaaagaatagaagataaaaataagacatgttgagcgaaagacagagtgaagtgaagtgcatgccattaagaggttttttcctgtttggtacacgaatccaaagaaagctgatatatatccacgatcgacaagaccatgcacgcaggcatacaccaacgacgatgtgatggatcatcacaaccacaaccacaaccccagcctggcttataataccacatcaaatcttgtactgccagccaggccccacccacacacactattcacaaacaattataattaattaaaagagggggttttacgttgtgttgtatccactcagtgagtggtaatgtaatgtcgtacggctattgaaacgataaacgcaacaaagtaaagaaaaccccatgacacgaaaacgacagctttattattagcccactggttatttcactaccctttttgcctcgtttgaattttattaattctttatttggttagaggatgaggaagaaacagtactaaccagtagtactgtctgtgttttattaattcaaattattattatatataattagtaacgacacaaaaaaagtcatggaaactattgcttttactggtagtagtttcaattcgtttaaatggtataaattgattaataaatgtattatatgtacattaccaatgtgagcataattcacagaaagcaaatcagaccccgtgagcactactaccactgtcttaattcaattctaaaagctgcctgcagcggcaactgcgggagtctatttggtcaaaaaaaaaataaaattattcatgaataatgaaaatatttttaattaattaaggtttggataaaaagaaaaaagattgaccaagtaggaattgttcaaacctaaagggtttactttggatttaaactaaaagaaaatggcagtaacgaaactaccaagatctagtaacctagataccaaattaaatcaatgtctagaaagtgaataatattaaaaaacagtaccactttttgcacaaattatcaaaaccctaattacattagtttgagatgattggggattttttttctaaaaatttctgtggacaattaatgacaacaaaccgatagctagaaatactgtttggttgcaattaaccaaataatataagaatgaaatattattttaatagaacgtactttttacaattttagtggaataattattaaatagaaacaaagactaatccaattattttttatttattttaaattttattctattttctattactattttaattatcattcttatttatattttgtatttctcttaaccaaactctaccttatttacttcatgataaagttatatatatttgtccaagtacataaagcaataaatatgtgaatgcaatatcagttagcgattaacacgttaatttgctatataatccccaataactaagtttgaaaaaaaaaaaatctttagtgggaatatgtgttggaaataagaagagtattgttctaatcgaagatatgttaccttttaacaattggtattacatctctatatataggactatatattctagaacatataattaaataattaactagctaatacattattctagatagattacattcatactaagtagtgataaataattctggaaaatttgagttatcttcttaaggaactcttctaaatacgtatgaaagctcaagatattttagtaaacgtatatatactctataaacactagtaacaacaaaaaaaaatctaaaaattaactaaaaaattaatcatgaactctaatattttaacaaagggaatttttgcgaaatgaacaatcaagtaaaatatgtgagtgtatactaatatgtttaggtacgttaccaagaaacttgacataggaacacgatacaaaaagagaatgaaaagaaaaaacaacgagaaaactaaaaagccttcaatgttcaaattttattataagttttattt

SEQ ID NO: 225415 - DNA, 2134 bp, Cannabis indica
aatctcacgaaggtgagcttccaatttatgtcctttgttgctatgtcatggccctcatatctttcttgtaaagttcctttctaggaggtctttagttatagcttttgttgctccttcaatataatcgatgcggtttgccattcgtatggtaatatttttatgagtttgtgtggttttgttttgacttgatcttgtaaaattttgtttcgttcaactttgaatgaataaatgcactttctttcaaaaaaaaaaaaaataacaaataatgtgcttttgaagtgaaaagttaaaaaagtatctatcttctgtatagttatttgtataaataaatatatgttctaagcttaaggatggtcccatataaaccgaacttccattaaaattataccaaacataagtttaattttacattgttattaccaagatctcaaacaccaataacaatagtgcgtgtcctttgatatgttaatcatttagtgttattggaataaattttccctcccccatgagaaagtctttattaaagaaaactcgtggtatcgaaagagacctcgtggtattagaaaaaatgaggaccttgcggtatctcgtagtatcaaaaaggcacctcgcaatatttagtaaaatcacgatttcaacataaaaggtgcgaacacacaccaatcaacggaaataacggtcaagtatattcaagtgtcgttaaaataaacattatatttattttataattgatgtaatcaatataattaatagacctatcattaggtgaatcctcctccgttcaaaggggacctgagttgatctgaataataaaaatacagagcatgagatcgctttcaacagtggactagacaggctgagtcctgttgaaccactatatttttatgttttttttatatattatttacatactagcatataattatatactatattctttaagtatttgcatgatttggtgttgtctagttttctttgacaacatttagtgctacaaggagggtagtattctaacaatattctcataatttttggaggagaatcatggtggcgtaccaaataatatacacaaaatcacctatgttcaatcagacacaagcaaataaaaatatgtgagcaatttttcagcccccgtgtacttagagaccatccgaaaacaagcacaaatcttctccattcctaaagctattcaaataaacacaaaattttacaaattaaaattcagatcgacacagttgtgtatacaacatccatttaagcaatctaatcgagcccctatctaaaaaaaagaaaaaaaaatccaattttagcaagaagaaaatatcgaaatatacaatatatttagtgaagaaagaacgactccgctaacttagactttggagcagcccaaaactcgaggatgctcaggtcttggagccgctcaggtcttagagcacgccgagttttattgctctatccttgaagccgcccaaatttggtggacactcgaattttggagtcccttaggcatcgaggcatctcgacattcaactttcttcaaatattacaaataacgacaacaagaagagtcattattgcaagaataccaggggcagaatcaaaccatgagaagatggaagattgtcacacaatctcaaatataaaaaaaaaattagagagtcgcaataccttgaaggatctcaaaggtcgcatgaaaattaggatagatgtaaactgtaggatcaatggatgcttaaatacccgcactaccattaatggacaagagatttattacagtccgaacaataagggcttttgtataaatttggtggactcaacgagaaaaataaaggaggccacataaaaaaaaaaaagaaaccttgtattattctcccattacagagaaatctcgatacaaagattagtgtatgactgtgtaaaaccaaagccaacgccacacgaggaaaatgcagcagtgaaaatgaaagaacgggcaccatgaagcagcaatgagaatacttaacgaaaagaaaataaaacgctgccatctacctaatttatgctctcgtcgccggagaaaaaatattgattggagaatgtcaagtgacacctctatgtttcaaaacaatgatgaaagatcaaactcacttgagtt

SEQ ID NO: 225416 - DNA, 3143 bp, Cannabis indica
catagaaactaaataccatatataagatgtatggactactcatatcattgtaggaattcttattcttccccaaagtgttattagagagaatgacaaactttgtaggaatttttcatggggtaccaaggattacagatgcaagcttcactttgcttattgggataaagtgtctcccgaaacattatggaggactggggtttaaaagcaatgatcaaaaaatacatatgggatattactgttaaacctgatgtactttgggttaaatgagtgcaaagtatttacttgagagggcaatttttttggctccacacggttagaggagaacctaattggtattggaagtaaactcttcaagcttagatcaaatatctctgaggcaatgatacttgatgctggtgttacttaaggtaagcaaattctacaactctctcattaatgctgagaaggttgattatgcttgggtagtttgtagtaaacattcgattcctaagcatagattcatactttagcagatggtgaactctcagttgatgaccagagataaattttaaaggctgcaactctccattaaatctctgtactgtcccgtgtgtcatgattttcttgagagttgtgatcacttgttttctctatgtctattttctattgcgcttctacgtaaagttcatggatgggtgagtttcaccacgtggcccactgtgttcttagactggagacttagattgggcagttggatcaatgttaggtggcgattgttgtgatagttgctgtggtttattttatttgggataatagaaatttttgtatttttgaatgtagatcttacattgttcaatatagaaataatatgataaagcaaggtatcaaatctcgttttagtagtttaggcaggaggaatatgtcttctaaagacaaaattattactgttgtggtaagtagttggtattatttttaatctaagctttttcgagctttggttagacaagtgttgcttgatgtaattgtgttgtttgatttaatgagaacacttctcttttaatataaaaaattgtctaatttttttttaacgtatatacattggaaactattataatagggggtgagatttttgtctttgctgctcggtaggagtatttttattttcagtatataaaaaaattataatttatttattttgtatgacaatatttatatattgtccttagagtagacatctcgctaaatttgagaaggattctactgttgaaagaaataaaatttaaaatagaaaattaacaagcatgcatgcaatttattatttgagcctaatcttaattttttgacaccgtaattttgaattttcaaaatttgtaaaatgattgcttttacaacacgagtatgtacaccatcacataaaaagactgtgttataatttttctttattcacgtaaaagagacattactatcaataaaaaaacgtatttagcaaaaaaaaaagtagcaccttgctataaaagtggtggcacctactctagtgattagattttgtagttttttatattatttattattattaaattaaaaatatgtgagacttgatattgtttacactaattaataacaatataatcaattagttgtattggacactttagatattaatatcatttacttttttcaagatgttattgcatggtggtgttgggcacttgttccgttagtacctaataataatactctttttcaattagaattaataatgctaaatagcattacgaatgcattgcactaccacaaaattctcgtattttaacatgatgattattaacaagtttactttaacttctctctagatggacggttaagggtagttaattctgttaagtgtaagtgtaagttggtttggataagttagttaattctgtttcttaggttctttcctttcttttagttaagttagttatgctcctttaaccaactctattgtaatataaatagctatattagcttcctttgtaaactagatcgattatcaaatacaattacttttttgcttttcattcaattccgcaatatggtatcagagcgggaaagagatgctttccctcgatcccaattctgaccgccgtgtgttcttcttctccggcgtgcttgttcccagagctagtttcttcaactactctgtgttttcttttctctgttttcctctgatcaaactctttgtttgatcctttctcctttcaagaaatgtctaatgacaatcagacgagtcccacttcgattggagatagctcaaactagactgccatcaaagaaaccatcaatcctacgatgcagcaaagaaatcccctggaagatccttccaatccatactatcttcatcatgctgataatccaggaaacgtgttagtctctcaattgctaaccggacaagacaactatatgtcctggagtacggcgatgcaattggctatttctgccaagaacaaactcgggttcttggatggttcgatttctaaaccttctcttaatgaccttaccttgtataatgcttggattagaaacaacaatattgttatttcttggatcctaaactctgtttcaaaggaaatatcctctagcattctttatgatgaatcggctgctgctatatggcaagatttgaaagttcgatttcatcaaaagaatggtccacatataaacaacctaagaaaaggactaatgaatctaaggcaggataatcaaggtatcagcatgtactttactaaactgaaaaccatttgggagcagttgtctcactatcgacccacatgcacctgcaatggatgcacttgtggtggtgtcaaaagaatccaagaatatcaccatatggaatatgttatgtcctttctcatgggactttcagaatcttactcacaggttagaagcagcatactcctgatggatcccctacctgaagtgagccgagtctttcatctggttactcaagaggaaaatcaaaaagggaatgtcagtgtgtcaaatgatcaaagcaacagtatggcatttgcctttcaaggagagaaaaacaacactaaagggaacaagactcagcaacagaaatgaaataggcccttctgtacccattgtaacatcttgggacacacaattgagaaatgctacaa

SEQ ID NO: 225417 - DNA, 4047 bp, Cannabis indica
tttttttgacatatatggaaaatagtcaaatacatttgatttcatttaataaactaatatcattatatataataataatgaatacattttgggtatactattttatctctaatataattgattatttttatattttatattattagtctatgtaaagtgccaaaaaaatatttgcaccttacgtgatggaagtaaatgagtaaatattaatgcaagaacgagaatcacaaatagatatattttcctaagcccaagtggaaaaaaaaatatcaaattaattagtgactgatccaaaaagaataataataataaatacatataaaaaaagtttatgattagagtttaaaaagagtttaggattgaaaagaatttttgtcaaccaagtcagcaccactaacatatctagatacaaaagatatcagccgaaaaggagcaccaatcaggggagcatctgagataggaacaccatcattttcacgagcctgagcctcaacatcatcgtgttcctcattttcatccaacggaatttgcactatttcaccagacatcgacgataaggaatgctctgtagttacatcactttgatggttctccggattatgaataccattcgtttcctctttcactggaacaatgtctacagagttcaactcccggtgtaacatcatcggcatattttcattggttcgggactcctggtaagaaacactagatatttcggcatttccaaggatccgttcagatttttcagttaaaggaaccccaaacaaactactgcctctgtcaagctcaataaacaactcattgacctgaaaacccaaaaattgaagaggaaccataggtaccatagttgatataaataaaaagtattagtggcttttgggattatgtatcagaaggggtcataaaatcattctggagtgagcactctgcaagttctatcatttagtattcaagcatcaaaatgtaaaatatttttcctgaaatccaactcttcaaattttgtaaggtttcaaggcttcgggtggaggaaaacttttaccttctcaacaagctctgcattttctgttactaatttctcaaccaacgaacatgctgcttctacctgagagtttaactcctcccgttcagaagaaagctgtattgttcattcaaaactttagattatatagctctttcttccattattttctttgcaaaaataattcagatgaaagaacattaaacaaacaaaacagtattaaaccagtaaattcatcattaaataaaataattgctatacacaccattgaatccttcagcacaacaaaaacaaaaaccaaaaaaaaaaggaccaagaaaacaaaaggagaaaaacgttgaaagccgattagattaagctcaatggtaatcaaatactctgattatactgtagatttgttttctagaaaatacaaaagcatcttcaaatgcatgttccaattatgcaaatgaaacataacctccacggaaagtacattttctccaattacactgctgataaatgatggccaaaatagtcagatgtatccataaacttgctctgaattataaatataactaaaactacaacttggtcgttctatgcgcagttcaggacacaaacctttgtaaattcttcagatgacttagaggcaatgttctgaagatccttaatttgcaactgcagactagcaatgttttccatcagctgttccttttcttgtaagacattcttttgggattcttcaaactccaccacctgccaagctttgtttttaatcccatatcagaaatttctaatgaataaaaaaaaatacaagttaccctgtacactcgtcgtaatcaaatgataggacatgagccagtgagaacgcttatttgattgaccaaaaataattaagtgttaaagaaaagagtacaagataaggagggggctgaatctgaagacacagctagctgatatctcatctacctcggtagaaagacttcatggtaataatggaaacaaatgactggttgaatccaaaggatcatagccaacatggaacattattttaggctgatagaagaaagaagttatataacattgcagttcaagctacttgttggacactgccttgaaacaaacatttttagattatctctaatggtgtaaattttggagaactttacataaatatacttgtaggatataataataccatatatattgctaaaaaaaatacacccatttataaaattaaggaatatttaccgtgaaacctctttaacatttgcaattgttacacacataatcctaataaaaaaaagtagcggaaaaagtattttagtttacgattttgttgcagtcgtacccttttttgattatcaaacgccaaataaggttgttaagcgcaagctcaaaaacacgtggcgatatatttctttagcttatttaatacgttgattcaataatatacagccacatgtttctgagttgacacttaacggccaaaaaaagatacgactgcaataaaatcgtaagataaggtacttttgtcgccaccttttttgattaaggtcatgtgtgtaacaattgtaaatattaaagaaattttgccgcaaatatccctaaaatttattattatatacaacttaccaaccataatcacatcctatacttaatacaaacgttacattatgttaaaagaaagattgtgattagatatgtactatttggtagttataaatctaaattagacactaattagtattttttttttattaacaagcagtagctaaactaaacatttagatactaattaatagttatttttggataacaattattagttaaaccaaatgattagatactaattagtataatttttctcataaaaaaaattgataggttaattttttggataccaattattataaaattccatatgatatcattgaatatcaaattgcatataatttataataataaaatactacatatcataacaaattagtttggatgcatgttaataccaaattatatattatatcaattatcataatataacaccaataactagttaaatataggacgaaatagtattaaatacatatatataactatacaataaaagagtttgcggaatagtactaattatgaagaaaaaaatatattttgatactagttggtaacttttatgatttttccaaagctaaaagtaacaaatgataacaagaaaatagaatattaaatatcaattagtaaccaaataaattattagtaattgcttacgttcaataaataatttttttacacactttctttatctaataataaagaaaaaaatacatattatattaattttatagaaaagaaagtgagtataattaggtagagaataaatcataaatatttgttacttatgttatttatattaaactatgaaaaataagtaattaatttctttattatgtttggagatgtaaattttcttaaattttgtgttaaatttggctcaaaaaataagttaatgttatacagtaagacctctattcaagaatacacttatatgcaaattatattttaattgagaaattataactaaatacacagtagaaagaaaaaatcaacgcactaaaatatcaatgtcacaacaataacaaaaaacaatctaattaattagatattggcatctccggcagtgatctgaaattatgacttattaatatcatcctctgtaatctttcttatataataaaacttaataaataaagcattgaaagacttgcactgaaacatatactattatcagctgcaattaatctccaataaaatctatccgcaagaagattttttaattgttttacatctggattttttatttgataagaaagaagatagtgtgtaattacttaaatctggaaaataaggatacaaagaaaataatagacatgaagcaaaaccaagtcaagcgatcacccaacttactgttaacagctgtgttttttttttaatcatttcatacagtagagatatgcaggttacatgcgctgtgtttttatttt

SEQ ID NO: 225418 - DNA, 4398 bp, Cannabis indica
gtgtttccaattttctaatgcgttttgattgcattcagatatgttcactttgatttgatttgattcttaacacgatctgatcaaatctgatgtgtttttatttgggtaccagattaatatgttgatataactgagaatctgaagattttttatttaggtataactgagatttgtggatgacttcaattcaatcaatatttctattcgattgctgcccaaacagcaatcttaagtaattttgacatgttatcatgtaattgaaatttatttatttttggcaaagatttgggttgatgctaggtaggcaaatgaccaaaacatgagcttttcttttgggctgaatttgatttgatttttttagaggctcagattaagaactcagaattttgatattatattaggatggcaacactaagaagtttgaagatcaaaacaagtacttgtaaacgcctagtgaaagagcttcattcttatgagaaagaggtcgagagtgaggctgccaagactgccaagatgaaggaaaatggagccgacccttatgatctgaagcaacaggtttcgatgtttttgatgaagaaatatatttgtatgcattttcttttatataagaagtatgagaaagtgactttgggttgattgttttgcaaacaggaaaatgtgttgggagaatcaaggatgatgattcctgattgtagaaagcggctggagtcatccttggctgaccttaaagctactttggcagagttagaagagttgaatcagaaggaaggtgcagaaattgaagaggctcggaccactatttcccaagttgagaaactgtttccaacaagctcaacttcagaatctgaagtcttgtgattttccattccttgctggggatttggatattagttttaaattttccttaggttggtttggatgaattgagtgtttctagcactgcttcttccccattcctatttggcattttgaacacttcagatttgaccaatgttctatagtatgtattgagctttctatctcggaagttggaatgaatttattttccatttaccaattgtgaaggaaaagtataacatggactgcaagtgcaagccttcttgtgctattcaaattagggtacccattgggatcagaaactgcatctggtatggcaatcatggcttgcattggtgctgtggtggtgggattcggtgcaggtgtggttgttggaccaaggaaagacttgtaaaactgataataacattgagtgataacatgacttgtcttctggcagagttgatacactgcttggattgccaaggttggttggaccaccttggcggccagaaaaacctattccaccaccacgattaggattattatagggtgagggatctttatagttattgtataggatttagggtttatggtttagggttattgtatcctcctctatgattggaggagaatccaccacgcatgttgccattgtgagcaagatttacttctgcagatttagatttttggtggacttatctattcttgcttcttgagccatgagaaggggcttcaagtttagctatggtgaatttctccttgttaatattgtaagactttagaaaaaatgtcatatttaggtccaagatcattgaatatagcttcgccatgatctgttatagtaatagcttcgacaaatagtcattaattgaagatgaatgttgatcttagtgttacgaagttgagtgttgaattgacttatttttgaatttgtttgagcagtgaagaactcatggagagctagccaatcatcgatagaagtttcatgcccgatcattcttgtgttcattttctcattcatggaagacaacatccatgaaagtagaagttgatctttagcctcccaatcgacatagtcttgagagatctattaagttcatgatcaatttttgattcatactttggtggagcagagtgcggtttgaagaatctttgaagacgacaacctcgaacagttgtgaggatctgatgtttccaagataagaagttattctcatcgagtttaggtgaaagagagtgtttgaaggccactggttctctgtattgaggttatctgaggttgttagttgagctagacatggctgggtaggacaaagaagatgaagacgaagaagaaatagtttagagtttctttagagctctgataccatattgaaataacagtcatgttagaattaaaacaaatgattttatagtgtttagagagataaagaggtgagtttatataacacttgagagcttaaacaaatagtagctaagcttacagaataacaccaaaagaagctaacaactaactaaaaataacagaaaaagacagttaagtaactaacttccttaacagggtgtgctcgaccaaaataaatgtatttggggctactacaacgctggagattgagactcatgctggaattcttagtgaagtggatgatcattcatctcagggttaggagctcaaatttctttttaaattgcaaggatctttgtcaggccacagaaagacaatcgccaatgttttagattataattttcttttaatttctagagatgacaacaattttgcggatgtcttagcctcttggactagaagctactttagtagttctctttctttgggagctaacgcctatattgttgacaaactataaagtttattggttttaataaagttttcctttagcaaaagagcattgttattgggtactagtggtgcctattactttttaaacgtgtcgctttgcgattgactagtgatattttcttaaaaattattacattaaactatatgagatttgatacttaattagaaccaatagctaagaaaaagtaataaaggttaaagttaccatcaattaaatttaagtggacatatcgccactaagtctaaccccattgccgaaacaaatgcaccttataggggtgagcataaaatctagaaaattgaaaaaaccgttcaaaccgacctactgaacaccgttggaatcgaaatcgacaaaaccgaaagccgaaaaaaccgctaacggtttaaaccgccattgaacggtcgatttttttttgtttgaaaataaaccgaccgaaaaagctgaaactgactgttatacatatataaatattaatttattaattttttcttcatgtatttgtaaaataagaataaattggattagttcagtttgggcggtttaaatcaaccaaaccgaggttcaaaacggtcggttttaagatatgttttggattcgttggtcggttttcggattgcactaatccaaaccaaaaatcgaattttagatttttatataaaaaaaaaaccgatcgatgctcagccctagaagcttatgtggtctccaaaaaaaaaaatggttaaatatgtaaaagtataatgcgcacgttagcactgagaaggttgatcttcttccctttagataaaattaaatcagattaggttgggtttggttgggtttctttcaatctaaggacggaaatggcgaagccctcctccgagttgattaaggcgttactctctcccacagcggtgatctccaaggacctttctcccgaagtcgttgaccgagttctgatttttctctccaacgtcggcgccgcaaaacccattcccgatcactgcaacaccaaaggtttcttttccgacgtcatcaccgccgtacttaaacccctcactgtttcccctggacacatcacctgcctcctcaccgtcaaacccgccgtcgctgtaattattcatttatttataattgagttggaagttttctttttagttgggatttgatttgaattatatgaagaaagagaaattgttgcttgcttgtccccgagaagatttttttaacgttatgttggatattagagaaacaataatggtgctttattgatgatttttcagaacttctatggatcgcttcatggaggagctcttgcagctgtagccgaggcgatctccatagcttgtgctaaaacggttttaggtgacgataaggaattttttcttggtgaacagagcatgtcttatctctctgctgctccagtcgatgtaagtgtctcttaatacctacagttgctcttgttcaattgttcttgttgttaagtattaaatgttttagtaataaagattgaaagaagagaaaaaaaaaaaaaaaagagggcatgatcaaaattgagtttgcactttgcagctattaatggtagatttactcacctattattataaagacagaatatttgccatggtgagggtatgggtgatattggtcattgttcacttggagattggaatatcttatctactctttcccttggtttcattctcttttgccttccctactttcattctcaagtgtgccataa

SEQ ID NO: 225419 - DNA, 2033 bp, Cannabis indica
cgttttaaattttagtattgcatataaatatgtactacaaaaattttatttgatactaaattaaaatttggccccctaggatttaagtcctagctccgctccttatatttatattttattatgtttcatatattttatataatcttttgttataaatcaaaatttaatataatattattaaaaaaatgatatagaacacaaattaatatatattatacaatacaatacgatctaaagtaaggtagtaaaattttaactaaaataaaattttgtaaaagtcaagttgacttacagatttatcaaattttgattttattgatcaacttacatgaagattttttttttttttcattattacaacaaatcttacataaacaaggcattgatatattacaaaagcaaaactcaattagaccgtagcaaggcttggcttttttaacttcatctcttaccttaacaatgtgtttgaatgattttctcatgtgtacttataaatacacatataaatggcagaaaaaaagacgatcaaaaaccccaaatagaaggcaaccaagaaagacttgggagatagagcaagaaaaatcaagaccaaaatgagttttatattaccacatgttttacaagccatattaagaaacacattaagcttcgaagagattaagaaacacaaagcttcaaatgaaagaatcaattaaaaccacaaacacaaagtataataatgccacatagaatatttgatgtgaaatctatcaaagtaagctttgtcttatatatccaaattttggcttgacttttgttgatggacatggttgcttatggcacgtttagtcacttggtcaagaacatttctttttatgtcaagttgtgaaaatgtgaagcattattaattaacaattgagtctacaaaattaattgttgagacaatttggacaaagaagtactagctgccattctctaactaattaaaataatcatatattcattcccaacttcctttcttctttaactttccattgccaatggactaataattttttataattaaaaaaaaaaagagagagagagaatatagtacttcatgttttatacacatttattactctgtattttatgctcatttgatactttgttattttaaaatttcgaacatatttaaagacatatttggctaagcttctacttatgcttatgcttagagttagaaatataaaataagtataagttttgacttacttttatcgtttttgataactgttatataaagtattttttttaataaaaagtattctttaaagtatttgggtttctttcaaaatgacttttaaattaaaaaacaacttttaattttttatccaaacgctacgtaaaagaattatttttaattactaaaagttaaaaaagagacttaacaaagtgacattttaaatattataaaaatattatccatattattctacgagtatattaaatagaatgaaagtgtttgaaggattcttaaattctctatattagaaaattctaaatggttttactacaaaaaaaaaaaaaaatactaaatgataaatattttattttacaaaacttataagggaaaatgacataggatgataaccaaaacaattattcttttagctaaattagattgtcgagttttcaaaagttgtaaattattcttttaataataaattagtgagtaaataccattttggatcctgccttttgcaaaagttattaattagattttcttttttgttaaatgataaaatgaaccttgtattttctaaaatggtaaaaagaagatcctgaatttaatttttgataacttttttttttaatatgacacacttgaaaacaattcctaacatgaatagatatataaaatgtaaatagttttgtcataatacttttagatcggattattattattttattttgacaaataatcagttcagggtcttatttgtatcattttgaaaattacagggcctattttgtcatttaacaaaataaatggtccaatcgataacttttac

SEQ ID NO: 225420 - DNA, 2919 bp, Cannabis indica
gacagccttttctaagattgatctctgctcgggctatcatcagttgagaattcgagaggaggacattccaaagaccgcctttcgtactaggtatggtcactatgaattcttggttatgtcctttagactaaacaatgatgcaacaacttttatggacttgatgagtagagtattcaaggatttcttcaatatatgtgttatagtatttactaacgacatccttgtgtactctcagtcagaagtgaaacatgagcagcatctacggatggttttacagcgactatgagaacacaagctctatgcaaaatttgaaaactgtagatttttgctatcccaagtatcattcttagggcacattgacagtaaagatggaattacagttgattcgagaaagattgaatctgccaaggattggtcaaggccgaagacagtcactaaagtcagaaggtgtttgagtttagctgcttattatcgccggtttgttgaaagggttgtattgagaagaaaattgtaatctgttggagtcttagtataaaatcaaacttgagggcagttctatgaatgttttaaaggaatctttaataattatgaaggatgaatttagaggtggactttatttcatggtaggaaaatagttagttttgcagcattggcttcaaataaagatgttgatttaactcaactttggaaccaaaagattggtcaaattactgaaagatggattgttaagtgttgaaataaaaggttctgagtggcaaacttggtggaaagcttgacttgtgtttgtggtaaatgttgcatagtgaaatttagtattagaattcacacaactacttttcataggcctatattcattctcatctttagggacgagcaagagtatcatctttaggtgaagctaactacttcatgagtatcgtagataactactctcaaaaagtgtggaagctactcttcaaatcaaaagatcaagatttagataattttattatatggagaatgtttattaaaaatcaaactagtaagaaaacaaaggattaataatggtcttgaatactattccaaagagtttaatcagtatagcataagtgttggtattgctagacatacattagtaacgagaactcctcaacgaaatagatttgcataaagaatttataaaacttgcttagagagagttagatgtgtgttcaaggaagctgaccttgaaaggaaattttatggagaagttgttaatatacaacaaactacttaatacataggtgcccctcagtagctttgaattttaaaactcttaggaggtctgcacaaggaagaaactctctgatgaacacctaacattgtttggatgcacaacttatgtacacattggacatgacaagctagatcatatagttcacttttcaagtgcatgttctttggacatcccaatagtgttaagagatacgtgtttggaaaaaggttttaaaaagttcaacataagtagatatgttatctttcagagaagaagagatgtcaacgaagtttaaaagcaatgatcaagctagacctcatatagatcagttaacaagacaaataatgcttaagagcaacctcgtacaatttgttaatacgttgagtggagtgagctatcacataaacgtaactagtttttgtgtgttagcactactacaaatatatcttttattttcagtttttttctttaataaattaaaaattcgaagataaaactattttaatacttgtatcatcgctttttaagtagtggttcataaaattttggttatatcttcgatttttattaataaccgaaattaaaagtgtttaatttttctaatgtttttgggccggatcttgtgaagacctttgtcttcggtatttatctaataccgaagacaaataactaaataatttccactgtagatttcaatgtccaattatagtgacgacgtcttagtaatgattttctggtgacagcaaaaactctaatgattttctggtgatttttcttgtaacaattacaatttcaatgtcttatccgacggtaataactttgatgactttttcgataattatttttgaaatctagttaattagtttattcattgtattttgttatagtttccattttttaaactttttatctctaaaaagacccatattttgtgacattaattttatacccatacatacatggcatgatatgacatgacaactatgatctaataaagacatacatggcatgattgacatgacaactagtccaatacaattttatctaatttaatgttttagacccactaacacacacatacctctagccaagcgtaggatcttgtgagttcataggttgcaaaccctccattcttgtttgtaaagataaaataagatgaacagcatccttaaggtgatccgccgctatggcttctcccacgatgtccgaaggcaggtctgatagtaagagagctgcctgttatatatatagtattaaattcatacaaaggtagtttttcaggtatgtatcacttttattccgaataatttttagcacgtaaataaattatatctatgtttttataatatgaccgtacatatgttgctgttatatcatgctttctactaataataaattactttagactattctcataaattaaactaattattaaaaaaaatatctcctaattataattttagtcaaataaattttaaaaagagttaaataactttatttattcagttttaattatttatttattttattttttctaaaactcttaaatatataattaaacgtataaaatttttaattatttaactttttctcttgaagaatctaattatcatctcaggaactagaagaaaaacctctacaacatgatcataaacatagaccgcctaatttaccagaataccttc

SEQ ID NO: 225421 - DNA, 2948 bp, Cannabis indica
gatatgataaaacagtagcattaaaacttaagtaatatgaagaatgtcactgcagaccaggagacccaagaggctggatcactattttatataaagtaacatggtgtaacgcccacttctaacctaaacaaccttagcagacacaaaacccttaaatagtattatcgatatttaataataaacggagaaagaaaaattagagaagggaaatgagattgagaaaaacgcaaaggcgtggctttaaataggccacctaggcagtgtagaggaaaatgggtgctagtgagtttagggtggtctagttgatgaaggctggtttgaattgaccttatgttggattgtactaaatgttgctacggtttgcagtatatgttatactggctcttagtactgaacataaatcccatttgaaagttgccaaaggcccaaagcttccaactaaatcaaggagtaatgtaagaaattgcttactaaactatcaaagaaaagatataagatcctcttattctttccaagatcttagcaaagattggggaagctttctgcaccaagatcctcttattctgtctcgatacctatgcttctaatagttcttgcttttatgtattgagaaatgcaggttttgtgtattagtttgtagtttttcaaatgtttataattgttggttaccacggttttcctccggcacaactgaggctccctaataaatttaggaggaggccagtcagacacataacctttcatctcttctaaaagaataaaagactccaaaggacactctcatagacaacacatctctaggtacaatctcgcctaacaaaaaataaaaaagataaaaaatccacccatttctctattgaggatttcaggtgaacaggaaggaagtaccaaaagaggtaaattataaatctaacttctaacgggaatattaatatgacaatgaaatacttaacatgaaccatggttgaaaaattcacaaaataactttgaccgtcacctagctttagtacaagtcaaatataaattagaataaacaatatccttgttttatacatttacttttagacccaaaatcttggagccatgaatagcttttggcttcagcctcaaaaatagacattcaaatatctagcttttctggaaatataaatcaaattttccagaatatttatctacaattctattgtgtgcacttcacgagcctgtcacaaaaattacaacctacacaagtatcagtaaactggctcacctgccttatcccgtccagcatgatcagtttcatcgacacatagtcctgatcctagtgaatttgatgtcacagtgtattcatctgaaacaattccaagcttaagtttggatgacacacgtacaaagacttccaaattacctacaaaaaacaataaatattagttcagacacaacaaagcttgatgagccaatgaaaagttttcaattcattcatagcataagtaatattcaataactagaacttttgatagcaggatgagactgatataccctataagcaaaccttaaataatcactccaaaatactagaatgctaggcaataccataatatcacaaatcaattgtatccatctatgaaaaagtagataactcacaaatgcttggactactgtttaaaacaataactagtcacttaactacaagggataaaatgatagaaataagtgtggggcgtagtgataatgattccttatttttgtgtgatttgattaactaagtgattatattagttgggaactataatatattattataagatttgaaaatggttaacattgatactttatgaactcgattcacagttttcttgcacattctctcttgtacccttctcaattctgttttcatggtacaatgtcacaaacaacaccacctagcaaaataagtggattatcatatatatcgatacatatatatatatatatatatatactgtctgtggtatactttgcattacttattgtataatgacgtttcatcaattactaactccattctcttcaggaaaaaggccaaaccttaataagtttttatgtttaggaaaggacaatacacagtgattatgcaaaaatgtgatcaatttgaagacataccattcaaaacagaacgccagagttccacttgatcagcttgagacatgttcattacattcttgcagtttccattaattatatatgctgcctgtattataccagaaaccattaaaaacaatgaaattatctgtatgtgttttgtctacatcatatctctgttaaggaatttcgagaaatgaagtgaaattctctttggtgaaaaacaggaggattgctcgtttatcaaatagacggacaaaatcatatacctacctccttcagtgagttaataaagttccactttatactatcttcaccttcacagggtaataatatagttcctggataccctctaaaatgcacctgcacataggaagttcaaaacttaatatagtagtttgccaacttgttgcctacatgcaggtaagttatactacaaatttcacatcattcaaagccaaaagttatctaattataggtaataaataaaaggtacagtatcaatctttacttacaatagttcctctgcaaatttttaaataaaagaaaaataatgaatattgtcagttataaatagaaaaaaaaaaaagaccaaaatttgtaccgtcaaattccaaggtctctctggttctgcacacagaagatcaaatagaacccctgttggcacatacctgaacaaataaaaaataacctcaagcatctaagaacacaaactgtattttgttaatagacttgtaacaagcctgggacagcagacaagagaatggaaaatatgataaacgaaatggttttctgctattcccaaatctttcttgactcaattcatgaaacatttatgagcttattaa

SEQ ID NO: 225422 - DNA, 4578 bp, Cannabis indica
tcccctagtaattaagtggagatgaattactaaattatagatatttgaggtacgttaacgtttaattaattaattcacctatctagaaaatttgtccggtgtacacatcaattcatggtcaaatatcaatcactactaattaaataattggcccaaatgtttctaacttattagtcatatttgctaaatcttgtaatactatatcaatgtattaatactccaaaagtacctttccgaagctggacaatacaatgattcagtttgttatttttagttgagttattatatatgtatatagtaaaagggctatattatataacatgaagcattaatattcaagaagaaattttatttatatatatacatgattgtaatgtatattagccccttccttaaaattttggcatccaacctattctatataattctatatagtagcacttcaaaatcaaggacccacttagttggcctaagatgcttttttctttaatatgtttctccacaaaggaaaatgacttattcccacttggttcctttacgatttccctggccgtaattagagtgaacacaattgatatataaattatatatataacggcatccatcgatcggtccatatcgattctagtgagtgtatgagtccagtcatactcaatctgaaccatccatcttgatgataaggctctctatagacgaatggtgggttgaacgactagttttgttcatttattttatttatttatttattttatatgtggtaataactaattacttttcttttattaaaaagaaaggtaacaaataatttgcatctgggtttcatttggggttcatttaaacctcatttgacgcctatataatcctctataacccgacattagtatgactcaggaacaacaaggttagtggagtggcttcctcagtgttgctatatttactttcctaattagctcctcacatatctcatcactaattaaaatgggttcagaagttggtgtggaggtgatcaataatggtaagctggtctcagctcatcacgtgaataataatgataataataaaagggcttacgtaacttttttagccggtaatggtgactacgtgaaaggggtagtaggattggccaaaggcttgagaaaagtgaagagtgcttaccctcttgtggtggcaatactgcctgatgtgcctgaagaacaccgtcacattttgaagtctcagggttgcatagtccgtgagattgaacccatctatccacctgaaaatcagattcagtttgccatggcttattatgtcatcaactactctaagctccgtatttggaatgtaagtattataacataaacatatattatatatcatgtctatacttatggttaattacttctttttcatgttctgatgtattgtgttattgtatacatatgtatatatatagtttgaggagtacaggaagatgatgtatttggatgcggatatccaagtgttcgaaaacatagatcatctatttgacatggaagatgggtacttctacgctacgatggattgcttctgtgagaaaacatggagccactcactgcagttcaaggttggatattgccaacaatgccctgatagggtcaaatggccagctgagatgggttctcctccaccattgtatttcaacgctggcatgtttgtgttcgagcccagtcatgtaacctaccaaaaccttcttcacactctcaagattactccacccactccttttgcagaacaagtaataattctcttctatctctttatattaaaggtggatattattttcgccgtatcaaacaaaccctttcaagtatatactagtggtatttattatattaatgtatatttatttgtgtggttgtgacaggatttcttgaacatgttctttgaaaaagtgttcaaaccaatacccctagaatacaaccttgttctggccatgttatggcgtcacccagagaacgtcgatttcagccaagtaaaggtggcgcactattgtgctgctgtaagtactttgtctcataatagataatgaaaatacatacatatcttttagatcttattcccactaaataatctctattcctctctaattggccaaataacaatagggatcgaaaccatggcgtttcactggtaaggaagctaatatggacagagaagacatcaatatcttggtggccaaatggtgggaaatatacaacgacgagtcactcgactataagaagcctgaaaacgcacactcaacgactgatgaaaatactaatttctcaaggacctcatcgatcatggcttctatgccagagccaaggatggcctacatccctgcaccctctgctgcctgaactttgatatcatatatatatatatatagagtactattatatgatctgatatataaacaaatttctcttttcgaagttggtgtgtgctcctactacctaattttggtacaccttttcttacaggctgtttacttttactagttagtaatcaagaattaatacttttatagattcctcactcaatgtcttataaccaagattttatgtttgttactttacatatgtttagtgcggagaaaaaaaaaatatttatattacataaacttgtattgaatgcataaacgaaacttgtccttttgactcggtgttaattagtttaattttaatactctaacttgtcaaaaatcttcaattttcagagtccaaattctcctttttctttttctgtactcattaaaatacctttcttaaatgataagcaaaacttctaacaggccccgagtaattattttactttcaacttaaatatcaaaattttattagaaggaccttcagtaagacaaaaccgagaagaaatatataaaatataattattgatttttttacaggaaatatataatattcaattagtttttgttatactcgtaaaatatcactttaacgtagggtgtggattcgaggacaaatatttcgctcaatgctcaattacaatattagatgatggtgtaatgtaatagcaatgacaaaaccaagcgattggaatgaattgaaaattgaaggtaatagaatatcgttgtggaatgtatggctaaaaactgggttagcttacacgtagcggctttgaattggcctagataattttgtcaaggtcatcatggaatcgaccttcattggattgttgcccaattctagattctcaaatggaccctactcaaataatactttggggatcaacactaccctctttgtatgtggaaaggtaatcatcatgaacaattaagtgatcacattcccatcatgctggatgaaacggacatgactagtggcctagtagcaatggtttagaattaaagaaaaaaggtcccctcaaaataagctgacttaatacaattgaactctttaagtttttcaatactacatgaaaacactttgtggttgattttattgaattacaacaagtgaaatccaaattttaaataccaaccacataaaagatgccaccttatacatggtgttaggccactcactcgaggctcgctcattaaggaataaggtgatccattgtaagtttcccagtcaaagtactcaaattgtttcctttttgttttaggggggagacacctaaactatatgacacatatccaagctagctaggtgaacagaacaaagaaataaactagaccacgagaactagtcatgtaatatatgcaggttgaaaaattagttaatcaattatatatatccatgggactaaaagcattctcaccttcatattcatcgtattccagccctggttcctgaaagccacaatcatcttcaaaaagaaacggagctacatctttgcttctctggggcttcttgtcattcatttcaatgactgaaataatcttttcatttatgcaagcttcaactgtttcaccttcaacatcttgagactgcaaaccaagtaatgaaaagcattctgtttggaaatctatgtcctcggaagacaaaattaggccggccattgttttcgccagatcaggagcataactgcgaatctgagaatgaatgcagccgtttctaaaatgagctgagcaataaatagcttaagaaacaaaaaatgaaaaactaattctgaataccttaagagcatgagcacttaagagtactccggtgtgtttttccctcaaatcacccagtgcaagcttaactgcttttttagtaagattactgtctagttgaatctttcgccttgttgatggtaccaggtccttggcataaagtcaaggaacatacaagtgaccaaaaatgcatactatattgtgaaaaaatcaattaagagcaagcaatgccaaaataaaaaccaaataaaaatgcatgagactaatgagagtatgacagtgtataggatattgctcattgtatagatggaggacgatagtctatatgagcatgtgcaggcaagttcgtcccactctattagtacattgctacctcgattctcgacactccccaacttccaacccataacttctccagtcgatgctttgcagtgccttcaaacgatgattgagtg

SEQ ID NO: 225423 - DNA, 3588 bp, Cannabis indica
ataaaatagattacattgaaatggagttttatttagggcataaaacctaacatatccaccatccgatccgattcaatatgatatttaaaaataacatccaatctgatccgattacaattggatatctaatatttgatggttggttgtaattggatcggtcggttctcattggattggattgatttatgcacacccctagttgtgggggctgttcttgggcagcaagtcaataaacttcctcatgtgatctattatgcttcttagactctaaacaatgctcatatcaactattctaccactaaaaaagaactcttagtggtaatctttgctttaaaaaagttttggtcctacttgattggaactaaagtaattatttatatagaccatgctgctctttggtatctattggtaaagaaagaagccaagccgtggttgattcgatggattatactacttcaagagtttaattttgagatcaaagataagaaaggttttgagaatttggtagcggatcatttgagttgtcttatttgggatgaggacaatttgcccatagaagaaattttttttgatgaactactcttagccacacaatagattattccttggtattctgacattgtcaactatcttgcttcaaaagagttaccaagtgatcttacactgacacaacgaaataagcttaagagcgaggctcgtcattacatatgggatgaaccttatctttggaagcattgtgtaaatcaaatcattcaaaggtttcctcttggttctaaatttttctctatcatttcttttttgtcatgcacatgcttgtggagggcactttggacttaaaagaacaactcggaagatatttgacaatggttttattggcctacaatcttcaaagattcttatacttattgtaaggcctatgattggtgtcaacgagttgggaatattttagccaaggatcaaatgcctcaaagtcctattctaatagttgcgatttttgatgtttggggaatagattttattggaccattcccgtcttcttttggctttaaatacagtctcttggcagtggactatgtgtctaagtgggtaaaagcgattgcaatcagaacagataactctaaaatggtagtggatttcattcgctctaacatttttgtttgatttattacaccaaaagctataattagtaatagacacactcatttttgcaataagagcatagaggagctcttttgacgttatagtgtgactcataaggtgactgttgcttaccaccctcaagccaatggacaagcaaaagtctctaacagggaagtcaaacttattcttgagaagactgtgaatccgaactgaaaagactagagtactaggctagatgatgctttgtgggcttatcgtactgcgtacaagacacctattggtatgacaccatatcatttggtatatgggaagccatgtcatctactggctggactagatcacaaggcttggtaggctgtgaaaacgtgtaatatggacatgattgcggctggacaacaatgaatgcttgaattgcataggttagaagagactcgtaatgaagcttatgaaagctcaataattgacaaagagaagaccaaggcttttcatgacaagaatattcatcgaaagaattttatagaaggtcagaaggttttgatgtagcatccttgtcttaaactctctctagggaagttaaagtcacgatggataggtccattttggtcaccaagatttttcattatggtgtagtggaggttgtgagtctgagtactggaaaaactttcaaagtcatcgattagagtttaaaattgttatatgagttgatgattgatgaacaagttattgtgattcatcttgttgacccggagctattgataataaacctagcaaacttgtaaattattagtattattctagttttgctttgaaagacagtttattttctaagttttattagttttgaatcgtgaaaattgtgaaaaaaaattgggagtcaagtgccttcacatctgcgagcctcaagcttcgccgcattaagaggcacgaaaataagaaagttcttacagggagatctcaccgcagccaggccttgtgctcgctgcaacaagcctaggttaaaattttgaaatagagggcctcgtcgtggcaagctttccccatcaccacagcgagatcctgtctccctagatatttttagcttttccttttctttcttctctactctaaccaccttcaaaacttctcatctcttctcttctctacattttgctctcaaaattcaaatttcacaacacccatacctatcccaccattccatcaaaactccatttcattcatatcccaccatcaattcttcccctttcctccttcaatttcctttcttttctctcttccctaaagaatgactgaaatcctatagcccaatccatcatatccaatatgaaaattaaagagatgattgtgtaatttaggggtgaaaatcggtcagttatggtcagtttttacaattttataaccgaccggtcggttatggtttttattttacgaaaactgtaaccgaccgtttagaaattataatcgtaaaaaatcgatcgtatggtttttggcagttttcggtttggcagtttttggcggttttgggcggtttattgcagtttttggcggttttttggtttaactatttctttatttcaaaaaccgaaactgaccgccatgtcaaaataactgaaaccgaccgccaaattcagtgatgatgtggaaccgaaaatttcgttatggtctggtcggtttaatggtgggtttcggtttatcggtttttatgaatacccctagtgtaattttttagattcttgataaagtcaaacaagtagcatactgtctagccttacctccaacattgttagtagtgcataaattctttcatgtattgatgctaaggaagtacgtatcagatcgaactcatgtcttcagttatgaagctatagagctgcaaccagacttatcctatgaggaatagccagagcagattcttgatgggaaggataaagtccttcaaaacaagaccatagctttggtcaaagtacttttgaggaacaacaaggtggaggaagccacatgggagttagagtctgacatgaggactcaatatcgagagttgttttgcttaaattttgaggacaaaatcctttaacgggagggataattgtaatgactgcatatttagacataaaaattagtagacaattaacatttactagtaattttattagcatgtttgactatttgtgcattagtacaaattaagccctatcgtcagaaatatgcattagtgaaataatttcttggacattttattaaattataggtgttccatgcatgctatctatgaattataatattttcaagttttatgcccagtaacagtggaaaattgacggtttggccattagtgtcactttgatatggtttagtatttaagatttagtatggcaacatttatggatagtttaaaatatcagagttatgcggggtaattggttatgaccattttactgttggaaattattt

SEQ ID NO: 225424 - DNA, 2936 bp, Cannabis indica
gatgatttgaactttaaattcaatctttaatatttatctcattatcacaataattaaaatataacaattgaatgtgaaaaaaaaataaatattagtgctcggtttggacgggttaacccgattaaactgaccaatttattggacgggttgaaattttttttttttaattggacgggttgcacttaaatatttctagcacaatctttacattgggataaataaaatgtaatctaaaccgaccaaacccaccaactcaaaaaagatttatttatttatttatttttggatgaattaacgcaagaaagggtttatttaagtgtcaaagttaaaacataacaaaccagcctcatagaagtaacttatgacaactacttttttaataaatattagtgattatttaatggttatagtataatttattttttttatgatatgttatataataggttgttgtcaagaatattattaaaaaaatatattttagaattaaattaattatataaaaaactttattttgtaactaattaatgtaataactatttagcaattataatttaatttaattttaaaataaaattaatcttaattaatattttataagaacacaaaaatatatttaataaataaaataaaataaaattatattaaattaaattatacgtaagttttaattaatattaaatcaatcataatcattcaataataatgtaattattaaaataattacataattacctatttaatataatcattagaaattctatatataagagtttattacttaaaaaacaaaaaaataagttattttcagaatagctagtaaatacaattcacaatttcacataatccattataacttgaggatctatcatgatttcacaactttttttaaccttagtattagattttcatctaaaatcattatgttaatgaaatcaactcatacaaacataaaataacatattattagtaggtgtataataatcaccattccattaaacatatatacatgagactatatacttcattatattcatggatcacaacctaacatatatatcaccaccaaagtttgtaaaacttgtggattcaccaactaaggttttgatcattttacaatttcttataagaagaagaagaaaaaagttaaatatagtcaagactattaagtgtgactccatgaccccaagaacatcatggttcttatggggtcttcagctttgtattggtagactacctttcgtctctcaatatctttgggaattaagagactttttccacagttctgattggaaccatagctatccatggatattagagctgcctcacaagcctgcctaagctttgctcctaaagttttcttaggctcttggctcagacaactatcaccaagaaatggttgaggcttaattctctccattggtaaaaatgagttaaggtaagaaggtattagaattggtaaaggtcgaacttgggtttatatagatggaaaaatgggctggactcgacacaagtatcttaatgacacatgggcttggggcccaaaaagtactattgaatatgattatattcttacggttgtggatgacagattggttgaatagtagatgtgttgacaccaaatagtgtccaagattctttttttgtttcttcatgaatcaaatcatgagtttctttttcttttctttctttttttttttaactagtatttttgaagagggaacttattctcacatctgccctaatttggtttgagttaaaaaatcttagtgaaatttgggatttgatatctataagctaataaagcaaagtaggtaaaataatgtttttgtaatccttattgatagatcttatgaatgtttcaataattttatgtttttagaaattttaaggagtgattaaggatttataaaaaaaaattatatattctttttactagaattaataagtaaaaaaatttctctactttattttgataattataaaccttatttatcataaggtatcatgtttaaaatatgcaagattatatatacaagttgcaagaaaaaaaaattgtaatgagaactttcaataaagttaacattagtactcaattcaagataatgaaaatatttccatataagtggtggggaaggggatataagagaaggcatatgatatgacaataatttagtcttaattaatgtcctatctttatcataagagaagtaagttgtataaaaaatgtataaaagtataaaggaattcttgaaagaaatgaagaaaatgtctataatatggaatatgatattcaaaatattaagtagttagaatatgtactcattccaactgtttctaataaagataaaacttcatatttacactattctaaaattgagatgcccatataggatggcatatacatattggatcatcaaaagttcgataaatttgaagtttctaagatgcccatttctggtttgagtttgattttaagagaagacccagattccttatgtttcagtatgtaacaaaattttgatgtgaaaattattatatatattcttgcttcacttacaaagacaatcatccacttatggctgctggtgtagaatcacatacaaagtggaagattaaaagaaaaaggtaagaaggttttcaataatagtgtgagttttagtggaattaacttattggttgtatcatctcttatccactttcaaggtatcttatagggcatttggtttattgatgttggggtctttggggccctctttcattagtgggatgagacaatgtcaattttattaatgtagtgggatagagaaaagaagaaaaaacacaaaaccaaaacaatttgttattatcagtttaatattaaaaggaaacctacaaataatgtattggaattattttataaatacataaaaaaaaatacaaaaatacagttgtat

SEQ ID NO: 225425 - DNA, 4090 bp, Cannabis indica
acttaggtatttatgccacaaattactcttaactaaaactatgtttagccacttttgaaggtccaaatctaaagtaccaaagcatgatgaactcttgtcaacatttgaacaattatattcattatggagcaaaaccttaagttagaataaagagtctttctatgaaatatcatatccaacacgatttgatgcggaatggtgcaattaaatactaggttccacatattctattttaaattaaaatatgtaggcaaaatattaaattgtaccaatcaccatatgccacatcaagtggtgttcagcattatggtgccccttgacaatactataaaataaaggaacactcacctgatagaattaactaatcaataaataagagaaactttgcactaaagtaaatttgcattcctcataagtcattttcatagaaaatactttattaaagaacatcgcacattatcccattcaagcatgaatgttaatctgcccaatgctcttgttagtccatcttctacctcactttagtgtaattcttgcttaacaaagtttttttataagtttttgattgaagactatgtagcaaactatataatgacaattctgaactatgctcttatttatatatttaagaaaaataagatgaccatttaagaaatagaaaaggaagacatgtcattaaaacaacatgtgagtatgatggcaactaaggttgaagctaaggggtgcacccagtatcattcctagacaataatatgggctgaacaagaacagaatgagcagctggaataaatatatgagtaaacagaagcaaatacaaaaccttcgtgctgcccttaattgtcttcgataatctgctgtgctacctagagtatagcaaccaagtagaaattcccaaacttctggcctgattgatggatctacaccctatcatacagcaagttagaagttagaattctttgattacttatttattgataatgaacaagaatacatcataacttttccagacgacaatatcaaacaacattgattttttttaaagaaaaaaaaaaagtttatatccgaaacccctctttccctaactatcattcgtaattttagtaataaaaaatttaataggcaatatccaacacatgaaaaactcaatatacatgatgcacaacagttacatgttatcatgatccttcaacacttgaacaaaatgccttggtaaaatataaatgagaaggtacgtagtgacattaaaagacaggacctaaataaatactaatgattcttaaaaatctttcacttttacatcaacgtgttacgtaccccaagaataatccgtttaagtgccttctgaaaacaaaaaatctttccatcactgtcaaaggctgcatgccacctttgtggcttaagcattttgtttgcctgcataataaaaagaaagatgaaaaatttagtgcaaggtaacaaataagatggaagaaaaattatattattaatctgaaagaagtatagaggtaagaatttgaaaaaaaaaatgcaaataagaaagtgaaagaaaaatttgctaataagattaattttgtacataaactttattttctgtgataaaggttttctataaataactcggtaaccagaattctattggaacataactgaagtatgttgcatagatatatgcaccacctagctagtcaaaggaatatgtttgtgaagaagcaaattaaatgtcacgattttccgcctcttttgggagataattaagttaatttcatcacataaggagcacttgctgtgtcatataatgtataaattcatgaaaaaaggatgtaatgcaacaaatagaagatagatgtctcccaactcaaataacttttcattttttgtttgcacagcaacctcctcaagaatgaataaagctaaacgtagatgcagatttttagaggaagcagcacaagctaaggtaatatgaatggaacgtggattgctaagttcatgaaaggttttgttagaaaagtccacaatttggatcaatgcagaaagagctgaagctttaggcgtgagaaaacatagtaagccatgggcaggggaagctgggattactttacataatcttaactcagaaattctaatactcaaaacatcacaacttattctgtttatattcaagtgaactaaaacatctaagctataatgctatatgctaaaggggctcattttttgtttttgctaaaatcacatttcatatcgataagagattccaataaagttataaacttttcattaaaaaagaaatatttaaactgctcaactcaattacaagcacataaagatggcgtaatatgaaacttagatagttgacaatatgaaaattaacaaaagggaataagttgggatgtgttaaaagaggcttacagctacagaaacctttattggcgactgggaaaggcaaggctcaccaatgtcccgaacaattgaactgaccctttgaaaattcatggccactccacctttcgcacaagtccatcggtcttcatttacgccccttcctcctcctcctcctcctcctcctcctcctcctccaccacaagacatatcacacttcccgaaatccacctctcgcctcctccccctcctcctccttaccattaccaactagcacagcccaattcaaaataaccataaattaattaatcaactgatgaagtaataaaaacaataactaccacgaaaaagcatttcacatataaatatcaataatttggtatcgcaaacgaactactgttatatgtgatcgtgggatttgaaaactgtaaccaatttatcaaaaaatataaaaaatatatgaagagaggaagaagaggagaataataggcgatgagtgatgatgatgatgatcaaacagcgatcggaatcagtgagaaatataaatgaagttacctagagagcgagatagagagagaaggagagagcgtgatgatgagatctctacaattgaaaatgggtaagagagagaaatagagtgaaagaggggttaaggaagaagagctcatcttcttcttcaccatctactcgctcgctaactccacaacaccactgcacccctttctttatgttttccttttattattattatttttcatttttattcatttattttggttaagattgatttatttatttatttatttttgtaaaagatagatatgttattataagttttaatattcatttacaacaatgcaggaaaggaatatcctagtcctactacattcaattccacgcctatttcgtcagctggtttctaaggtccacaccattttgttggtattaaaagatcaaaatcaaggtgaaaagcatactaggctgtgggttttaaaaactaattaataaatatatattcattaatttggtagaggagaaaaatggatagaaactaaatttgagattgtttggtaaaagagaaaagatgagagaaaggaaaaaaaaattctcacctaaatcgaagacaaaagtgaatagaaatattttgtttagggtaagattatagaaatttactaaaatatgcttttatttttgaaataaaataaaattaataatattctattttttaaacacagggtaaatctgacctacaataattaaagaatacctgttgaagtttatcaaacatttctggctttcttttttattagggtaatagaaatttcttacaatcttcaagtcaatctacgtactagtaagatataaagtaacatatagatgtttctaaatattctcaatacttaagatgtagagatttcttaacatcttttaaggttagaaaataataagaatgttttctgtgacctaggattatatatagttacattaaatattctaatcatattaggtttaggttttaattaaataatattttaaactaagtttaaatattcaccaactaatcaaaaagaaaactaaaaataattagtaacgtttgaagatttctagggtattttttcatatatttattttaaataattaagataaatttaattatttaaataatattttacttttaaaagttattttaatttaatttaattttaaattaaat

SEQ ID NO: 225426 - DNA, 4340 bp, Cannabis indica
attattttcagattgagaatgaatatggagtacaaagtaagctatttggccctcctgcccggaactacatgaattgggctgcaaaaatggctgttggaatggacactggagtgccttgggttatgtgcaaggaagaagatgccccagatccagtggtaactactctaaataatctctctactcaactgatcttagacttgtcacatgcttcatatttattttattttattttattagtgatttggcaaaacatgatctttcaacttttgtacttttgacgagggatttctgaaaatatgttgtaattaacatttgacagataaacacatgcaatggtttctactgtgacactttcactcccaataaaccttataaacctctagtttggacagaggcttggagtggctggtatgtgtaattgtactatgcaattcttctcagtgtattcttagtaaatgagaaatcaactcatcttttgtttgtttataaaaaatatatgaaggtttacagagtttggtggtccaattcatcatagaccagttcaagatttggcatttgcggttgctcgattcattcagagaggagggtcatttattaactactacatggttagatttttctctataacatgttttggaaacaaaaattttactaaaataaataatgcaagtcttatttgttctttgttttcctcaatgtgaaacagtatcatggaggtacgaatttcggacgtacagctggtggccctttcatcactaccagctatgactatgatgccccattagatgaatatggtgagaaatgatatctgagcttaattctgcaagtgatttcctgctgttatgatagtacattgtaagagttgagcttttgcatggctaaaaattgctgtgctgctatttctgataggtttgattaggcaacccaagtatggtcatcttaaggagcttcataaagctattaagatgtgcgaaaaacctctagtttcggctgatcctatcattacttctctggggagtttccaacaggttcttagcttcaaatcttttactacaagattcacactgtttagttaattagatagcttttactgacttcgggctatgtttggaattctagtctcatgtatacactgcggaaaatggagactgtgcagcttttctctcgaattatgataccgagtcagctgcaagagtgttgttcaataacatgcattataacttgcctccttggtccatcagcatcctccccgattgtcggaatgtagttttcaacactgcaaaggtatattaagctatgaaataaaacctagagctttcccccaaaaggctttaagaaaatgtcataccaatttcctgcttttttttgtcttcagatcggtgttcaaacatcgaaaatggaaatgttgccaactagttcagaactgttctcatgggagagttacaatgaagatgtttcttctatagatgacagatcaacattcacagctccaggtctcttggaacagattaatgtcacgagagacactagtgattacttgtggtacataactaggtgggacttaaagtgctaatgctttacatggttgagatataaaactctttattgcgtttgtagatattaatgcaactcttttgtttctcaaatttgcaaaaaaacagtgttgatatcagtgcatctgaatcgttcttgcacggaggggaacttcccactctcattgttcaatcaacaggtcatgccgttcatgtcttcattaacggacagctaacaggtaaaatttcgattcactttgcatgcattttctgttatttagtcagtacggagatttaaaaacattcttctttgttttcttcgtaaaaaggttcggcctttggaacgagacgaagcaggagatttacatataatggcaaggtcaatctacatgctggagtaaacaaaattgcacttttgagcgtcgctgttggattaccggttagttttttttccataattgataaaagtatagcattttatttgattattctctgatcgaaaatcacatttattttttgaagaatgtgggaggacactatgaaacatggagcaccggaatccttggtccagttgcgctggaaggactcaaccaaggaaagtgggacttatcctggcaaaagtggacctatcaggttaatgcatttacttactttgacatcaaaattgatatgaactgttcgatgaaagctcattgcttttaatttatacagactggtctgaaaggagaagctatggatcttgtctctccaaaccaattttcggctgttgaatggatgagtggatcattagctcaacaaagaccacaaccattgacatggcacaaggtaatgctatgcaaccgaaaaaaagatgcaatcttttttcctgttgtgaacactctatccaaatacttacaaaactttgtctctttcaactttgcagacttattttaatgcgcctgaaggagacgagccgcttgccttggacatggaaggaatgggaaaaggacagatatggattaatggccagagtattggaagatactggactgcttatgctaatggtaactgcaacgaatgccattacgctggaggttttaaacctcccaagtgtcagctcggttgtggacaaccaactcaacaatggtatgattgaaatcgaaaaatctcatgttaacataaaacaattagtgagactacctttaatcaccatcgccaatactttcatttttcaggtaccatgttcctcggtcttggttgaggccaacacagaatctattggttcttttcgaggagcttggaggtaatccttcaagaatttctcttgtgaaaaggtcagtttcaagtgtatgcgctgaggtcgccgagtaccacccaacaataaagaactggcacatagaaagctatggaaaatccgaagagttccacagtccaaaggttcatctgcgttgtaatcaagaccaatctatcgcttctatcaaattcgctagcttcggtactcctttgggaacctgtggaagttaccaacaaggaacatgccattcacctgcttcatattctgtcatagaaagggtaacaaaatggttaaactttaaattacattgctttccttagaaccgaaaattgaatcattttcattcttcatttttttcacagaaatgcatagggaaacaaagatgtgcagtaaccatatccaatagtaactttgggcacgatccatgtccgaacgtgttgaagcgtctgacagtcgaagctgtttgtgcaccaacagttggagggggtaattaagcacacaagagaatgccttgctgtgactactactactactattactacttgacaacatagaagattagtacagaaagagagagagagagagaatcaatgaagattggaatgaaccaaacataatttagttagatggaacttgccatagctttgtttaagtttctgagagtgtttttactgccaaaggcaattagttgttgatttatgttggataatgagctacctaccctttagagaataggttgttttcttttctttttttttttcaagaaaaaagtttgtacatttcttaaggtcctacaatttttgggtccttaagacttaggtagggagagttttcggcggccccggtccccggccttttaacgggttattggcaccgggaaatgaggtggtgtatgtttattgagtgatttgttattagttattctgttttattttattcctggggttacctaaaacaaagtaaaaaaaacacaataaccccagtttggatcatcttaggaacggttcctaggatgaccatattgtttgtatgtgcagtgcagtaaactaatgaatgaattttacaagtgcttttctccatatttgtcaaaccaattgctaaatgtaaaaatgaataagatttagaatatatgtccaacaaattgaaaacattaatgacttgttctaaaccttgaggtaatgggtattttaaggtattaagcactataagagatggtaaaggtgcatttttagttttatacattttgatttaacaaataatataaaaaatcactaattaattatgacacactaaatcagtatagtattgagcacgttaaggtggcaaataacaatactcactactgtattccacatagtggagacataataagtaaaaatataacaagctcgcattttattttaaacgagttgggtctaaaaataacaatctttataaaatttacttagtatattggggcttttttatttttatatttcaaaatagtttttttttattattattattttttttttttgcatttttacggaatttta

SEQ ID NO: 225427 - DNA, 2985 bp, Cannabis indica
gagagagagagagaagacgactgaggtcgtgatggtgaaatggcagagttcggcgagagtgagaggagggtcgaaacaacacagtttgatgattcgattaatcgcaggcagggacttttaagagaggagtcgatggacatgatctataagagaagttgatgaagaaaagtgtacatacttgtgaacaactatgtttaatctcaaaggtattttctagttagttttcacgagatctactacacaatttgagattattcttgttatccgcgttttcggcattgaacacatggactccagatcagcattcaagacccatcagtgggaccctcattaaaggaaaaatgggccaagcccatctggatgttaccttccaggaatatgttatggttctacactcgcaaagtctttcgccttcagcaaaccgtgcacagaagacatggccgttagcacggagagacaagagagcattttcgcggaagaccttttcagtttcctttacatttttgcacacaaataagcaaactccagttatctaatcacaacaatgtattgtatcaagatcaaaggggaaattttccataacaaatattgtgcaattaattcagattaattgtccacaattagtgtacgcagtgttagccagatcagtccaaatcttatttgtctagtcagcagattatattctcccttgctggacttcacgagaaagcccatgagtattgtttattgtaaactcaccagtagagggaaataagaagcctaatataattctcatactactataaatatcccactaatcttatggattaaggattgaactctcatgtaaactttgcttaggcaaacttgagaacatacattctgtgcatttcctaaggcatttacaagtaaaagacttatcgaataatattgacttgtggactaaggctagttaactctccaaccacgttaaaaactatttgtcttattttgtactttctcttttgattatttattcttcagttcttattatttttatactgtttacgaaaaatcttggtaaataattctaatttctatgattattaataaaggatttcctacttggatttttactttctcatgaatgtctttaaaaggcttttggaacaaaaataggggagatgttatggaattatagtaagggaacaaatactagctttgctatgatcattcaggttagaataaaatatgattttgattgactatatatatgctctttaaatcttacataaaaattattacaagacattgaaattaaatctgaacttgctttaacttgtatgtgtgttctggtatctataaaaataattttaggatagtatgagacatattttgattaatgagatctcttgtattcttatatcttgtaatatttgtagtttaccttgttatggaagttctcacttgcagaaaatgctttcaaatacaaataaagaacagggtgaagagattaacattcatgatatattgggtagtcctgctaacattcatgatatattgggtagtcctgctgcttttgagatatgtacaaagctttgctatagtgttgagtaaattacacttataactaactcttatacaaatgtccacatcagcttacaacatgaaaataacataaggagaactaaacctagtggctttacctttacaagacaagaaccaaaagttagttagaactgaattgtaactaatttccaacttgagcaattatttcatcttgtctacaaataagagacacaagagaagaaatttacagtgtaatcaattacaaaagagaaaaacccaaggtcgaagctttagctcaaagatccaaagagaaagggtccaggcagagagtaaaactctcatggtgagaaggttaaatgaagtgagagtacacacaaaagaaaaacagagttagatatagaagttaaagacagaaaactgtaaaagataaagtaatcaagccttacctgatcgattcttatcacaagaagctccaaaatttgtaatcgcgattgttgatagtgaaaactcaagccaacctctgagacaagcttgacaaagatgtagccctatttttacggtaaactctaaaatattttaggtgttttctcttcttttttttttacttacttctctgatttttgatctgtgtgtctgtgtgcttatatcctaaagtttctagttaggatcgagaaagttcttctcaagaacttgctctgctagggttttgaagactgagtaaaagtgtgattgtgtgtttgctttgtgtgtcagcgcttcgagacacttcttgaaaagtctcttagacgaagtgttaaacgacacaacttttgtggtcgttttgctcttgtgattgtcgtttgagtcaagtttcaataaaacatttgaaaggtgaaaatagaccttacactgataatgtgttttctattggtgtaggattagacaagtaaaattcctacagtggtatcagagccgggtttggcaaagaagatcagcagaaattgaagcaaagattatctgcgaggagatagacaagaaatcttaaaagaaatattaccaagaattaagaacacactcaaagcttgaagaaactcaaaactcaaaatctaatattgattctgagaaggaggtgaacaattctggatcagagtttagatctagaaaaggatgcaaaaacatcacaaaacaacaatcaatctgagaattctaaaactttactcaacctcaataccagtttcggtgactttcttggcaccaacactaactctgcacgacttttttggtactagtgacaactccgacgatcattatagtttcatttttaaccatatatgttaagttttttttttattttaaatgtcatattttgtcctatgaagtttctttgccatatttatgtaaactaggtttcttattacaatatttatggaaataatcctacttaataagcaatgcaaagcctgttggaatttattttac

SEQ ID NO: 225428 - DNA, 1686 bp, Cannabis indica
attacaaattattttattttttaattttaaaattgaaaaatagaagtgactgtaaagcatattttttgtttttcaaaaattttatttttacttttgtgaaataaaaaatttaaaaataaaagtgttaccaaaaactttcattaataaatatttactaaatattaaaaaaataattacatttaaaaatgaatgatctaaactgttagaattcagtgtgtatataatttattccttggaccaataaaaaaacttgttaaaatcctataagattcatgatggcattaatagcatttagaggtgaatttccatcccaccaacacaacatctacaaaataaagaaaagaattagattaatctcaaatactttaataagtgtatgtaacttttcatactataaaaaatatgagaataattgtaggatgtaaaagccagaacctatctataaagtctccattgaagtatcaccattatatctactttttctttagaccaataagataactactagtacaacagaaccaaattgtcattatgtccaaaaccgactatattacctttacaaaactaaaattaaccaaaacaagtactgatctcacaaaaaaccaatcaatcaatataagaaatttaattttttatgtatttgttaggcttaaattgttacactagacataagtatatttaaacttgtagaatagattaatttttcattaaatctcaaaataccctttttatatttcaaattgcatctctctcttcctctattctctctcgttctttcaacggatcccaaagcacccacgaccaccgagcaatggaccgaagccaacccacgaccatctcaaggcgccactccaacccactgaccgccgagctcctaacaatgttgaaggtaagcttttgtagtcttttttttatttattttttttttcattgttttttttttagtgatttatggttttgagattattgataggtatagatttaaagttaaaatgtatgtttttatttgtgatttgtgaattttgttagatttagggatcaatttcggcattagatttggtcagatctgttatttgagcgagaacctggtttttaagtcaggcctgatgccggtctgatactagtccgatggctatatgaagttgaaaagcttttaggttgaagacgtaggtcagataggggtccaatagttatccgatattgtagttaacaaataatagactcacaaagagtaaggtcgatcccacgagaattgtagttaagtactttaaaattaaacatttacttctatttggttatgtcaaaattaagagaaaattaaatttagaaaacaataaagaaacaataaaaataagaagcaaataaatcaataaggaaattaacgatgattaaaagttagggctttcgatttcaattgcatttattgattatggtttaatatgattctattcctattaccaaattcaagaatacacttggaataaagcaaattatattttaattgagaggttatgactaaatagagttacactaaaaaaatgaaaataccaaaaaatattaatgcaacaataataacaataaacaattattaatactatatcataatagaattatttttgactaaatatcatgtttatacatgtaatacaatttgaaacaaattattaattttacgtaaataaattt

SEQ ID NO: 225429 - DNA, 6079 bp, Cannabis indica
ttttttaatttttggtcaatgtaaatttttctttagtaaatactataaaaaaggattaagtacagttattacatattgatataacaaaaatacaagtattacatctaatttgcaatttgttttccttacgaaagaaaaaacatgtagtttctttctgaacaaaactacgcgttttagttggtggtcgctttcatacaaatgttaatcgatgttgagctacttacaattacatctcaacaacaaactaaaaagaaaaaccattagtgggtgaccccttccaccacaacctttgtctaaggttctttataaatttcttattttgttcttccttatgttcctttttttgttttaattgtttacactggaaacttatctaagaatatattttgaaaagaattatatctttggtttgaagtttcttccaccatcattttgaacagtttcaattctattatagagctataaagttgagagtcttttatagttgcttagtgtgcattataattgttcgagtaattattttataacgattaattctgtaaaataattatatgtataaaaaaaggttattttattttatgaatattaagtcaacaataagttaataacattttaaacataaacctttatttagtaaaagtcttggaaatggtccaaatccggttgttggtagagtcataattcaaactgaatggttcaaaccaatataaaaggatttgggtaagttttttcgtttaaaggtatgtcatagaatacattttgatatacttttgggtccatcactctaaatgatgattttattaatttatccttacattttttgggaaacacgcttgtctgactgagcataactaataacataaaagccaatttattatcagtgatctgtgccacctgtttggaaaaagtcctctgtgtgagaatataacaaagctttttcagcccagcaaatttactttctgtgattgtctttcttcttcttcttcttctaattcacagacaaagttcatcagaaaaccaatatttctggtccttgaagaagctatgacaaaaagcaaaattttaaatcacttcactttgttgttgatccttataatctacacctggtttctaaagggagtaacctcagaagaatacatagttggtgatggtgatgaatggaacagccaaggcaactttttaacttggtcaacaaagtacaacttcactgttggtgatgtgcttggtatgatctttttgttttaaccctttaaatgttttattccttaaaaattatgtctgctatcatcttctaaaaacaagagtaaaagcagaagtcaatattgctttgacagagaaagtaaaatctaaccaaaccaattgctcctgaaaaaaacaactttgcttggattggaaatcaaatgtttttttttcttgttccacctaagatattacatgttatgtagttttcaagtacgtaaagggacaacacaatgcatatgaggtagatgagaaaacgtttcgatcatgtgatgcgagcagcggcgtgttgacaaagtatgagagtggaaatgataaagtcaaactcactgaagccaagaagtattggtttatatgtaatgtatcaggccattgctttggtgggatgagatttagcattgatgttaaacaaggtaataatccctcttctgatgataccaatccaaccacagatggttctccaacttctcaacctgatgagctgccagcagttccaccttccagctctagtagaagcactttgtccagtgacacttggaaaaatgggatttacactttggtatttgtgatcttattcaaattgttttattaatgaaatcagcaagttttttttttcttgtaattgttgtgcatatatagtaacattctttcagttcataaaacaaccactgatctttagcttcccaagatttgtagacagtatggtgttggggaagttagtgtatgatggctgaaagctatgtatttggtacatttatacatacacaacgcacatagaactttattggtatgtctgaaataaatttttgtgtaatgatcaagattattagcaaagagcacaagtggcacactaagcatttaaacatataatgtgctttttctatttctgtggaccaaacaaaaacagattctcagcatcaaatctgatacactttgctgagttacactagagtactaaatatatatgacatattgaaaattaatagattattcagtagaaatcctgcttccattttaaaacaattatgttttttaagcttgaagtgaattgagttcttatctcatttgaagaactgtaacttattatgaaatcaataagagggctggttgtgaagatggtgctgatagtcaatgctgctgctattatctgaaactttagacatctcagacaaacctctagaaggattccttgtcagctccagcaagaagtctctcaagtgatcagcttggactactattttactgtccttcttctgaatccaaaaattttaagcaacaaatagtagtttatatatgtagatgtgaaagatcttgctaagaaaaaaaaattgattagaagcattctacctctactttaagaacattggaaacaaggtttcgaaatgtagtaacgttggcattagttacttcaagagctagagaattcaaagcctccatcaatctcacaaatcttccaggcttgtgctcacagaataccttcacaaagaactcatttccatctatttgagccacttccacttgcggctaaatttgtttcaaacatgttattatgaagcttaaaacacaaatatatcagaacgttaagaagagtagaagaacttatgttacctccatctgtggtgccttgtcattagttgtatctgagtcttggttctgctttgagatgcttccactccttgatgtttccaaatgaaattcattttgaactttttcatgctcaggcctagacctgaaattagtgtcgtcgcgactcaaagtctcagacagaacattgtttcttttaccattaatgttggagtttaggccatcattgtctgattgctcctctagctcatcttgaagctcttttgcctgactctgtaagtcttttacatactcaattgcatccccaagtatggaggctctgtccaactgtggaacaaaaatgagatgaagaccttagattttacaactactagttccaattaaaaaaagcattaaatatctgttaccttagaaattttgggaaccaaagaacgaagagtatagagcctttcattaagcttcttccttcttcttctctcagcaaaaaggttcttgcactgatctgattttcctgattttctcctatactttccattatcctcatcatcaatctgatcactacaatccgagactgaatttgatcttccttcttcctgtttgttcgagtccttttcattaccatgctgctccttgttttctgttacttgttccataaattgcatatgtgtattggttgtgtcattcatcatggatggctgcatggcatccattgaagaatccaaatgcttatctggatgtaccgatggatcatgagaacattcaggaaaggcagcatcgttcctggtcctactttcagaattgtaaccaaattgctgcaagctcattggggaattgcatagacgagttcgatcaacagatacatcataagacatgttcaggttctcaaatgctgtggaatttggtgccggcagattattgttggaatccattttgtcagtttcattgcccgaaaatggccttgattggctttcattcattacattaatgttgacacaaaagcttgtgtccatattgtttgtgttaatcagggcttcctgctccatcaaaatattgtattgagttgtgatgaagtctaccacattctgatcttctgatatctgtcaaaagaaactctattataatacttacttggactgaagacaagagaaaatgattatatgaaaagacaaatactcatacctgtttattcacaaaaagctctaccaatgcaactggcaatggaatcaaaaccctggtcccaatagattcctgcaagttaatatagcttttagacaatggttgaaaattagagaagggtttagtttcaaaaacaacttacctcgagagcatgtgagcatgtgacagttgaaaagtttaaccagctgggttgattggagaccaaggtttgtgcataaattctgttcataaccttgtcttaagtataggtttaggattcataacataaataccagaaaaaaaaaatcatttatagtaaaaagctaaacaaaagaaatggttagtaccctgaatctgaaggcattgaagttggcaattgggcaagaagttcacaggaattaactcttgggtgttgacatatggtatccctgcatggaaggactggagaaactggaaaaatcagctcttcttctcccccattttgtgtgttttcagtcccagcacaacagcatctcatccactcaataaacctataacaaatcccaaaaagtaacatgaaaatagacacacatacacgtatcatttaatttagttagtcatggacaatttctctaacctttgatcttcacttagtttccagagaacacaataatcccatcctttcgagcccactagagctctaaccctctccatcagatactgcattatcaggtccatattacctgcaaaataattgagaaaaatgcaaacacttcaaattctaaagaatccctttttctttttcttcttcttttctttattactaaaatgctaatcttattatgacactcacaagtaccaagagagatagcaatgccttgtgttgttctcaagataaatatgcttaacacttttgactgaatttaagtattcatatgaaaaaacataagcagggtggaagaagcaaaactacaaggcagcagaaaacacaaaggaaaatctccatacaaactgatcaggtgacagaaactgatatagttgcaccaagtttaagctaagacagctccccccacctcataccaaagtacccatctcatccaataagaaagaaactaaaataacaataacaataaaaataaaacaactttagacccttttataagtttttttctttttttgaggttgggagctacttatatcggtaggtgaactgcagcctaagcatgaaagaaggagaaattttcatatacaataactaatattattattatatctaacttttcttgttatggaagattatataagcaaatattttaggaggaaagaattcattataaaaaagtatataaatatatattaagttagttataatgaatgagagcatattgcatgacctaagagtgtggcgtttgtaaccttaactaccttgaagtttttcgctcgcttgggatttctatattcttacatgtttcaactactctataactttggactagaaatggaaaagtactatacgtaaacaaatttgtaaaagaaaatccagttgttcccaatatagatgtaaaaggaaaaatgacaagtcttctccaacttgttggaaaagcctgaaaaagtataaactcgatcttatgtcgtttccttagaagtatgatgatgcttttgattgattgtacatgaatgagtagtagtcctaagatcgagtagtatttgtttccctaaaggaataataatgatatatttatcgattgattttaaaaagatttagaggaaagaaattaactaattacacaaggaaatgagttggtaatgatgagagaaggcttattgcatgacccaacttaaggcctacaaaacactaactaccatgctcaagtttttattaaattatattcatttcgttttggtttagtatattgcttcatgtttcaactactctatcacttattgtatcacatttgggaaacatacatcagacccttcatttagatagggaaatatattctggcctcattgtagtgattttgttgtcacccagccatttagttgaaattttatttaatcaataagttatccatttttctctatgtcctacactttgattgaatagtgatgtaagtcagta

SEQ ID NO: 225430 - DNA, 5549 bp, Cannabis indica
tgttagaattatttatttgtggactaatataataccataatcacaatcattaactatgtgcccaatatttattcactaccataatgggatggttaataattaataaatgtattagaggcacatgggagcaccctaaaactataattggcccattaaattatagtccaccactaattatactcattaccccaataagcctaatataaccccttagggttaagtattgtatataaaaagggtaatatgtgtttagtatgagttaagagagggtgtgtggtgaaaagaaaagggtttgctctcataggttctcttctaccaatttggtgttcattctcattgaaggttttggtgtcttagcaacaaaatggagaatagcaatatgggaggtatgtgttttacatttgtgatgctctaaataaagtattgattttggttttaatgattatgaacaatgatgtttaatgtatatttagatagttcataatctatgtgaagtttaacaattatttaataaattcaggaagtgacgatcgtcctttctttgctgcgatggtttgttgggctgtgtggaatgctagaaacgacatggcgtggaaccaaaagagttgcacaattgcagcggttggtggttcggcaaagaggtatcctagtcaatggcgaaaggctcaagaaaagaatttgtcatgctttaggtgatggaactgagtcttggactgcacctgttttgtatagtattaagatcaatgttattgcagcaacattctcttaaggatggcaaggttggtttgggagtggtagactggtagttcgtgatagttgttgcggtgcttcctgaggttgctgaagcgatggagtgaagctaagttagattaaagcttgatcttgacaacaggtttcagtggaaatggatagccttagtgtggctaaagcagtcaggagttcacttcagctacacatccttgtttggtagttttattgctgaatgtaaaatgctcttgtctgaaatggataatgttagtcttgttttcgtaaacctctgcgaattgtgtagctcactatcttgcgagggctgcgcgggcatgccgatttggtttcagcttcaagggctgattctagttgattaataaagtgaattttatgcaaaataaaataataataatgaaatattagacaatacactaaaaatcaattcagacagaagctcaatatattaattcctgtatgaacccaatatggagtatatcaaaatcagaccaaactacaaaaagcataatagaatctccactatagtttcctaagtacaaaacaaggaaactatcctattttgtcaactcaaacaaccagcaaaccattattgagttcttttcccatgtggaagtaacggaaacaaggtcaaggaatgccatggtgaagatgatttccactattttttgctttaacagttggttttaaactcctggaataacaaagaaacagaggtaagtgaacagactgaataatactgtgttatattcctgattttcatgaggccgatcgcatgttcacatacaacatagcagcataggtaatgtgatatttcgaataagtcaattgagttgtgcttgatggtttgtttactgacattgctacaggatgtcatcgaagatcatacatcaattattaaaaggatagtgatagaagtgtttggatagggaaagagtggttgtttacgctctaatgtttctaacctttgaatcaactcggtcacaacatccctttaaacaaattcggaatcatgtagtaaacctctttaagcaatttggagcagaagtgtgcctgcattaagtacataatttaagattaacacatgaacactgaaaaagtaagaaattaaggtataagaagaacgaaagaaagagaaaacaataaaacaaaaatgtcctgaactagaaaaaggaagaagaagaaggtcttgccccaaaatttaaatgtcacaattctaaaatattaaatgatctatagaatttaattccaagcttgccattatagataagagaattgggtcaaaccctaccctatactaaccacccacaaacttcacagtaaagagcattctcaagtgagaattagttccctattttcccagtgttctctagtgaataacaacattgaccgttcaagtatttgaaattgcatgacaatacaatgacttctactttatcatgctgacagatgaacgtgattttcttttcacttacgcataaaagttgtaataatccaaatacaaaatatggtcaatcaaaacaccaagaagagcacaagaacaataggaaatgatgaaaatttcctcaccaagaataatgagcaggaatatgatcagagagatcaactgaatagcatgacgattatgttggatgtaatttcttgatctttggtatcttccctgacatatccccagccaactctgcaagtacatttcatttactagaaaacctagatttcaatactaggatactgctagtaactggagtaaacaacattcctagaaactgacaacctacatagaatcctctaaactcataaaaaataatgaaacatttcagtcatctcaaagttagtttttaagtttcactgacaattagcagaactcagaagtacttgtgcattcaagtctgtccaaatgaagtagtgcacatcattgtcatgtgcacaaaatttatctagattaatgaattgggggaatttccacgacaccctatcatgttacctatatgatatttgatttatttgtgaggatcagcattttccatcacgcaaaatgttatacataataatcatatgcactatagaatcaatatcagtacctgcgcctcatttaaagcttcagtggatgatggagattccctttgttcttctccatcttttaatctcttggtgtaatttctagcaaccttacctccataggcagtccataaatgactaaagagcccatatatatgctttctgctttgaaagtttctccacttgttctcatgggagaaacttttaggtttaacttcaccagcctccatgtcccaactcccatcttcgccacatctgttacgagaggtctctggaagagaatttattgcttgagtacccaaccgcgtagaacaataagatcccacttttctcatgttgttttcctttctagtgtcaatattatgatccatatggacatccccatcaatattcaggttttcaatttctttgcctttgtgatcaactttccgcaaagcatcatcttgtcgaccacctaccaaggttgaatcaagatatcttttcagtataccaccttcgtccaagtcataagcatccatctgcttagacggacctacaccaccacctcctactccagaaagaaatagtgccaacccatctctatcttcttcatttaagttaacccactcattatttttcacaggattacctattgatgtctcttccaagcttttttccacatgaattatttgttcccttatggctctaataaactgtctgtgccttgaaattacttcatccttcatctgggacttttctgttatagtcgaataactaactgctctttgaaaatcttccaactgacagaattaaaagcaaacagattgcttactaaactagaacaattaacaaaagaaacactatatgaatttaaaaaatgaaaatggtaaaatgctgaagaaaacctgccattttgtcgtttcaagtattgttgcgagatcacgtctatgaaaatttatagatgatagtaactttgggtctgggtgatcaccttgagctagactaagctcatggaacaaaagacggaaaattgattccatcctaaatgggaaacaaaaaaaaaaccattcaattgggtttcggaaagcatacaacaatagtttcaaaatcgtagagattatacttaggaaaaagcaatgtaaagcatttagtgcatatagaaagaatcttttaacacacaattctctttagcaaatacattattagtatatatatgtaaaggtttcatctttcgaatgtgaatgaaagcaaacgaagactaacctgtcagccgagtcttgaacaacttcagctgctgaaaacagagggtctgattcccattggtgcaaactcggcgccattgatatattttgttttcaagctcaaatacctttcactgtgtaccttttatatacacacgaacaaaaactaaagctaaaaaagacaagcttgaggttaaattgggtttttaggcaaagaaatccagctctgtaatcgtgatctgttataaaatataacgaatgattaatcaaaattttggggattagggctacagaaattgaattgggattttctttcaacaaaaaaggacaaaagattttaaaatattgaggttgtatatttggttgaacaaagaacgtgtgcagagtacacgtgtacgggtgatatagaaaaaaaatcgtgtaaggatgtgaacattgtctaccactataacaactaatcatattttgccacgtaaatgagagttttgagttagaaaatatgtgatccctactccatttgttttgtctaaaattaatatggttattggtacaattgaatatagaatctcacttattttaatttaataaaaactattaactaactataagatatcatattataggggtgctagacacattggtgccctataacaatgtttatttttttttgccatcaaaagccaaacaatttaaatattacaaaaaaaaactaagaataaggccataagcaaatcgaccaaacctttgtgcaatcaagagagcacaaactttgcaagagagtgagctaaaatgttcgtttgcataaaagaaatatcaacaaaattcttacaaagaaacccaatgacttttaggactatatcaaaagtagagattttgtggatgttctcgttgatagcattgtacacactaagataatttgactctaataaaatagaggagtaccctaatcatatggacatataagaaggccttgtctcatagccaatactttagcaacatgggatttcggtgtcaagctcaaagagaccacaaaggaccctatgacctaatcaaagtcatcacgaagggccaccctaactccaaatttgagaagcaatggatcaagaacaacatcaatgttgagtttgataaaacccattgaggggtgttcaatctccttgtgaatttgtgttggacaaatatccatgtgtttcattgccttgtgcaagttgataagaatctcaaaagtctatagaattgttaatcacatgagagtcagataatcacacaccctcgtggaaccaaattttccaacaaagaatagtaaatttttctaactctcccttagacacctctaataataagaaatacatagaacggttccacaataaaaggacttagatagggaatagacgtttgattgcctttaaatctcgacaacccaaaatggctactcattttagttggtcaataaaataattaaatccaattcaatatgcacgatcaaaatctaattcgtaaagtacgaat

SEQ ID NO: 225431 - DNA, 2892 bp, Cannabis indica
aaattattattactttttttctttcccaattctccttttacacacaataatgttttccccattctacccctttcaccaaccgcactatccaaccaactaaaaaaacttcaactatatcatcacctccccaatccaccatagctccttggggcctcaatccatttcccataacacaaacacaacacaacacttaacatcgatcaattctcttcatctcatcatcatcatcatcaaaaaaatggcactagttaccgaaataacaaagcaagaacaacaacaagacataatatttcgatcaaagttaccagatatttacatcccaaaacacctcccattacacacatattgctttggcaacaaaacacaacacgacctatctcacccctgtctcatctacggccccacaggccaagttttcacctatgccgaagtcgatctcaccgcccgaaaactcgcctccggtctcaacaagcttggagtcaaacaaggcgacgtagtaatggttctcctccctaattcaccagagtacgtcttcaccttcttaggagcttcatatcgcggcgccatgacaacagccgccaaccctttcttcacagctgcagagattcaaaaacaagccaaagcttccaagactaagcttatagtgactcaagcttcttactacgacaaagtgaaggatttggatcaagaaggattggtcaaattcgtttgcgttgactcccctgttcctgaaggttggtttcatttctccgagctttgtaataattcagatgagaacgacatggctgaggttgaaataagcccagacgacgtcgttgcgttgccttactcgtctggaacgactggtcttcctaaaggggttatgttaacgcataagggtcttgtgactagcgtggctcaacaagtggatggtgagaatcccaatttgtattacagcaaaaacgacgtcgttttgtgcgtgcttcctctgtttcatatctattctttgaactcagtcatgctttgtagtcttcgtgctggggctacgattttgattatgccgaaatttgagattggttctttgcttgggctaattgagaggtataaggtgagcgtggcacctattgtgccacccattgttttggccattgctaagtatcctgatctacacaaatacgacttgtcgtcgttgaaagtgctcaagagtggtggagcaccattggggaaggagcttgaagacacggtcagagctaagtttcccaacgtcacgttaggccaggtatatactcttttcattaattaatgatttagagtcaaatgtttaaattgaactcttaaaagatactattagtacctaatatattcttccatgttataccaatattagttattgggcgttctataactttaaaaaataagcattactatcaaggaccaatagtgtctaacatctctaaattttttgtcttacgattggttagcgatactctttaaaaattattacattaaattatatgagaaacgatatttaattagatcaatagcaataatgatacataaaaaaattctaaagcaccgtagtacttttctctaaaaaaaaataatttaaaagaatattactaataaattataaggcgccatgtgctaggcaccaggaattgagtattcaatttgtattttaataatgaattatattaattatatttgaattattaaattagattatttttaaattttaaaatattttttatttctaatagtatttattataagttaattttaatataatatttttatttaaataaaaaatttaatattatttgaatttatatttaatatttaatttaaaattagtttaaaaatagaaatagaaaattcaaatataaaaataaagagattattaagaatagtgaatagagataagaatgtccatagggctctttaatattttttttttgaaagcagtgctcttgaatattaaatctatatgaaactgctaaatacatataaaacattagtaaggagtattatatagttatcgtacaattcaatgtaaacaatattattttactttttttggattgtgttggcgcattagagtagcaaataagtgatatggttaaaaaaatgcaatgtaatataataattttgttgtttctcaagttatcactagaaaaaaaaaaacataaaagtagataatccactcaaggaattaaaatgtatgtatagtgcatcaaacttttttagttaaaggaaagttgaaaaacaaacaagttaggtgtgtctcaatgtttgaaggaacacatttaaaaaaatgaaaattaaacagtcaacacccaccctcgacccaattgaatattagaatatatgtgaatcagaggtgagtgagcatgatatcattatcttaaaaagcttggctatagtttaagtgaaaaagacaatatcttgttttggtagggcaagcaagatggtaaagaattaattatgaaatatgacataaaaatttaactagccaaattacaggacaaatgtcatgttgttggtaagttggcacctaaatatgacaccccacacacactatactctctatagtcattaatgtacatatcactctcatattaaaaacaattattttcttcatttcaagaaagaaaataagggtcaaaactatgttatccaatacgctacattatgaaagtaattaatgtaataaatatttttggttattagggatatggaatgacagaggcagggccagtgctaacgatgtcgttggcatttgcaaaggaagcttttgatgtaaaagctggggcttgtggaactgtggtaaggaatgcagagatgaaaattgttgaccctgaaactggttcctctttgccacgtaatcagcctggagagatttgcattaggggt

SEQ ID NO: 225432 - DNA, 2402 bp, Cannabis indica
atttatatgtggtaaattaagatctaaggtgcccacacaatcttgaggtgtagggaacactccagaagatctaaggtgtgaatattaattttcatcaagaagtgaggataggaagaccttggttttatacgaaaagaatcgaggacacttgataggattcaagaggtatatgattctgaactttatatgtgatatttgcatgcataagaatgtataggttgtgtatatatttatatgtatacgtgtatatacatatatcgacatgtgtatactttgcatgattatcattatgatatactaatgagatttatgatcttgggtaaatataaattgtttatatcatgagtagatattttttttttgatatatatgactatatacaactactcaacattgaattctactgcataaaatttgtacaacctagaacttgagcatatggtaattgagaagaaataatcttgatgaagccacttgaaggtttccaagagtttgggaagaaggaaaaggtttgcttgttgagaaaatctttgtatagcctaaagtaatctctaagatagtgggataagagatttgatgactttgtaactagatttgggtttaaacaagcatgatatttgtgtatatttcagagagtagaatggtgagttactttatatactattatatgtagatgatattctcttggctagtagaaatatacaagaaattaacaactcaatgtgcaattaaagagggaatttgatataaataagagatttgtcactagctaacaggattttcgacatggatatcaaaagagataggaagaaaaagactacttatggagagtacttaaaacctttggagtgtctgattccaaagttgtgcttacaccccttgctcaacaattcatgctaagagttacacagatgccaaatgatgaaaatgattaggttgagatgtcaaaggttccctatgcttgtgttgtagggtcaattatgtatgcaatagtttgcattagacattagttatgtattgagcattgtaagcagattcatggtgaatccaggaaaagagtagtgagaagatttgaagtggatacttaggtatcttaaaggaaccaatgaaaagggtttgatgtttggaagatgcaagagagaagatgatcaaggtatagtcattggctatgttgaatctaactatgcaaaaagcattaacactaaaaaatccttgacatgatatgtttttgacatgtttggcattgttgttagttggaaagcaaacccaccaaaggttgttgccttgcctacaatagagtctgagtatacaacctcaattggagctatgaaggaagttttgtggatgagttgtttgactaaaaaattgaagattggacaaaaggtgatcactgttttatgtgacaatccaagtccaattcagctaactaaaaatcaagtacaccataagagaactaagcatattaacatcaagcatcatttcgtaattgaaattatggagaagggagttgtcaacattgagacagtttctactaaacataactcctcagacatgataactaaagtagttccaagcaacaaattcaaacagtgtaatggagttggttggataagcccttgtggctgaatgaactacagtactatcaagtttgcttacctcatagcaatttgaactaaggtggagatttgtggtaaatggtcacaagttactatttactatgcatagttaattgtgagttggacttctaaatgaggctcaggactaagttattttagttaagatttgacatttctattaacttataaatcctattcatttgttagcttagtctatttatataatgtaaaacaaaaaagactagagagagggttccatgcattagagagaaaagttcgttttgaagatgataatggatgttgttcaatcgagatgtagaacattgcacatggatcgaacttgttaagttccgtgttattctcttactttcttgcacttattttttttctactataacaaatttttgttgtaattatcttgttgaagttgtgtttggttgtgtataaactttgttgtagttattcttgattgaatcaagacaaactacaatagttggatcaattggtttacgacattcccatttttattcctaatctagtagacactattaaggtagcgtttggttagactatactgaaatagtaatgaaaacaatttttattccattcatttgttttgattacattttaaattttttaatataatgtagtgttgatgttgcccaattagtttacactgcggtcgcggtagtaaacgaggctatatgtcgtatccatagggaggaaaaatacactcaaaaggacagttagtaattttacgagaataaaatatgaaccttgaatgtg

SEQ ID NO: 225433 - DNA, 2475 bp, Cannabis indica
acagtatttttttaaaaaaatccgccccacaatatgaaaggaaagaagttgaaaagttcagtatgtggtgtaattatctcatatagtatgcattttatttaagtataattctttcgtctcatagagatgtttagatcttcaatggacaatttacctttattgccctttatttggtccaaggcctaacaacacacgccactaaaatcataatctaaacagtaacaaataattcattgtatagtttatttacctatttggcgccaaaatccgttaatatcataatccaaacattaactaactaaactactttataaacattaaacaccaaccattcttctcatttcccattctctctgttttttttttttggctctattttcatcccaaattgaagaatggagccccaaaactcattgtacggaacactagtcaaagacatgaacaccttgtcactcccatatccactatcaaccatcattcgaacacattcaactcaattcccagaaattctttacatcagcgacataattttcggggacaccaatgtccgccgagttaggccggtcatctccaaccacaacggccttgtcaaactacaaggccgcgaatggaacacatttgttcgagatcgcggggttagagttggagacattcttctcttcaaactcattttccaaatcgccccaatcatcaatgacatgattatcaatgtcacattaattcgattaaacccccaaaattacctcactttcactcctctcttaccttactacaatcaagaacaatttcgattccatcatcgaaattggcaacaacaacaagaaccaattttgtgtgtgaaaagattgagttttggagatgtgtgtggtactcttgatcatgatcacaaaattgttgtgcctaaagaaatgtcacaaatgattatggcatcagaattggatcttcttgatttgagaaatggtaatttttgggttgtgttgagagaccaaacacttgcgaatattaagattttaatgagtttggttttgagtgatgataataaggttttgtttggaagttataattggttgggttttgtttatcatcgtaatcttaaagctgaagatgttgttgtcttctgttttgatcttcatcaaaggattatcttcacaactgtttatcgttctcatcaatttcttgattgtatcattccacttccaccaggaactcaaattattttttttaaatcttgattttatatttatgtattatgatcattagcagtatgtgaagaacaatgaaatgtttgaattgttagtaatagaagaatatgaatttttctttattataattttcaatcatattgtatgaattttttaccatatttctacataccatgattagtttacctttgttttatgttattattgtcgttttacatgtttgtttgtcgttcgtagacaatgtataattattctatttatttagtacattacattacatgcttaaagatcaatcatgtgatgagtgaaatgaggaaacgcttaaatggccatagggggtgcgtgtgtgttggaggtcctgggttcgagttccagattatgcatgttgtaatatataaacgcttaaataaaaaaaaaacgaaaatgagcaaacaaaacactattcatttaattattattattattaatattagttcaggaaaaaaaaattattaataatattatctaaagacatggcttagttgagcaacctctcattttcccatactatagaattattaattttaagttaatttggattaaaaatattcagattgttaaaaaattttcttaaattattgagatttttagatttaaagatttttgtctaattttattaacgaaagtctgaagtgaatgaaaatttaataggtaaaattcagtacatgttaaagttcaagaggcatgattttgtaaatatcaaagtttagaggcacgatttagtatatggacaattagcatattcgcaaaatcaaataaaattagataaaaatccttaaaactaacaatctcaatagttcaagaaatttcaatggcctgaaaagttcagaggcatgatttggtacatgtcaaagtctaagcggtaaaaatcttaattaaccttaattttaatagcggtgaaatttttcaatccaaaaattttaagactatataaaattttgtatttttttaacatgtggtacagtgcagtttgaaccacaatatcaaaatttaaaattacaaaccacaccacaccaagaaaatttcaaaccgctttttttatggtatgggcaggttactttaagttaagaatttattgtaattcaattcaattattgttaaaatctaatattaagtttgattaaaatttaatttattgtaattaaattatgctcaagtgaagagacaattagcaaacttgtttaatcaaacacacaatgatttcccaactgttttttttacctatctatcctat

SEQ ID NO: 225434 - DNA, 6305 bp, Cannabis indica
aaaaaaaaaaaaaaaaaaaataccaacatagcatagttgtaactaagagcaaatatgtactaaatgttataaagatgaaacaaaagacacaataaagtaattaaggattcacaatttttcatactaaaataataattagggatgtttatctaattcaatcggtactattttgctcatagtgtatttaatgcgcactaagtataaattttatattttggatccaatccaatccacacaagagttcaaatttaatctgaaaaaatgtaaattagattaattattttggattggtcattttttaatattaaattatttattatttatataaattattttttttcacatacctaacaacaaaataaaataaattattgtgttttatgtctccaacagaaaattaaaataaataaaacaaaaagtattaaatttaaaggaagaaaaaaaattgtttgtagaaagaaatacttaattttgttttaaattatataatctttatatataagaatagaatatatatttgatatataaattttgaaatgtatttgtagtattagatttttaaattattatctttcatattaaaatattaattgtatataattttttttaaaacaaatataaatatgtgtagattagattatatcggttacttttacatgtcaattaagattcaatcagcacaagtacaaattttaaatttttcaatgcaatccccacaagtgtggattagattggatcgtacggattagattttccaaactaattcaatccacacaaatgcactttgtgaattgaattaaattaaatcgtaccaattaaattggattgagtcatagatgtacagattaaattaaattgtgtattctatgaacacccataataacaattgttacagtgtattataaaattacccaaacttttatatagataaagattctcataggtctaccttgtatcaaaattcccaagcatatttgaaataaatgaagtcattaggagaataagagtttaattatttctccatgatattttttcttatatattgctttgtgttttgtgtaggtaagctcacagttgtacatgcagaagcgataacagttatatggtagcacttgattggtctttgagtttgtgtattccatttagcactgtagaattagattgtttagcagtagtgtctacttttactagaaaatcttctttttgtaatgatttagaatttgtattggatgaaatctatagtttcctattcagttttcttgggacgttcctaatttatgttcgtcgctcggtcaatatgactacacatgaattaactatgcatgcactcataataaatggataattttctattttatctattggatatacttaactctctaatttttatcaatgaaatgctattaaaaaaaaaaaaaaaacaaaagagaggtacaagagaagtgcatagacttgagaagtagggcgaaaattctctttgagaaaatatctaggaagagaatggaacccactttccaaaacaccaaatatgccttttcctattatagaaattcctatagctgtcaacttcagcaatcagattcataaacacccatcaggggcaaattcgtaaattcatctcacaaatgtcacttagtgccccacttaacgaccctgtttttttctttgactattttaataatataattattattatatgtatgtatgtatgaatgtgtatgatgaccatgaataataatattaatattaacatggtgatgatataggatgacacctaagcccatgaggcgagaggaaaatatcaatgccacgtgtgcatcaatcttagcaatcgatgatgaactgagaagccttctaaagatctcctctttctctctctatatctctccaaaaactactctctctctctctctcttaaaaaaaataaaataatttctcagaagaagaaaaaaaaattgagggaaaaaagaaaaatctgaattctctctgtctcgtgtcattacctgaaatcatttaggaaaattattaggtcactggattaatactcaggtgagtttttcttttttcttttaggaaaaaaaaagcaatattttttggggttaaatttggttctgatcagttgttgaaatttgagattttttcattgatgggtttagcttcttcttgaaatttacatttttttttctctgtgtgtgtatgattttagctggttttgttatttattttttttatttatttgggcatttctgaaaaagatttttttttttttttgaggtgttaagttggtaaatttgagatttttgttggatgagttggttctgtagattgttgatggaaatgggcatattttttatttttcttaattttatttatttattttgatttagcatattgttaagattctaccatgtttatcacagaaaatccaagagcttaatttggaggttttcagaggaagaaagacttgaagttgagcttttgcgtgttatatagtgcaggattgtagaaatatagttatatatatacatgttgtattgatttgttttgatgaagagttttggttctgattggggatggtgaactatcagatttgggttcttgattggtggagcttgaggatttttcaggttgtgtttggttaaagctttttaattttactcaaatggctgccagtactagtcgtgagagatggattgatcggcttgagtactcttctttgttttgtcctccttcacaagatgcccaacaaagaaaggtaaagactttataactttaatctcatttctctatgtttatatctatatatacatacatagattcagcctgatgaaacttgttcacttgaataaattttatttgttaggtcttgaattgattctgcaaattttgtttgtttgatgaattaaatgaaaatacataaataaacagttgcttgctgtggttgacaaaagatcaattagtagcttcttccttttgagattagttctcctagtactcttttaggctcaatatttgatttgaaatttttggggatgtattcttcagagcccatcaaagatgacttttttctttttcagttggaaatgagttgtgatgtgtaataagtgatattagattgtgtacagttctatagtattctgtcatgtgtacagttcatctgtaatctttttccattacaattcttttcatcatggtttagttaacatagccgtaatgttttttgattcatccgttttattgattactcattcttttatgttttggaacttggattttttataggaaaaggttttagaaaatgaattgtttcatatcttaggaagaaaaaaatcggatgtatcagataattgaaaattcttccttttgctcgagaatatgtgcatcaactacctatttcttgttattatcttgttggttgacttttcttgttggacaaaacaacgcgaaaatgagttgagaaacatggtcctcctcttcgtttattaattttccttatctttgcatgtataggctcaagttattgcctatgtggattattttggtcagttcacatcagatcagtttcctgacgacattgcagaggtatgtttttttatgaagtaatggtcttatctatgctcaagggcttgaaagataattgttaattcttttcggataggagattttaggtgtttttgtcaattgctgtactaaaaatacatttttgttggcagcttgttcgtaaccgttatccttcaaaggaacaacgcctatttgatgatgtcttaggtactacttctgtacttttgaatgttttcctaatagatatgtaaactcttctcagaaaaggttttccaataattttgtaatgactaattgatgtaataaatttttgtgcagcaacatttgtccttcatcatccggagcatgggcatgctgttgttcttccaattatttcgtgtattattgatggcacactggtgtatgacagggccagtccaccgttcgcttctttcatatctttagtctgcccaagcagtgaggtatgggaagattaattattggctacatcctaatgatttaattcttctcattttggtaaactttatattttagttcataatggttttcaatgtttccccaagttttgttgtatcttcacatgtttttgtttttttaattaaaaaatgtaaaagaaaaagaacttcttcatcgacttaattggttttttttcttgaactctcctcagaaggaatattccgagcaatgggctctggcgtgtggggagattttacgaattttaactcattataatcgcccaatatacaaagtggaacaacaaaacaatgaaactgaaagaagtcgtagtggcagccaggctgccactactagcaacaatgggggttcctcctctccacctggttcgcagcaagagagaaaacctattaggcctttgtctccctggattactgatatattgctcactgcacctcttggcatccgaagcgactacttccgttggtgagtatatatttgattggtccagactcactgttactgtatgtatacataatattatcccgacattatcaacatttttgtgtcaattctaaaccaaccacactataccaacttaagacaaaaagtaaacaaagccgacttgctcagacatttctgtatggtcagatcataagctaaagcaacaactcttggtcttaaaaatgtagtttttttttctttctttcaatcattacctcaaagacaaaaatgaatatgttagattgtgtgagggtgtagacgattcacttttaaagctttgggaagttgtgttattaagatgcttaacgagttaggtctatagtcaacaacttcaaagagttttcaggatgtgtattgatataataatatttttgggccggggttgagggtgttggctcttaaaattgctcaaaatagttcaaatttttactgcagagaaggttttggttggtgaattcttcaagaaatcttcatgcaattattggttgatgcatagagttggttcttgattataaatcattcacaataagtgaatatctctttcatttccggatcaaagaggagtgctaacatgtctcttttgcactcctctcactacttgacatgtaaaatctttcgaaatattttgacgaattgacatagttttcacttccaacaagggaaaacagaatctagacattggagtaggctttccattttttgtttttttctcccttgcagatccattgaccaggctttcattttcattttatacgcttaatcatcattaattcactatgttagtttagaatcatcttcattaagtctaaaagtcaaaaaaataattctgtacttgggtttattttcccctagtaatgcttacatttctttgatgtaactaacaggtgcagtggtgttatgggtaaatatgctgctggagagcttaagctacctacaacaggtcagttaggtcttctcaagtatgagcgaaccatagtgtgggcgtttagtatttttacaatggttttgcttgaggtcacatatcagatgatgtttcatttgaaaacttgttgattcatattttatataatctcactgaaatttatcccctgaaatacatatgaaacaacccgatttagtagtcatatttttagtgtaaaagtcagttgatgaaattttggtgttatcgttgcttgttagatggaggaccaacttgcatgcatagaaagaaactatgaaagtaattactttatggttttactatctttgttcaatgcaattaaaacgattctatagtgaatgaccagtcttatccccctagaaaaaaattactagtggaatgaaatagattccgtatccaatttgtttgaatgaaatttagatgcctatacgtttgttgaagtaaaacatctctattttcttaacacagacattagaataaattttcccttttaaggtaatgaccaatattgattcgagttctttgttactttagcttctcgtggatctggaaagcatcctcagctgatgccatcaactccaaggtgggcagtagccaatggtgctggtgttatattaagtgtttgtgacgaggaagttgctcgatatgaaactgctactttaacagcagtggctgtccctgcacttttacttcctccacctacaacagctttggatgaacatctagttgctgggcttccagctcttgagccatatgcacgtttatttcataggtattagatggctctttgctttattaattaacaatgtcaaagatcatttcttaatgtccaacttggctttgctga

SEQ ID NO: 225435 - DNA, 2077 bp, Cannabis indica
atagtgacactttttgtgtgtagctggctgttactttttcagtctgacaaaacttgactttaaacacctatagtgacgcgcaatgagcgactgtaaaagggttaagtgatacgcgtgaagtgtcactaaaaattgtctttccagtcaccctcattagtgacgcgcggtgaagtgtcactaaataactttagagtcactcaatgtgtatcactaaaacccatttttctagtagtgagtctgtgtttgtgttctattcacgcgacacttattggatggagcagtgcttgatttgggctaataaatctttagctttacttaagtatgcgatcatgtttgacccttgggcttgatactcgtaaagaatctgattacacaactagctgtgaatctgtagatctggagtgactcagctttgattgctagtgttaatcgtagtttggctaggagtggctcatactctcctttgttgtttattatggtgaaatcaaaccgcaatgcactgtgagttaaaaatccctctagagtagctaagatgagtccaacataaaaaccatgcttcttggaggatccatatacatatagttacaggaaggtctagggtcatcctgagctgtagtctcatccgtgttgacctggtcttcacaaatcatgggattatcttcatcaaggccagtgcattcaataatgaagtctactaatgcctgctatttggttgttgttcgaggctagtaggttatctaaaattgacctagtttaactgcccatttgagtcggtgccctaatgcttctggcttcatcaaaactttcctaagtggttgttcagttagtaccttgactgtatgagcttggaagtaaggccttagctttttggaggctaggaccaagcaataatattctagcttttccatggggggataccttgaatcagccccaatgagatgcttgtcgatgtagtagactgggtgttttatctcttcatcatcatgcacttgagcagcactggttgcaagcttagtgatggccaaatagatgaatagttcttcaccatctattggtttagataaaataggtggcctggctagatgatgtttgagagcttgaaggcttgctcgcattcatcaatccattcaaaccccttgttgcttcctttatttaaattaaagaagggaacacaattgtcaattgactttgagatgaacttgctaagagcagtaattcctcctatcagacttttcatgtctttaatccgcgacggtgactttatctcttgtaaaaccttgatcttttctagattctctttaatctctcttgagttgacaacaaaaaattttctaactggatatcgaaggcacaatttagagagttaggcttcatttgatattcccacgggatgttgaagcattcctctagatctttgatgtgatcttcagatttcttggacttaactagcatatcatcggcatagacttccatattcttcataatttgattgtggaacatacggttgactagcctttgatatgtagcacccacattcttgagtctaaagggcattaatttgtagcaataaagcttgatgccagttcaaaaactagtatgctcttcatttggtgtgtgcatgttgatttggttgtagctggaaaaggcatccatgaatgtgaggagttcatcaacgggtgttgcgtccaccagttgatcaattcgtggtagagaaaaaaagtctttaggttatgctttgtttaggtcagtgcatttgatgcaagttctccacttacattttggctcatgcaccagaatagggttggatacccaaactgggtagaaagcttccctaatgaagttgttctcctatagtctttcatcttcttccttgagagctttggagagctctttgtcaaggagcctgcatttttgttgtacatgcctaaaatttactttgtctatgttgagggcatgaaagatgacctagggattgatcccgatcatgtcctcacgcgacaaggccaaaatgtcttgatttctcctgaggcaagccataagcatcttgctcaaggcctccatcatctttgttctaatc

SEQ ID NO: 225436 - DNA, 2214 bp, Cannabis indica
acagatgctaaaacagagttttcagctgtcacataaataattataattttttaaaaatacaaataattcattatcaatagctgtctgaattggggtatttttggaaagacataaatatccatagacctaaatttgatattttcatattaaaataataaaattgagattatagagttaatttgagtgagaaaattgacattggtcaccatctaaaagagaataaaaacaacatataggtcatgatctctgactatttgaccacttcacttacttttatttatttttatttaaatttaaattggtttttttttttttgtgaagtaagatagaatcaaatttataataccaagtcaaaaatttggcactgacccatttatgtgctgctgagtaaaaggtggcaacctacccccactatatcaatcaattttgttcaataacttcattcatacaaccaaaattaattaataataatcaaattataattaaacccaaaattatatatatttatagattaaagtagtacaacaatatttgcaaaatggaccgaccaaaatgccagcagctattacacagaccaaaatgttgttacaaattacaataatataattttggtgacttttccgaccaaaatcttaaaagggatgtatttttttttatataagaatattttcattttagttatttagaattttttgtaaaaaaaattaaaattattgcaagtgtcaaataaatttcaacaatttgttatagatatacgaaaaagaaggaaaaaaaatataattatgcgtgtgataaattctttaaaatttttttaccaaattagtaacatgaaaatattaaaataatggcattgaaactgtaaatttatagtcacagtaattttaatcccctggtgtaattttggttgctcttgcaaggtatataattattttgttaataatttttttataaaactattttcctaataaaaaaaaattatatttaaactttgatttctgtaccctaaacaatttgattatttaaaagttttgcataaaatcctaaataaataaaagtaacattgtatgaaatttgtaccagagagtttttcaattttaagtggaaaaaagatacataataaagtttacttgttgtggtgagaccttaattattgtgtcattaatacttgaatttggtgaccaccccccaaatctatttattattagttttagttttttttttttataaagtttgttgaatcacatcttgattgaaaaatgaaaaaattactaataaatcaaaaaattgtaaaaaaaaaaattacaaaaatatgctaatatgtaagaaaatttatttttacgctttagatttttttatttacaaaaatatattttttaataaaaataataaaatattttttagttattttatagttgtattatagttgttatgaaattattttttgattgttttttattattttatagttaatttattggtttctcgttatttttagttattttcttattttttctgagcaaaatataattttgtaattttaaaattttacaagcatatttttgtaaataaaaattttagaccatataattgtaaataaatataaaaaatgatatttttaaaattttcccttgaataaatatagtgtagatgtagggtgaatgaaaactttccatcctatttcaaaaaaaaaaaaaaaaaaaaaaaaaaagaaagaaaactttccatccaaatatgaagtttgcatctaatctaagaactgcaaaataatttatggattgtaaaattatattgcaacataaatgaaaaataattactttcgaatatttaggcaaagtttccaaaaaaaaaaaaagaactacaattaatttttaaataaaaatgcatccaaataaaagcttgagagatacaagaataatatataaatggaggaaaaaatcttaattgattacaaaaataatgacattgaatactttgtattattgttaagtaaagttactatttttattagattgatttttattatttctcacatttgcctattatatcacaagacatttaagaaacaaaagcttttcaataaatgaattatcattaattaattaattaattggatttaattatgggtgatgaattaaaaaaggtattaacatattactacatattgtattaaaaaaaatgctataaatagaaaataattaataatgagcttgatat

SEQ ID NO: 225437 - DNA, 1254 bp, Cannabis indica
ttttgtaagtttccctaattttttataagcaaatttttgagaaagaggttagaaatatagaaagaagtacttagcccaatcatccagcctaaaacgacatgtgttttggaagcaaggagtattgaatcaaagcccattatcaattgggcccatgaactctttatatgggccgacaaaccaattgccaaaagcggcccaacacttaaaaaacgacatctcaaactgtttttttaataataaacgacatctcaaactcaaaacacctcaatcaatcaatcctaacaaaactacttcgatcgaaactccagtttctatgagctgtcgtttaacttatcaaattcgtttaccaaaaaccaatagcttatcaccacagcaaaagatcgattcaattgcatatatacatacataaacttattgtatatataattatacaaaaatcacatctttagcattcgagatcaaaatatccaaaggtaaatcatttctgtaaagttctaatttttattcctctccttaattgaattctggtatatttgcatgttgatataaaaaacccaattcaaattcaacgaaattttaggtttttgaaatccccttttcccctttttcaatttttcataaaattattttatgggttttgattttttttttttaaggggaaatgaaaaaagatttgattttgatttaagaattgtgtttgaatgtgcagatgatgaaatggggtttatggattttggtggcttttttgttgagtgtggaaacaactttggggattagatttgttgttgatagagaagagtgtttttctcatgatgttcagtatgaaggagatacagttcatgtttcttttgttgtcatcaagatcgattcttcttggcattatagtcaagaaggtgttgacctcgtggtatgtacaaattgtctttataatccatccaccaaatatatatatatatataacgtatgtatattatggtttcttatatgtatatgttggatttgttagtttgtgttcttaaccatagattgtaagagaacatagttatgacatacttaaccatagattgttatgttaccttggatagaactgaaccttagttggcgtttggtagttggcgtttggtttgaggtaatgaaatcgattggaatggaaagagaacaattttcattccattccgtaatttggttgtattttaaagtatcggaatatcattttaataagacttttctcttattttagtagaatgactattt

SEQ ID NO: 225438 - DNA, 3632 bp, Cannabis indica
tatatatatagatctatttttatcaactaagatatgcagtattgcttatatgtctatgaagttcactgcatcttatataattcagctcctgcttagaatggagatacgtttatccgatgctcgaagaggctggcctagaaacttgggctgttgacattcttggatggggtttctctgatttaggtttgttttttttgctttgtgtaagcttggtattacttattttcttgcatattacgttgttgtgttttactcacttgatctttatcttcttttgggtctgtcagaacaacgcccttcctgtgatgttccctctaagcgtcaacacttatatcaggtatttcatgttattgttcatcgtgctattatgacttgtgcaatggagtaatttttcaaactcagattgatctgagattggagcaatagttgcatagcaataaggggaatagattgaaccttattttcaactttgaattttaagttaaagatggtattatctataaacgatggcagctttggaagtcccacattaaaatgcccatgatattggttggaccaagccttggcgctgctgttgctattgactttgcagttaaccatccagaagctgtaagtgattttaaaaaaaatacgaacttggaattatgcaccacaattattttattcaaacagttcctttaatttgtgcctaatattttataataagtttcagaagcttgttataataagtgtgtgttactactatctcttaattttttttaaaacatccaggttgaaaagctggtcttgatcgatgcaagtgtgtatgctgaaggcaccggaaacttagcaagcttgccaaaattggtggcttatgcgggagtgagtttttttgccctaccatttgccttaagccaaatcacttggaagtctatattcatcttcatttatagaacaatatcattataagctataaagaagagagctgtctatagaatgtcagttgtctgtttctgaggattactgtttatacaaaaatttctaaatatatgataagatgtctcgtctttatctccaacatccaatgaaggtgtgctatttttcaaaaacataaaagctgattagaaattaattgcgggttgattttctctacttttggtaaagaatgaataatcaagtttgcgtgatgctaattattgcttcatgattggtagtcaccaaaggaacatttaggctgctggtccatgacctttgtaggaaaatcttttctatttaagttttattctttgtaaagctctcacactattatttagaaaagtagtaatggggtttaattgcctatctttattgtcttatttttttcctaaatatgaattcttgtaaagcttatgtatacaaggtttgtgtattgtgaatatatcagaaatatattttacctttttttttttctaccttaaatcatctagttatgtcaaaacatttaaatttcattcttgtagtatgattcactttactaatggctatcagagttttgttgaagcaggtatctttactaaagagtgtccctctgcgcttatatgtaaatttattggccttcactgatatatcgtttgataccagcttagattggatgaatgtaaggaattctcaaaggaagtgatacattatttttgtcattcactaccagcatagattgaagctttattttagatctcatgttgttgtttctctataatcttagattggccgcttgcattgtcttttaccttggtgggaggatgcaactgtggattttatgaggagtgggggctataaagttggtgaacagatagaacaggtacttttgtatcttttttttctggcacttaagttatttttttaaggcactttagttgatcatgtgttttctgaatggattttggtacacgaggatgtcatgttggatattacagttgcaaataactaagtcctaactaacctatgtagtatgtaaatgttattctcaatgttaactactttggagatcatttctaatttgcttatttaacttataagctctatatcttaactcaacctcttaggaagctatcgatactttatttatttatttatttttttttgccaaacaatatatctagaatttagttatctaagatttggctcttattcaagttctgtcaaggttgtctacaagttatggtctctttgatagacatcaaatactaactaactttgttggtatgatacacaattctgataggctgttggaacttggaattaattttcttctaatcttcaataaaaaactgtatattttttaatatcaaataagaatcgtaaaagagtcattggaattttgtatctctcttgatcaaggtttcattctttatctcataatggtactgtgctccaaccagttggttgctatgtggctggcatatagattggacacaatatcatggcatacagtgtgcattgtatgcttccctcaagcaaatgggtttttaacaaaacctaaagtagtgtttatacatataattatagggtctggctggtatgttcgaagtttctcgttcaccatcaagttgggcaatccgggccgttaacatagaaaaagtaagctgaatctatgacccccagatatgagccaccaaggggtagttgatgaatttgtatgttaagtgctattgttgtattctcttataaatttaagagtcatgatatgtgcactataacattacacaaggcattgtttttaaaacagtggcccggaattagataagtgtgattggttgagaaaaaaacgcggacacgtcattatgtataatttttaggtgcatattttgagtgcagatatatcattactctaaatttgattattgcaatgttgactattttggttttttttttttgtaacaatgaacatactatttaggcttttgttgatgtctattatctctggaatgactgtttgtttgaggaaatttttttcttgtggtcctctcatttgcccagttctaacatatcatagatgaaggatatgttggttaatttccttcttaaaggggaagatgacatttagtaagtttaacattggatagtatgaatcaagatggatttttttgaagagttttgttacaaatagtggatgttaatttattccatttatacagtgaaagtttagcctatggcatcttctgcgaattggtgagagcttaactccctggaatcaaataaatttttaagcgaaccagtatgacttctatattgaagtttttgttgaaatttatattaatttctgtgaatatgttgtcccgttgcctaagcagtagatgataagctggagagagctgaaagtatcagtgtagtgaatccaatcaagtggtagaaggcagttttgcttgcttggaacataacaatcaaaacatacaccatcattcctataggcaagaaccattatgttggattcacaacgctaatactttccccactttttgtcaagtacgcagaaaacaagttatcacctgcaagcttagacagcatgaacaacttattcgcacattaatattgataaaaaattcaacacaacttcaatgtataagtcatactgccaccaattcatataattacaatgtctcaagctaaactttcat

SEQ ID NO: 225439 - DNA, 4576 bp, Cannabis indica
taatttttagtattgtagttgaaataaaaaaaaaaataatgttaattatatttttttgatgttaaacctgcactaaatatagattttaacattggagttaagaagaacatgaacaaaaaaggtggtacaaaattaaattaatatcaactagctagttgtggtctttttttagtgggcagcttcattaatattgcatattttcttagctctgagatatataattttttttcttttgactgattcgtacatttttccaacttcgtagacgtcagattatttgtattttttcattaaatactatagtttttattctaatatatgtctacattgtttactttcagcaacaaaagcaaactttgataacttatattattattgtagtataatgttacttcaagtttcatgagaaaaaacttctattaaaattatttttaaaatagggagaaaagattgtatatcaaatttaattatagtgtgtctataaattaggatatatagaaatacatttactttaatatattttaagaattggcaaattatgtccatacctatatgtgtgagctagtacattgaccaactaagaataaaatgatgtatatttgtttcacagatataattttggatctactcaaaaatattgtttaaattatgccatcaaattataattaatcataattagtgtctagtgatactattttcttatatgtgaaaaaagtcccctattatataatatccttaactcaaaaataaaatcatgagtcataaaagtagtgctatgcatattagtgtgccatgatctatatcattcaatatatgtgtttggctttttttatatgataaggaaaaaaagtataagtcacataataatgtccctttgaataaaagagtacaaataataatatatagtatatgatatgtattttataaagtgaacagtttatttgtgactgtagtacccttttgccacccttattcgaccaagtcaatcctttatcattttctattttctaaacccaaccttgaatattgattgtctaatttgcctattcttaattaaacaaaaaaaaaaaaaaaaaaaaaccaacgttaccgtacttatataaatgttaaacttgataggaaattatgtcacatatatcacaaagacatatataacatatttgacactttaataaatatttcgtagttttggattgcatggggtctaaattttaatatttcaagctatatgcattgaataaaaagaaaaaatagtaagttttattattaaaatcaaaaacttatttaattgtagtttacgtagcctaagtacaagctgtcctcattattaacccaaaaccgatcgaccctgattttttaatagaagtaacaatatttacatgcaaatatatataattaattctaaataattaataaatttaatgtgattaaagtaattaaattttggaagtggtagtggtaggttccctgtatgaacttgtttttcaagtcttagtgttatacttatatatatatttatataataaattagataattaagccttaatttgtcatgtgttaggttactgactcagtttgtgactttataattgtgtattagtccacctaatatatttacttaccacgactagtttataaatatctatataagaaaaaaaaaattggatcaatatttattaagtttcatctaatggccagaatatttatactcctttcttacaactaatgtatatatatattctatataaaatatgattatgtaacataatttttagtttaatggtattttttgtatttttatgttaacttttactaaatatactattacttaaaaaaatattctttaactttaaattaaaataacaaaattatacttttcaaaaaaaaaataacaaaattataaattaaaaatttctagtatatcaatatacatatataggaagattattgttaaatatttttttttaaaagaaaaaccccaaactctactgtaaagagtaaaagctctcaaaaaggagaaagaaggaatatcgttaaagatttatgacatcaactatattaaggtagtgatgaaaacaatttagataatgtggccatcaaacttggctagtagccacaaacaaatcatacttaacaaggttatgagcaacaacattataattaattgtcttagaacaatcacattatagaagagagccatactacaatgaatgtccgaaaaattaatcctagcgatgagtccaattctactttcttgttgatcttgttaaccacactctggcaatcagattcaatttgaacattatctaaacccaagagacgacattggatgccaacacgacaaagatagagcaaaagcttcaacaacttcaacttaaaaaaaaaaccaacatgtgccagattgtcgaggcaaagacaacctcatgagcatcccgaataaccatacacaagccacaaaaactactttcaaagtctaatgtcgcattaatattgaccttgaaacaaccaccataaggaggaacccaaacaaactcgataggagaaggtggagtaggcttggcttgcccaaccgctctccgttgactagtctctttggaacctaaaagaggcctctgataatcgcataagaaattacgggcccaatttaccaccaactttggggacatcaaacagttattgtggatcattttatttctcttggaccaaactctccacatgataacaagagctacttccacttgagatataggcaaagaatccagcatatagatgaaagaaatgaaattagaacaaatgatccaaggatttctaaggctaaactcacaaaggtttcgacaatgggatagagaatagcatctccacaaagtatgatgagtagtttcttgggcattgcacaagaggcaaatacatcaataagcatatcacgcgtattcaaattaaacttggatgagatccaattgtgagaaatttatcaagcaaatattttgattttgaggggatatgaaaactacaaaatttcttccaccatctcgaagacccataaaaagtagaaggtatgttatgctccgattattgtaatattagtttttaaaaatgttctgtagtcgagcaagttatttaattataataattaatatgtattaattataatattcaagattattaaaaaaaataataacattattcaataataataataatgcactttatttatatgctgaaatctatcggaattacaaagcattgtcatatttgatttgagttttccccatgttttacaaatatatataataataagttgtgtaatataaattttttgtaattttattgacatgtatctctcaaattacttcaaaaaaaaaaaaatgaaaagaaaaatgtatcacgccaaaaatattctgccaacaccttaatataatttttttagttcattgtatcgactaggagataccttaattaatgggaaaaggcttaaatttatggtgtagaaaggtcacaacataatctgatggctggtaacggtgcgaagggttggactttaccacaaaaaaataatattaagataaatattgatgcagcattatttgttgaggaaaattgttttaaatatgggattcaggaagtgtgtgcaagggcaggttgagcctcatcttgctgaagttataggaattaaaaaagctttaagttggattaaatccaaagtaggtctgcttggaatcagattgtcttgtaataatttaggcaatctgagatggtgttctttatttggcattgtcaaaaattaatgattgagttacaaaatgtgtttattttttttttattaaacaatcagttaatttgatagctcagctagagcttcttttttttttatcatgattgtaagttcagtttgaatatatcccaactgatttgttatctatgttgataactgagtttgaggtttaataaaatgattattcgttaaaaaaataattaaaaatatatatttatctaaatactatcaagaaaactcgattttaatgtcaattagatgtaattggccacactttctatggtggtgaatagtactataatattggcttatagtgttatccaagttgggacgtatgcttgaccaagagaatgaaagaacctcgtttgtcaaaatttctgaaaatgattgatgttaatacaccttttaattaactaataataattattgcatattttctaacttgataatcataaattcacacaacttattgcatatttcttcttaattaattataggaagttagaaacacaatcaacaagcaatcatagctgtgaatttgactaacatatagatttatgtggacagccactcacaataggacatttcatgattatttatatattcagttagagaattgctaaaagaatcataataattaagttgtatatataatatattgttattgctacaatttagtattaaatttcacttattttaacttaataaacaatataaaaaattattaattaacctttataaagtcacttttgcatcatttagcaccttaaattgcttaataagagcagctccaaggagactgca

SEQ ID NO: 225440 - DNA, 5134 bp, Cannabis indica
taaaaaaaaaatgtataatcaatgagttgcagaaaatgaaacccatgatgttaaatttcaacatgtaacattaatatgtattaattaattgttaataaattaatataatattaatgtgccttagtgtattaaaatgattggtttgacaaatgccaatttaataaatactttaaaaaaattatatcaatctttctataatttttgcaatctcagtttcagacatgtttataatttttctattaatttttattgtaaaataatatttttgtcatcttaatttatattaagagaataaatagaaaacagaaaagagatttatagatttatttctttatttattagttaatctaatacacataaaaaaaataatgatagttgtaatcatttttctataactgtatttactattttttttttatctcgaacggattattaaataaaattattatttcttaaaatacatataattttaaaaatattaaatatatgttacgcaaagtgaggcatgtcatcaagaggctggtgggaggtctttgtgttttaggatttttgagattttggggctggtgaaccctattttggggttggtttttatcatcgatgacgagagccttctacaacaattacctgatgaaatcagagggacctattgttgaatattgggttggattctatgttttccttgtgtttcgttcatgggagtttgatgtttcctaaggtttagtccttctgtgtgtgttgtctgtgggttgtttctttgttttcctctgttatcttcctttgtttttagtttgcttagtcatcaatgtggggtgtgttgtggggtttgtggggttcagtgctgtggtttggtgagtcgtgggggttggtagctgttaggtggtgtggtttgtccttagttgtctgctatggcgttagttaatgccaacaactctgccataaatgataacggtaagtgttattctcgtgtggaaacctctgtaaaacttgttccttcggcctcatctcagcaagctttaacttccctctgcctcgttgggaaagttattgctccaatgattgtcaacgaagctactattttggatatggtggataaaacgtggaatttcaaggtcaatgtgactactttgtatgagtcctctaacaacccgaactgtttcgagcttggctttgcacgagcagaggaccgagcctgggaccttgcaaatggaccgtggcgtgtccggggctatttcatgattctccaagcttggtccccttgcaaatccctctcggttaacctcaactcaatgaagatttggatacaaatccacaacctcccccaagactatttctccgtcatcaatggtaaaattttaggggggaaagccggcaacgtcattactgtagagctggatgaaggcaaaccggctacgtggagtaagtttcttagagtttctattgtgctcaatgtgaatcaaccactgttctccggttgcttttttgagttggaagtaggaagtcatcggtggcttcagtttaaatatgaaaggattggcatcttttgttacaactgtggaaagctgggtcatcaaagaaggggttgttcactctcaaccccagtcacggtggtcaatgataatggcattcctttccccatgtttgggcagtggctttccaccgcttctacgtatttggatgttttctcgggtgcgaactctttctcaccttctctgccagtctctcctcggcctggacgtgttgaaaagagcatgatgacttcgaagccggccatggatgagcgtgggagaaaccagaaccggttgagcagggcggtgcgagtttcgaaacggccttggatagtgactgatcggaggtctgataagggtaagctggctaaacaggtggcgtgggttcccaaacatggaggtgtcaatcgtcttgccattctgggtaataagagtggccttggaggagatgaagaggaaaaggtattactgaaggctcctaaatgtaatttgaaaaacgttgactatccgttggaattagatgatgctgtgggtgatggacatgggcttcaaggagacaatattgggccgactctctctacttctgggccagtttcaattaacaatttaaatttcaaagagcccaatggtaatcaagagccgtgtgggagtattagacacgtgcgctctctttaatcaatccccatgcatgtgatgaggctttatctcctttgaagaagcacatgggcgagagggttagtaatcgggccgtgggctcttttgcctttattgggccgattgctaatgagagtaactttttgaaggataacaccttaaagggtcattttggtgatgggccagctaaagatatttccaatgagagctctatatgtggccaagaggttaattttcaccatgatgaaaacttagctttgtctaatttttttcaagctcaagacacactcctccaagagcttaagaattttggaagtttggacctatatgagataaaaaccattgggggtgacattggagtcccaactacctctgagattaatgaaagaactactccgctcaaaaaacggaagtttgatggggcatctgcatccctttgttctcggccttggaagcttcttcgcccccatccctgggctatccgtgatttcccctgggatacagagaaaagtgataatgctactaatgctgtggaggaggagccttcggaggatatctctttatccaatagcgacttcattggccctgatgagtggaggtctaaaggaaagaatgttatctcatctaggccaatggagggcacgttcgtggtggaggagtctggatcttttgggtctgcccaatctcatacccctgtggaggagactactactcctccacaggatccatgagaggtattgcttggaactgtagagggttagggcagacctctacagttcgtgagttgaagtccctgattcggtcgcgctctccggatttcatttttctgaccgagctcaaagttgatgctacttctttggtacgcactcttcactctcttcatttttactttcatattaatgttccggctgttggtagttcgggtggtattattttggcttggaaaattgggtttgagtttgagtgtatagcttgctcccaaaactacatttctggtttagtgtattcggatccccagtcgaatccgtggctcctgtcttgtgtttatggccccccgtattttcatgctaaaaaaactgtctgggagaacatcatgaagactggggataggtttggtggcccgtggcttatcttgggtgacaccaactttgtccttagtgattctgaacgtattggatccagaggcagagaccagtttattccgattatctctcatttggttaacgccaggggacttatcaatatgcccatccagggagacaggttgacgtgggataagcaccgttctgggtccaaccatgttaagtcggctcttgataaaggtcttattaatggtgcttgggttaggctcttccccaaggctgtcatctgctcattccaaactgccaattcagaccaccgtccgctgtgcctgttctctgatggtttggtggaaaagatcagaagaagctttaagtttgaggaagcctggactagggatgagcgcagcagattagtggttgattctgcgtggaagtctgttaatttcccctgggccccagctagaatcttcaagaagattggtgctacccgggttgctctgatgcattggaatagatcccagtttgggaaacttgattctctaatccgtgacctggaacgtcggctagatttcattcagaggttgcctgtgggatctagagagtggacaactgaacgggccttacgcaactctcttaacgaagcccgggtgagaaaagaggtgtactggaaacagagggctagggtttcctggctaaaggaaggggacaaatgttctaagtttttcttcctttccgcctccatcaaaggtagaagaaatgccatagagtgcatcctcaatagagaaaatgcgtggatctccaaaagggagttaattggaaatgaattcatggagtttttccaaggcattttctctggctcagagtttggaagtaatcctaattgtagcgagctagtcaaggattgtttgtcttcggacgaccaagccgagctcattaggaaaccctcccccgaggaaattaagaatactctctttgtcatgagtagctccaaagccctggggccagatggtatgtctgtccttttcttcaagcactattgggactctgttgggggcgacttctgtgaggcggttttggatttcttccacactgggcgtatgcataaaggagtcaatgctacgaatagtccttattcccaaagtccagaatccaaagaggcctaatcactttcgcccgatctctctctgcaatgtggtgtataaggttatcactaagatcattgccaacaggatcaaacctttgttaccaaagcttatctgccctacccaagccgcgtttgttcccgggaggaacattcatgataacaatgtgattgcccaggaaatagtccactcgttcaataggaagaaaggtagagaaggcttgtttgcaataaagattgatcttaaaagcttatgataggatgagctgggggttcattgatcatgtgctggcttgttttggtgtgccccaagaatttcgggcttgggtttctcagtgcattactactacctcccttaatatctgccttaatgggggtccggtaggaaagatctccccctcgtgcggcctccgtcagggtgaccctctgtctccctatctttttatatggtctgcggaaattttttctagaattctagagaatgcccaatccgagggcatcattcaagggattaggctgagtaggggaggccctattatttctcacatcttctttgccgacgacctaatccttgttgaaagagccaatgtggaagaggccaagggtgtttgggggtgtcttgatcagttctgctcttggtccggacaaaaggtaaatacgatgaagtcttccattttctttagtaagaatacacccaatgtggttaaacaaagaataagggagcttttgggtttaagatcgccagaggg

SEQ ID NO: 225441 - DNA, 4168 bp, Cannabis indica
aaaaagttttcttctttaactgtttttgagagaaatcatatggcgcaagattcttttctggaccggttttctaataagatttggagctcaggtccagactgctgttaaatttcccaaaaccaaccacccaaaattagctccatttcaaaattcaaaaccagatgtactatagataaaataaaaaaaaaaaataaaggacacaaactttgaaatgagagagagagagagagagaacaagatacaaatgcatagggaacatgaacatctcagagaaagaaatgaaatgagaaaggtgaaaataatagagataaacgcacacactccaacaaggaaaagaaaatgaagaatgaaaggaaccaataactccacaaccaaggtccaaaagaaacaaaaaccaaaaactgcccctttcttttttgcctattcagatttgaaactagttgaaaaggcatgaaattcaattgaacaggaggaagaaaaatcaaacctccattgagccagagtgtaaggggctttttatcaggcaccttatctgcttcaacaaagtaataaaacaagctccttccagctttgacatccacatcaacataccctgcatattgtctaaacccaactttgggctgtcctggtaatcccaccaccagatcctcaactgggtatgcctcaactccaaccacaatcaaccaaacacaaacacagctcaacacaacaccaccaacacccattttggagaatcccaagattctcacaaaccaaaaacacaacctttcttctattcattccttttacataattctccttatttatatacaaaattttcttatctattatttccttaagaaaacaaactaaacttaaaagggcacgtgattcctggcttgctttaacaaaatggctactaaaatagtttattgaaagaatcgagtttgatacaatggaccaatggctataacgacagaataaatttaataataaagaaaaagaaagattgaatttttctttagtttattgggaaaaaaattattggtttcttacttgtttgacttggaagaaatttttgtttacaactgcggatgagtcaatacaatagtattttctttgtgttgtccggttacttagtatccacttacaactttcaatagataataatgagataattgatattaacaacattttgaatttgtagttttgtaatggtaaaataaaacccaattgtcaatttccaaagatgattaagatatttatggtggtcatctctatctcaacgtaaaaatgtgaggaaataaataaacaaataaagacatgttcaaagctcaaaccaactcaagcggtaaaggtgtgttctaatattttagccaatttttttacaccaaaaatatacacaaataactaattatgaattcataaacgatttgtaaatttgaatttaaaattgtgttttcctaatatcaattttattttttttaatctatttcattagatatttattctttattaactgttgtttggtagtaattcttacagtactattccgtaattggaaaatagtgtactcacacactaataacatctgttactagtttagaaaattatatttggacagagcttgttggcaatttttaagttcttctataacaacaaatttatcttaataaattatgtctttactttaaaaaaaaaaaaaaaaaagtaatacacataatattttatccaatttttatacaatacttgcttcgagttttctttcaactacacaaatctattgggacaggattgaaattaatatctttagtttttatttattttataatattaatttttattagggttatttattatatacttttaaaaagaagagtttttagtctttggttcatgatgtagttctttaaaattatttatggtaagtaattgttttaattttttttttcgataatataaattattctgaattttaaaaatttacaagtggttcaaaaaaactaaaacgtaaacaatcataaataaaatttaaactaaaacattatcctggataccaaaacacataggactaaaacaactttttttatgaggtgtactgtaaataggagcatcgtcggtcgataatagacagcaaccctctcccgaccttgacttgaggatagacccaactgttaagtgtgcaaccaaagtctcacattggttagaaatacaaaagattgtgggtatataaggatagataatatccaattagtagtttcttgaataataattaatgtgtaatattttaatttttatgtagtttaatatttttatatatttatatttttattataaactttattttttttatttaggggattccccaccccatctcagatggaaaataagtgaggatgaggattaaaatccttaacggagatgtagacgggggagcactcctcgccaattcaccgccccatgtgcatccctactcccgacgacgatcagcccaaacctagcgcatcttcacggcacaacacctcaggtactccctcctccctcccccgatttcacaccctctctgtctgtccatctcattctttatatgcatttttgaaaagtttcgtcagcgacacgatttagatctcgtttggtctgcaagttttattggctgaacgagaactaaacccagatctcaagaacactgaggtttcttttcgggatggtgaagtggagttcttttgtaatggaaaaatgcagatatgaagtttggattaaagcttagtttgtgacttgagaatgcagatatgaagtttagggcttgatttggtacatgtcaaagttcagagagcaaaaatcctaattagccttataaaaataatatgaaattgaccaataaaaatatgacgcatgtactttagtaaatacaaccagtatttaacagaattatagtaaagaaaatggatggaaagtcgaaaaaaaatagtatttaagtatataaaattaaaaatataaagcatttatgccgcaaattttcttatttttatgttatactcttgttattttgttgttgttttattgttgggtttttgttatttttatgttgtttgaatgttattttctgttacttttatgtagttttcttattattttcactaaaaatgtatatatatgaacatgaaagtctaacaactttatctaatatagtagtttgtgtatattttcttagataatatctccattagtatgaaattttttgagaatatattcaaaaacaaattcataagagcttgggtcgataaggaacaatattatactaatataaaaatatatggtgtccaacttcccaacacaaccaataggatgccaaaaattttaaaattaagatcaagtgtaaattgaactattaaatagatatttggccaaaagagcctaaataaattgaggataagatagggatgtgattgtaaacatagcctaatagtacaatatctctcaatttttaatccactatatgtggtaattatgtaggaaaggttttcggcttcaaataagtacaccactccactccactagctagcaagctttagaataatgccactattacttttcttttttaattttgagccaaagggaaagagagaaagatactcctagaaatggcacgcgcggcgctatttggggtcccccaatcatatcatcaccattccttgctctttcttgctttgaatctcaaaaaacaagaaaaggaagaagaaaccaaagcaacctatctaatctttcttgacatgcattttttaaataataataaaaagaatgtagccaaaagtgatctttgaattcatgtcttacaaagtttgtaacaacccactttttccatttttataaaaatattcattaatgcggcttgacttgacttatgatctaccaaagttcctaatcaatttcaatttcaataatattattggcaattagtttattgaggcatttgaatattataattttgtgtttcttggtacaattggtaaaagaaggattctcaagttgggtaattatgaataaacttatgtccaaaatatatctagataaacatgatgaatgttcatctagggttgtacatcgatcgtcttaggcagtttatcctatatattttctaacccaatctaaagtttggattgctaaaatttaagtgtaacccgcccaattt

SEQ ID NO: 225442 - DNA, 4376 bp, Cannabis indica
aacacgtatcaaagccacattttacagtggagatcaatattagaagaaatttaacccatactaaacaccatgaaacaagaagacttcatcttttgggacaacacggagccaacattaatgcaatgcattatttgccaaacagaaaaacatactcatgcaagggaaatataaggtcaaactgctatttcatggccataagaaaagaaattatgaaataacagccaatccttagagaaaatcacaaataaggtaacatgataaaaaagagaggtaaataacattgcaggtttaaaacattgggagaaaaactgaagatattatcaacatgttcacataaccaattgagcgaggcaataagataaccacctagtgtattaggctagtgtgtggaattgataaccacaacttcaaaaattagtaaacaagaaaaggaaaaagagaatatggggaaaaacttgtagttaaattcacctacaaatacaattagaaagtaaagtgacacaacaaaaaaaaaaacagaagcgtccaacgaaagcagcagagaaggaagaacatgaagtataaatagaaacagagacaaggagaaagagaggagaagggagattgcttagacaataaatgaaacaactcaaacatcctaaaaaaactcactttgttaaaaccagcaattaaggtgataggaacccatccctgatcatccatgttctgcctcaagtatgtatctcttataagattttcattactgcatcaaatgaataagagatgcacccacagttagacattaagaaggaaaaaggcacaatggtaacagagagattgaaataaaatgatacattattacattttaagaccaatgagtacctaaaatagtaatcgatctggttaacaatcttagaaggtaactgaggatctggagtagggatgaacataggctgcattgaggctccgactccaaactgaggatgaggaagatatactattggaggtcccagttctcctattgaatagatgaaagcatagaatatttaagaatatgtgaaaacatgtctagaaataaaattattaataagttagcttacctggaaagcccatgggaggagtaccataagggcggatatgtggaggaataaatgttggactaggaggtgttggaccatgatatactctaggaacccctctttggtgatggatgtgtgagtctctaccattaaaacttctacggttattccaatcatgattccctcgatcttgccggttcccataattatgatgatgagaaccatctccacgcgggtgcataccaccattcctgtttctgaatgaattccgttgctgaagatgatcaccacctccatcagagtgagagccaaatccactcctttgtgtatgttccctaggagagggatttgtagaagccatatcaacagcttgattggctggtgctggtggttgagaggaggaaccgttggaggatgcgtttgagttgttacgcttaaatgacctctggcgagcagttgcagcatggctgggggttggggtaggatgtgcatgtttctgagtgggggcagctgtgggtgccacagccacagtggttccagaactctgcagcattaatgcacattccattattcggtgttataagcacacatattgaaattaaagaggattagtatattaaatttgattcaacatcgcaacaataatcttctgttgtttccactttcataaacagtgatcaaagttctaaacaatcttcttctattatttacaaatccgacactgttttagccaaataaatttgaaattaaagaacccttaattatagacctctaaggctatacacagtgctaagaaagaaactcacgattacaaacctaacctcaactgggttaggaagatagcacaatcatacttgtttctcattgaatcaaaatccaacattaaatatatcaaaagcccgaatgagattataaataagaaacgaaaaacaaacgtacctgcgaaatcgaaacggatgacaatccatccgataatgctttcaaggaatcagaagatgatttggccgaagctctaacagactctaattcaggccatgaatcagcccccatgaccgttccaacctccgcaatcccattcgatggcatgttgcacgcaggccgtttacccgcattgccgttgggaccagtgccactctcagagctctcaaccccagcctcctccacaagagaaggagaagaagatgcagacggcggtggagaagaagacgaagaagaaggaccaccaccaccaccagcagcacagcagtagcagcaaccgtcgcggtgaccacttgctccgttacagccgaagtcgaagaaggtacagtcgcgatcggctccgattcacctcgaacaatctggttccatgccgaacctccagaagccctcggggcgcggcgcgattgaggactaccgacaccttcgctggcgtgacgtggcgatttcaccgccgtcatcggagcaatcgccgccgccgcaactgaggaattgctattagcagcagtcgtattaatcgcagccatggaaagcaccaaacacaagcaaaaacaattagggttagggtaagtcgagtcgacgatgagttgatcgacgcgttaaaggggcaaaaagggaattaaaaaatgatcaaaatttcttctaaaaacaaaaaaacgaaaacctaattagggtttgggagaagggaataatgtgagactgaaaagggggattgttccaaatattagggcgatcagatcgcagggaaggaatgtagagagagaaagtgaggagagagagagcgcttaaggagaagatgagggtggatgagagagagagagagaggagcgaaagagctctcttcttctgaattttctttctctctttccttttttttctctttggtttttgggctttggaatccttttgagaagaaatatgcctctaccttcaggttaattgttgttacgtgcgaaactacgagattgcccttatatattaggggctgtttaggtcatttaatcataataggaataggattttggattttggaattgcgacgcaatttgattggaccgtggttagggtttttaatgaagcgtcaaaaaaattaataaataataataaaaaacattagttttcaccgttaaaatgaaaaggtctactaagatgaagccacctggcagattcttctaatattattaatgtttttttttgtttttttttttgtcagagcagtagtttgattgatgattattggttttagcaaatgagttaaatttaggattatttatttatttatttttgaaaaagaaaatttatgaatatttaaacgtgtatctttttttttttttttctaaaaaaaacgtgtatttttctttggagtaatttgaggtgagattcttatcttcaatttttatatatttaatctttttattcttttaagatggcaaaactcctaatttttatacacttaaattctttattttttttttcaaaaaatcttcttatttttaattttttttatacttaaccttcttattttttttttatggcaaaactgcctatatttatttttctttacgaatttgacacgccaattaaatattaccgataaatatcaactttataaccactgtatacacctgtgtatatgtaacaataaaatctcgaagttgataccgtagtaatccagttagtatttaatggtaatatctaactaaaactttaaatttacaaaaaaaataaacttaaggagttttggtacaaataaaaataatgaggttaagtgtataaaaattaaaatataaggggtttagctacaaaaaaataaataaataaaaagattaagtgtataaaaattaaaatgtaaaagagtttcggcacaaattactctttttttaatagatcagtactgatattgatttttttttttttttgaaccactaaattttacttatggtcttaaaatgaatttgtaaaccttccattctggaacatagttgctattaaaggttagtgcttagtactaattaattaagtggtttctcgtcaataactagttataccataatagttactaagggtccgtttggcttgaaataacataatgtaattagatttgatataattagaggtaactatatatgataatgtttaattcattatgtaattaaatattattataatttaaattaagtgtaattttaaataattttaaaatttgacatatttcttcagccaaataattttacaataatcatgttatttgagctctctaagtcagccctatgggtcccgtttggtacgcaggactggattagaattagacaggctaatttgtccaatccagtgtttgggcat

SEQ ID NO: 225443 - DNA, 4046 bp, Cannabis indica
aaagtttggggggaaaaattactaattagcctaattatttaagatcacttataactttttaaaaaattctagtttacaatactgaaaataaaatttatatagtttgttacacgtatgattatttttcttatatatgtggtaagtaactgtttaaaccttattttcagtacagtaaattattcagaagtttttgaaaatttacaagtgatcttaaataattacaacgtatgcaatcatgaaaaataaaataaactaaaaagttatactaaatgccaaaatagataaaaaatctactaaaacaaccatttataggatctattataaaaaaattctaaactttacataaatttttaattttatggttttttttattggggactttttcatttttacacttcaaaacggttttttttttttttgcatttttacgaaattctacactgaaactcctattgaaactagcgctgcaacttaaattacaacaaaaaatcgtatagaaacccctactgcaactagcgctgcaactactttagaaacccaaaccgtaaatttgataaaaaaaaaaaagtttaaaaaatagtatatggggtaattctcttttttttttggtaaattttataaaattagggcttttttaaaaaaaaagttactttgtgaaaaaaaattcaaaaaataaaatatggaaaaattagtttacggtaatcaaatgggttaccgtaaccagttattttatactattttttaaaatttttaattttaattttttctataaaataatttttttggaaataaaaaaaaagttatgtgtttatacaaattgtacaagaactcattagatatttaattttcactttgtaaaatttaggaggaaaaattgccaaactaccaatatgattacataatcttcaatctcatttagtcattttaaactcaacaaaaaaaattggtcattttaagtatttaggttgcatttgttaagtcatatctttacgattaaaattgagtgtaaattagtggatttaacttaagggtgacatatttttttaataatataatatactcaaaaattattaaaaattggtacaaacttatatttttaccatacaaaatttatatttgtcctttctcttttttcccttcttctaggatctttatagggtttccttgtttctttcggccgaggtcgttatcgtcgtgcaactttccgtgccctggtcgagagaatgttcatggtggctttcggcttaggggtctaacacaactcaatggggttgttgaggttgatggggctctttaccggtggtgaagctttgttctcagcctaagattggctcctgatgtcgttagttttccccgtggcattggtgattcttctcattctctcattcattttgttggttgtggagttgtggtgagccattactcaatttgtaaaagagtagtcaattagtcattttgacataattatgtattaatatatgttattatgtttaaggctataactttaattataattttgaaactgggcgaaaactcgaccaattttagcccattgtccaattataaattagggtaaatagcggcataaatacctaaagttttatatttgtaagcgacataaatctaatatgtatttttagcagcataagtacccaatgcttgtaaaactgtaatttttttctagtttcgtcagtacaaactctgttttgaatttattaaaaaaaaatagaagtaactgatactacatatttctatctagacccaatgataaaaaatttagaccttgtatgtgttatgtttaagacaataacagagcctgtaatgataaaattagagaaaaattacagttttacaaacattaggtacttatgcggcttacaaacataaaattttgggtacttatgccgccatttaccctataaattattattatttaaaaaattgtgaaattaacaatatattataaatactttatccaagaataacatttagtttgttatataaaataaaatcaagttccaatttagaccaattataaataagaataatctataaattgttattagttatatattttataaattgtaattctaattgtaatttttaatagcaataatatttaagttatatttctagaacttccgcacatacctatttgttaagtatcaagtcaatcgccacgtgtcagtttcttattgattcatgttatttaattttattttttatttaaaaattaattaaaatataccaataaaaaaataacacgtggataataacttgacacttaatggctaaatatctacaaaagtttcaaaaatataacttaatagggccacctccgaggatagacgagccacgcgtgcgcctcagacccttaaggcctcaaaattgtaaaaaaaaaatattagtataaaatattaaatagtgaaaaaaaaaaatataacaaaaattgtttgatgtaatagttttaagctagttcataaattaattcccaaatttattgtgtaactatgaagaattgaacattagagtttttaaaagttttatcattatagtaagggtaaataccattttggaccctgtgttttgcaaaagttgccgattggatcctctgttttgttaaatgacaaaatggaccctgtattttctaaaatggtaaaaatagaatcctgaactaattttttattaaaataaaatttaataataatccgatgtaaaagtgttatgacaaaaccgtttacattttctgtatttgtttgtattttcaagttggttatattaaaaaaaagttgtcaaaaattaagctcagggtcctatttgtaccattttggaaaatacaaagtctattttgtcatttaacaaaacagagggtccaattggtaacttttgtaaaacatagggttcaaaatggtatttaaccttatagtaaaatattagaactataattaaactatatatactgtcccaaaattttattttatcttaagtctcgtatacgttagaatcgattatgtaacttaagtattatcactattaaagtatttatttgtaaactaaagttaaacttaaataatttacagtgtaaattgcttaaaataaacaataataataaatcgttaatttttcaaaaaaaaaaaaacaataataataaattaacaactaacaaaaataataaataaaaatttaagctagattgtctttttccaatagatctaaaaagcacaccgcatattttttcacagctatttttaatagctctgccattcttttttaataaatcttgaagcaagaaataccgatccagtgtgtcgcggtcccatgtactttattggaccccactttcagacagtacaacacatcacgccagtctctgaacttaacgtaacaatgaataaccaatcggagactgacacgtcatctcaggtccacggagttaccctcgggattcgtgcagggtagaacacactgagttggattttggcagggcgttgccgggtgggttatacagctagattgagcttagatttattaattttaattaattagtttaattattatctttagttaaacctaattttgttcactatattacataaataataatatttaaatcaatatgatatattcaattgagttaattagttaatgtcatattcagtatgaccaatttgtgaaaaattattttatttttttattaatttttagtttataagatagtatttcaaatatagctgaaatatttcaataatatatcgaatgagtcattatgtaaattaattaaaagataaattttgtggagcgcaattgtatttagtaccaaatatttttcgaagggctaaagattatatttctttaatttttttttttattttacatttcaaaatatttttttatatttttacagaaatctacataagaaccaacagagcaacttaaatcataatttaaatttacatagcaattcacatagaaaccaccatagcaattattggagtaactctaacagtaaaataaaaaaagataaaaaaaattaaaaaataatataa

SEQ ID NO: 225444 - DNA, 3728 bp, Cannabis indica
tacttaattacccagtaataatatgatagtaggaataccaaaaacatagtagttgattttattttttttttagcaattctcattttattcctttaaaataagagatcgtaccaccagagtctttctgacacgcacgagattaaaacgcaccgttttgtctttcatcctcaatacattttcttcttcagttcacacctttatatcttaagaaaaatcaaatcaaaatctgtaatataataaaagccaaaatccaaaaaaaatgatctgatataaaagacagagtctcagaaatttacgacacaattcatttccaaccattttcatattcttcttcttctctctcaaaaccctagcagagcttctcacttctctaccttccttcaaccaatactattattgccgctgctgctgctgatttcttcactctcctcctttctcggtaacggtacggtctccgattacttttctctttcgttatctatcaggaaaatgctgacaagttttcttgaacgattgccaaatccgtgtttattattttttattggagattttttaggatcgtagtgtaccgctggttattaatcatatgagctgatgttaaatgctttctttaacgtttttttttttgagtgtaatcggatgtttggtgattcttattattgtttgtggattgcgtcatttgagtacgttgtgatacacgtatttcagtacgttgagatagaagtggttatttggatcctaggaaattcatttgttattgatatttaattatatatatatttggtttatgattgatttgactattcgtttacggtggtttttattgttgaattagactgatttgattttagatatagtgatgcaatgattctttgtgttattatttggctgtttatgtttcttaccagcctaacagagtaatttgttgttttctggatcgtctataatgtttttcttttttgctcttgtggatttgctgtataaagatggcaagaaagatgctaatcgatggagaagtaagccaacctaatgaggaagaagcacactacgattttgacttgtttgttattggtgctggaagtggtggtgttcgtgcttctagattttcagctaattatggagctaaggtatatgaaatcctaatctgtgcttctttttatggcttcttcttgtttttggtaatttccactgttcatttggatgttttcttcaagagcttctttgcgtgggatgctttgagggacttctaattgtttgcaggttaatgtattagttcataatttgttaacaaaataataaaagaaagcagcatcaagttttttgcttagtaggatctaggaatctttggttgattttctgcttctttccatttatttttatttatctaattggtacacttaattgtttcttagctgttgtctaagtttgcttgatttccttaatcatgactgtatccttaactggaaaaagcatttgattgttatcttactgataatggtttttcaaatctataggttggtatatgtgagcttccatttcatcccgtcagttcagaagtaattggaggagttggtggaacgtgagtacataaaaacagtcatttcatttgtttattttatccttttggtaaatcatagaccagagactgtgacttctgaaaccaatgtaagctcatactcatgacaatgatgacatctatatcttctttttttttttgagctttgtagatgtgttattcgtggttgtgttcccaagaagattttggtgtatggagcaacttttggaggtgaaattgaggtgagaaggtctccttaaacttctctttctgtagtcaatacattatcattttaagcgttcattaaatgtaactgaaaaataaaattcatgtttttgttagttaagttagtgtaaagagtaaagtgtaaattatgaaattatagaattgatattcaagcacctaccaaaggatatttgaagattttagttactgatgtgtaatgtcataagcccgtaaatacaacagttctcgcatgagcagagtattggctgtgacgaagaaagctttggcaatagttatgttgttattaaagatacagtgttggaaattttgtttgatgtaaaatagaaagagaaaagtggttttagccacaaaacagattacaagctgtgactagaaaacatataatagcaggtatgaatattgcgagttgatggtcactttactaaatgcaaatcagtaaacgtcaatttagttaactatctcattctagttttggtcaaatattggtgactgttaattttaataagctgaagtaacattacattcctgaaaaggatgcatttctttgaactacacagtttgcatgcccaaaagtgtgatgtgaaatttctagatgcttctcacaatagagaaattttgtgcatttttagagagcatgatgtgcacatgatatgcacctattgttctgttaattttagtcgtccttagtaaatgtttgggtttcaatgtacaggacgcaaggaattatggatgggaggtgaatgagaaagtagactttaactggaagaaacttttgcataagaaggttggtttttttttctttttcttttttgataattaactaaacttgtataaatggtaaaaatatgcaagtacaataggaaatcagaatgcagtagtttacaacaaaaaacttcaatctctagctaaatcaacaaatataaattccttaaaatcttgtaccttaaataaacaaataccttctcaatatcatatttatttccatagtttgtgtaattttactgtcatttttgttatttaatttctggaaactgcagactgaggaaatacacaggctgaatgggatatacaagaggttattgtcgaatgctggagtaaaattgtttgagggagaggggaagctagttggacctaatgaagttgaggtgactcagctggatggcacaaaattgagttattcagcaaaacatatcttgattgcaactggaggtagggcacaacgccctccaattcctggccaggtaaaattctgcatttttggagaagtcttttttttttttaaattatccttggtgtgccctttaataattcataagctattgataacttcttattcagtttttgattttatattggcatttaaaatatctgttataacttcatttaaaacgttaatgtttcatgaaagggacatctgttaatgttatattgttagtagtgcgtgttcccagcccaaaacagggcactataagctcttatttgtaatatagtattattggtaatagttcattcctggtgtttatttccattgtagtaaagtactggaaattatgaaaacaagggaatttcttatacatctttttcggttaatatttatcttatttgggttttcctttggggattcatcttttttcaattctcagtccacattctatcttattttcttggaaatttttgcagtatggagatttatctttattatttgaactctcttttccctttcttttgccaggaattcggtataacctcagatgaagcactgagtttagaggagcttcccaaacgtgttgtggtgcttggaggagggtttgtttcaatccctttctttaagcaattcttattaactgctatgtgcactcatcacctcaaacaattatcctcttgcctttttttttttctgtctatttaggtacattgcagttgagtt

SEQ ID NO: 225445 - DNA, 1730 bp, Cannabis indica
aaaaaaaaatatttaacagacaaatatttgaaagctcaatttaattgaagtaatattttagagtaaatatcataaaatattataataattattaatgcattataaatttttgtatttctaaatatctataaatttataacatttttttaatatatattcaataaaattataaattctagacattgattttttttattataatcaaataataagaattaatatgcagaacaaaaaagtatcaattcttgttaaaaaaaaagattaattttaatatcaaatatttctcaaaaacaattattttttaaatcaaataaatttgaatgactacgtttttttgacgaattattaatattatttcaattcactatttttttttatataatttttgaactagaaaagaaacaaaaagaactgggctattttattactaagtgcaattacacatacttaatttgttactcaacttaacacttatgaaatcgtactttgcacaaaattctaagtttttataaaccattccaaccgttgattaccccattaaataaaatattatagaatcaatcactaccactaattgctgaaaatataaaatgaaatgtcaagaatgggattcgaacccatgccctttcggaccagtacctgaaactggcgccttagaccaactcggccatcttgactgcatactcattcattatattattattataaacatatataaaaccattcacattcacttatcacttcaatgcttcctccttccaaactccatcatataatctctcatctaagaatttgctgatttttttttttttaatgcaccacatgttgaatgactgaaatgaatgcaatttataataaacattcaagagttcatttttatagccttgaggccttgagatttaatataaatccggattaaaaattttcaaggtaaagaaagaataacagaaactagaagataattatccatcttccaaaaaatatcaataaagtggagttacatcccaacccattgtcccatttatatttttctctaattacacaagagattgagagaaaaaaaaaagaaaaaaaccttgagctatttcattccttcccaataattttattaaatctgggttgaatcactgaaagaatcattctcatccgtttcaactaaaatgatttctatgatttctcatgtcatacaatacaaggctactctcatataaatcctgctaaaatgaaagtttagtatgtaccataataaggctcttttcgttcttcatttcttttcaaggaaaatgagggtaactatggttgaatcttattaacaaatagatttttctcaataaggatttgatggcatagaagcagaattacactctacaagtacaccgagcttagcaagagctaacctctcaatacagctggagctccaaaactcttttacacttgcagcctttttactttgaacttttggtttcgtgttccgcaaagcacactgtaaagatgtataatatatctatttaattggttattcactagttaaaaattaaagcttcaactaatagcatgagaagacctgattggaagccttttcttcagtatctttttatctctaatttcgtcatatagagtttcataaacagaattaagttatatgattcttcttcagcaaatcttccacaagaatttttggcgctgctatctcccttttatcagcctcaaagattgtatccacaacctcc

SEQ ID NO: 225446 - DNA, 3351 bp, Cannabis indica
tatatatatataatattaaattataggaaattatataaatataatatatatataccgcaagttccattacatcaaatacaaaattggtggagctgagagccaacttccattcagtccctccacacccacctgaagtcagtaatggtaatactccacacacataaacattataaaaacaaaaatgaaaaagaattgatgcttaatacagactccaaaccatgccataacattacaaatttggtaataagacttatctagattggcaataatgatcaccggctctaataatttttttttctttttcttttgaagatatgaagagagacttaaattatatatgatacctaaaatagggacattacatatatttataagaaggtacgtaaatgcaaatgcaaggaggagctatattttcttttttatttccaagtccctatgaatttaattattaattattactactagcagagattggatgagtagtagtctaggaaagtggagccctatgaggagcaccctttctcctgctgctaagggaaagaacaattccaggaagaaagccactgcctttcttcttcttcttgaccgaattggtggccgttgaggcggccatggcaaccggttcccgtgaaatagcggagttgctagaagcatcacgggagccggaagaatgtccgtagtgcatagggttatgatcatccaaatttggaccattttcatcgtcagtgacctcagagccatccatcctcaatccctcgaactgagaaattgtgaaatcggactcatcgaaacggtagagaattgttgtcaaatcgtccccttggttcaccataaaatcaacctgcattgatacataatttgccatttttttatttttgatttatgacaacacttgactaggattcccaaaaatatttatttgaataattgataactatataatattgactttgataatttttgaattttaacgtctgtatctttacaacaaagagagaggcccaatatgtatagtttaccaagatgtagtgttttgaatggtaaaagggtaattaaaacatgaccagacaatagattgagcaagcacaaaccccaagtatggtatctgcataatttgcagacggaaaaagcataaaaacatatccacgtggcaagaatattgctcaattcaaggaatattatttgtggataaattaaaccctaatgaccaagagcataaaattaatataaatatgaatttgacattgggaatttagaaaatattaattaaatgaagtaataattaattaagtaagtggtcgaccttgcatgagagagagcagaagtgaaatggctcttggagaattcgatcacaagtgaagcaaatgttggcagttcctttgcaactcctagactgtggcctttgattcaaaaaaatgactttggcaccgttaattgtataaggctgccaaaaccaaataattcaaaaattattattacttgtcaagtaaaattattaacactatgcaattgggctgaaaccattattgagttcgtccaagaatgaatagtaattaactctcacatacatatataaatatttatatatttatagaaatagtaggcccacttcaattaatacacatgacaaatacatagtccaattctaccatgtcattgttagtcaaattgaaattatattcagtttttctttttccaataataaatgagattccttcaaattatgattgtacatatatatcagaacatttgtacacaacttctaatttttatatccatataaaaaaaaaatagaaaaaagaatttataatttttatacgaaaatgttatacaaactatctaatttgtcacaaggtgtgtaaatattttggtataaataatgtgtgaatgtaataaagttttttttttctttttcttttctatttctcatttttggtgtattggaagtcaaagatgaaaactgaaagtacctggatgaaagcacagtcaatgagcttttcaagatcccccaatcgaacaacgtcgtggtaaacataacgcctgacctgtcacacatgcgatcaaaaactcaattggctgcattgttttagtatttatggcttcaatacatacatacagaaataaatacatacgtatatataatataattaatatttcttttacaatttctgggtatttaatatgccataaatagtcatcattaagcagctttcatcatcatcatcaccctacgtttcttgggcatgacttttctatgaaagtttttactgtgcaaaatttaactcttccaggctacccatcttggaaatttaattatcgtgagctaagacaaaaataacctgagtcacggaacaaacatatattaactaaacctgtataagttataaaaattgtcgaattttgtttcagaaaattaataaataagtaaataagttaaggaaatataattttggattttgaaatatacgagtcaaactttcgctttctttgaaagcaacaggtgagtaacctttacagtggaaatggataaaataaagagatctactattaatgggaaagaatccaaatccaaagagcagggttcaaccgtatacaagaaatagaaaattttgtatgcattcaaaagaattatccagaagtcatatattggtattcttctccttcctttcttcatgacaaaatatataataaaatagggacccttggcttcagtacaaagggtgaatatacaggtcaatgaattaatgaaataaacattatttacaacgtcacaagagaagaggaaaaaggacagaaagagcagcagaatgagtagtaaacaaatagcgcaattatgaatggaaatgatagcttcgagcaaaaagaatgaaattattgaaaattgtacaataacgggaaagttaagacaaatactttgaaaatttccaacacctaaactaaataaaaattatcaaaacacacccacaagctaaattttcaattccaagagggctagtggcgcattaaaattatacaataaaactagccaaacaaaatactgagtaattctttttttgtaatcctagaacctattacaaattcaatatggagatcgagaggaaaaaaatattaaattagcccataacaagttcccaaatacccagaaattattatgataaggttataaaagaaaataatttaatgtcgaaatttataaatatatatattaaatactatctcaataacaagaaggaagaaataaacaaattatatgaagggaaagacaaaattggaatttggcgaaagatgatgatgatggtggtggtggtggtggtggtggtgaaaagtgaagagagtagagagagagagaga

SEQ ID NO: 225447 - DNA, 3343 bp, Cannabis indica
tcaaacaaatctcaacctgaaaagtttgtgaatacaaaaggaatcagcaagtcaaatatactaaagacattaaggtaacaatctctgaatgccttttgcaaatgcagaaaacaacgtaagaactgcaaagataagttttaattcctcttgacgcaaatatgcaatagatggttctccagagatttctccttagtattctgtaaatgcaaatgaaagtgaaaattatgagaaaaggcttgatcacagatatctaaccggaatattaaaggactttaacttcttccattcttcttcttcgaagcagcaagcatgaccaatcctttggggcataaagtctaacattgaccttatctctgttggattaggtacctataaccactaagtacgaaaaaaaagttagttaaggcaatttcaacatagcatttacaagcattagaaagataaaagcacctctccacagtgaagggttatacaaagaccttgttctcttgcaaattttaatgctggcaaaaacgtactcctgccacacatacacgaatttaatttaggatgtaaatattaatggtcagcgctaaaactttggcaaacttaccattctcccacaatgggatttccagacaggtcaataccaacaacccctagatgtctcatttcaagagcaagcttcacctacaacaagtgaaagacaattatattcaatttatggaaacacaaatttctaaatcaaatctcactttcatacttactgtctccatcgcagcctcagtagtctctcttcggtcaatgctcaacagaagtctgatatatattttctttctttcagtcccattacatgtatcacttttaagtacaggatccatgccactaccagcatcaccatcaccatcacggggcataaaatcaacatcaacagcagtaacagcctttagaccatctattacagcttccatgtatgagagttttgtcattcctattgaatcatttttctggataagaacaaaaacccaaacacatcaatctcttcacccacaaaagaaacagacttataagagcaaacagttcacttaatacaaacctaatgtttttgtaccttgggggttgttcttagctccagatacacaacattatcagaagcaaagtcttcaacaacctgttttgcaatgaaacagaatattcaatattgacattaaaataaaacaaaattgaggggaaggtttttaaaaataaataattgaaaagttctcttacttctttggtgattcttgtaataattttgtgatcagtggtaagaatgtggatcaagtcaaacaatttgaacacttcatgtaaggtcctctcacctgaatcagacataacatacataatttatagcttaaaattcatcaagctaacattattgtgagttactaaaacaaaaatccacatgcaaagttaactaaaaataccaataaaattaagtaaattaaaattcctttcttctcaagtttctgtctcaagaaacaaacagacaacaataagaaaaaagatcaagagaggaaaatttaaagcttactcttcattataacatgctcaacatctgagaaagctatgacacctttgtcacccaaacctctagcaagttcactgcaatcaaacactaaataaataagaacaaaaaaaaagcagaaaattatagcaataataaactgagaatatttagtgtgtatggaaaaagaaagaaagaaaaactgacaaaagagtggagtctctggcggatccattgagatgagcgtgaagctcaaccttgggtatggagtggtacgtctccattttcgttgttcgtcttcttcgtcttggttcttcttggctttcgtccttatcttttttttctccgctgaaatatattatttattagtaattatcgtactgttctctgtgcagtgcagcttagtatcgcctgttgtgatgttacttgtcactattttttgggcccattctgattttagactcctctgtgggcccaaacactttttctttttctttttaatatatttggattttttttaatgaataagttatcttcctaaaataaattactcttcttaaaaaaaaaaaaaaatcttctaatttttaatttgatagatatggtttactaaaaaaaattatatacaatttttgattaagttaggatctcattacacaaatataaaaaaaaaaaaaatgagtgtatgtatttcacctttgaaataacgatgtttaagaactaattaagcttccacttcaccaaagaacatgaattatcaattaaaaaaaataagaagaaaaagtgggatttgaaaaatattttgaccttttctcctacttgtatattttctcaattttgggttgggttgtatgttgtatgtctctgttgcttttcgttccagtctctctgggtcaaaccaattattgttagaagttctatcacatcggccacgtcaccacacaccttgttttcttgatttacctggacttgtcctaatataggcatccttatgaacatgggcctgtgagcccataacaagcatctacagcccaagaaacaattacaaaattaacacattaaattcttttttttttaagcaaagaaaagataatttttattccaactaccaccaaactatactaacaagcttcaaagaagcaccagaaactcaaaaggaatttaccaaagtaattacataagtctctcttctactaagcttggagaacaaaactcctttcactcttatctttaatggccaaattaaaattaacactaatgctcctcatcacacaaaatacaacaagaccattctgaagtaaagcacaccatgctatccaatcttccaaatcggaggccgaaaaaagagaccaaaccaactttaaatttcctgaaccaactacttattataaaaaatattatttttagtgacaactttttagttacaacataatttttttttggactaaatgtaattattagtcataataaaatatcacttgtcactagacaaaaacattgttttttagatacaaattgtctctaatttaactttactcacaacaagtattgagactaaatatacatttagtcacaacaaattataatttttgtaactattacctttcgctatggaccttttagtcacaacataaaaataataatttataattagtcataattttttatgaatttgtagtacctttagaaatatgcaatcataaaacagatactaatgggttttaatctcagcctcatacactgggcagtaggtggaaggaatcaagaagattttgccaagataaccaacacattaaaattagggaaatttttattaatata

SEQ ID NO: 225448 - DNA, 3764 bp, Cannabis indica
atacattaatatcataaaatggagcaactccattacagaacccttgagaactatgaaaccaattttgaacttgtgaaacaagtttcgaacctataaatcatgtgaaatcggtttcgaccctatgaaaaatcataacaaaatttgtgaaaccataacaaaacttgtgaattcatacaaaatcataacaaaaccagcttgtgatctcgtaattgttgcaacaccgatctgagatgcaattcatgttcttcttctgatttaaaataaaccaggatgtcatcactaaacacaatcacactactgtctaggtattccttgaatacctgattcatgagatccataccaagtacagaacgtagcctaggctcgatgttcaccctaatgatgtttcttgtatttttgaacattctagatttgattagaatgaagatcagcgaccttgacggccacctctgtttccccgaaactttctgttactccctaaagttcggaaagcatcagccttccgtttgtgatcagggttaccaccatcggtccccttactgaaattaccactaggaggaggattcgatgccgtggcaacatcctttacaatctgctcctttattacatgttgcttagcctcctcagcaattaaggctagttctaccactttcttatacaaagtgtcatggctagtggtaattttcaagtcccgattgattgtggcgttcagtcctctcacatacttctttttcctggtgaaatctgtaggcaccaaatcaccagtaaatttggacagccgatcaaattccagaatatgagaccacaaaaacattttttcctaagtcagtttcacaaaatcttccatatgtgaggtctaccttgagtgtctatatcatatcgatgatagaatttgtaagcaagatggccaatcttgccacaaatttgacaaactagacgagaaccatgttcacaaccattggagggagcacaacctccaaatttagagcctcgactttacgagttgccacgaccactggattgacctctgcctgtgttgctgcaagtggatccaaaataattcttgttaaattgagcataattggcttgtgcagagtccagaagttagggcataacttgttcaattcgtatttcatggtttttaagcatgtactggacttcttggagagtgcgagcatcagctcttgcagtcagtaaaaccaccaccatttcatattcatggccaacacctccaagaatgtacgtggccaattcttgatctgaaagtttgtgaccaacatcagcaagagagtcaccaagattcttcatcttcaagatgtactcatccacacacatggatcctttcttggtgttctgaatggcaagtcgaagttgatgttgtcgagccttcgattgagtggaaaaaaggcttgcagagacggtctaaacatcagtagcagattcacagtgaagcacatgtccaagcatagcctcagagataaaattcataagccaactcattaacagagcttcacaataagtccaatgatcaaaggcagggttaatcgtgttcgtacctgcaagaagtggatctggccatggagtggtgccaagaagaattccttcaagtccattagcacgatttgatggaagaatcaacgagtgtcagtaagaataattgtgtcgatctagtcagatatttagaggaataaggttatttagaatttgaatttgtggtgcggcagcctaaggaatgatcggtgcttctggtggatgatgaggagcattatggtgggaatattcaggattggccataggtatgataccatgtaagagtagagaatatggagaaagaaagagaaagacaatgagaatgaaagaagatgctcaactcaagatgtgagctgttatggccttttatagagtttttaatagaaaatatttacaccagacaataacaatcactaagtgaaacttacagcaagaaagataattgaaaaaaacaaacaacataaccacttaactaactctcacattaatgcatattaccagttacataagaatataaagaaaagggaaaatgagacggtctaaatggtaccaaaaaatcgacaccgaaaacaaaatataaggaatgaaatttgttcttcaatttaatcgtcttctctataagagctcaaaataaataaatatctactttaagattgttagaaataatttaaagagaatatgaagaacacaaacaaacataacaatatattattaattaattgaagaatataaatataaatacaaatgataagatgtaaaactagtaattgaaaagaaagtcgaggtacgtgaaacacacttttcttaaagcagatttgcgccctacttgagtggtgctagaggattagggagaaaccacttcctaagatacaacgactaaaaaagtagatgaatacactatttttactactccagtgaactatgattaataccttctctctatcaccttaagacttacgaaaaacacaaaaaacatgaagacaagagaacttttaatgagtgactctttttgttggtgtatttagaatgaaaggtgaagcctccttttataggcttcatacggggtggaatatcaagtgtgaacactagaaaattaatgccaaaaatcccacaaatttagtaatattgatcaatcaaaatcttcaccataatttctgatatcaattagaatatttaccattattacggtgattacatccttgaacaaatctacatttattagcagctatcaatggaccacatttaaggaatcaatttctcattcacatattagcctaaattggctatttattatatattaaatataatttttttcaacaatttatattcgggctaggacatataaatctcaacctatatgcaaattttctactctcgtgataaatttaaatacataggatgcattaagcatagaaatcctaaatactacataaaccataaaggtattctcatcctatgtcaaaatctatgtctgtttcactatagcatattcaatactcacttctaatattttacattaaagtcattaaacaattaagtagtgatcaagcaattaaaagtaatggagtacggatgaaatagatgcacatagaaaattagaaaagaattaaatcacattaaaataaaaaatatagtgtcaaataatctccattaataaccctaattgaaaatctagctagttatgtttattgtaaataactgccaacaattaattaagaacataaaagaagagtagaggaaaataactcgtcgaaaaatattgataaaagtctccaaagttactttctacttcatactttcgtccctaatgattaatggtgctttgaaaagtgtcaaaagggtacattatatagcctttcactagagttaaccctaattttctctaattaaatgagacgagttgcaacattgaccctccatgtcacgacccctgaaggaggtttttgggcagcgagcttcctagtgcgacaactgataatattttagccataattctttcaatattgctcgaaattggacgataaagatgttttggaaagctgaaagagagatctaaaatttttattcgcaatatttttcctcaaagtgaatgtgtcatagtcaaattagcttgaagctttagacttgactttcaatcacaaacatagtgtgttgagcatcgcgaaacttagaattttttaccaattatatcctagaactctaaattctatgataattcatcatattcatctcat

SEQ ID NO: 225449 - DNA, 6701 bp, Cannabis indica
ttcttaatgccttcgatttttggagcttagaaggaaaacaagtttcatgtatgaaggttatgtattagccattactctttttatttcaaagagccttgaatccatctcacaaagacaatggtattttagaagtagacttattggtctgcaagtgagatcactgctcactgcatcaatttacaacaagcaactgagattatctaactctgctaggcttatttattcaagtggtgagattatgaattatgttactgttgatgcatataggattggggaatttccattttcgttccataacacttggacaactagtctccaaatctgtattgccttagtgattctcttccaatcagttgggttggcgacggttgcagcattggttgcaataattcttactgtgatatgcaatgctccacttgctaagctacagcacaagtttcaggtgaggcttatgacagctcaagatgagaggctgaaagctctctccgaggctcttgtgaacatgaaggtgttgaaactatacgcgtgggaaactcatttcaagaatgtggtggaaagtttgaggacggtagagttgaaatggttattggctgtgcagtttcgaaaagcatataattctattctactctgggcatctcctattttggtctctgctgcaacatttggagcttgttattttctcaaagtaccccttcacgccaacaatgtcttcacatttttagcaactttacgccttgttcaggaacctattagatcaatacctgatattattagtgtggtgattcaagcaaaggttgcatttacaagaattgagacttttcttgaggccccagaactacagattacaagagacagtcaaaagttcaacttggagagtggggacaaagccattatttgtaactcagctgatttttcatgggaagataatttatcaaagccaactttgagaaacataaatttacaagttagccctggtgaaaaggtggctatatgtggtgaggttggctcagggaaatcaactcttttggctgcaattcttggtgaagttccaaatgtacaaggcagtgtaagtaatctatgcactgctaaccttcctttcattcaatcaggttaaggaaactaaccattatcatcttacttataatttcttgaatttcagattcaagtttacagaaatattgcctatgtctctcagacagcatggatccaaacgggcaccatacaagacaatattttgtttggctcccctatggatggtctaaggtacagagaaacacttgagagatgttcactagtgaaggattttgaactgttaccatatggtgacttgacagaaattggagaaagaggagtaaatttgagtggtggccagaagcagcgaatccaacttgctcgcgcactctatcaaaatgcggatgtataccttttggatgatccattcagtgctgttgatgcacatactgctacaagcttatttaatgtaatcattccttcccaacaattttagtgtcttaattatttatctttgtctttctttcggtttggttcttattatgcttacttgatttcaggaatatgttatggaagcactatcaaacaagacagtcatgcttgtgacccatcaagttgatttcttacctgcatttgattctgttttggttagtcttcttcaattcaagttccaagaaatatgtcttatatctatgactatacttaataataataatactcaattgttgacagataatgtctgatggggaaattttagaatcagctccttaccatgaattattgttgaaaagcaaagagtttcaagacctcgtgaatgcgcacaaagagactgctggttctgaaaggcttgcttatgtaaataccacagagaaacttgtaacatctagtaaggaaatcagaaagagtttcacagaaaagaacttccaagtatctacaggagatcagttgattaaggtagaagaaagagaaataggagacgcaggattaaggccttacatacaatatctgagtcagaacaaagggtacttgtactttatcatcttaagtacaagtcaccttatattcgccattggtctgatgttgcagaactcttggatggctgttgctgtagataatcctcatatcagcacattgaagctaatcctcatttacttgttgattggatgttgctccttaatagttttgcttttgagatccatttctatagtttatttgagtattgaatcctcaaaatctttattttcccaactactgaattccctttttcgatctccaatgtccttttacgactccacacctttgggaaggatacttagtcgggtatgcatctagaacaacagattcaattacaagtacaagacttgttcataaaactaatactcatcttttatctttgttcttgaacaggtttcatctgatctgagtatagttgatatggatgttgcatttggcttattctttgctgttggatcgtccatcaatgcgatctttaatcttggagtactagctgttatagcctggcaagtgctgtttgtatcattaccaactatatatctggcctttctgttgcaggtaattaagttatgcctagttttcttgagattatttcttagttttttttacattttttcatgtcatgtgtcatacttctttgactaatatatatattctttttctcaatgaaaaaatcattagaaatattactttgctactactaaagaacttatgcgaatcaacggcacaacaaagtccttggtagcaaaccatcttgcagaatctgtggctggtgcaataacaattagagcctttaaaagagaagaacaatttttcatgaaaagtttagagctcattgacataaatgctagcccattttttcatagttttgcagcaagtgaatggttaatccaaagattagaaacactcagtgcaacaattcttgcttctgcagcattctgtatggtccttcttccccctgaaactttaagctctggttagtatttaacaactttgctcttggtaccattttcactacctaaaaataaactcattcatccaaaacaaaaatttgtgttgctgcaggatttattggaatggcactaacatacggtctatccatgaacatttcggtagtgaattctattcaaaggcaatgcattctcacaaattacatgatttcagtagaaagactgaaccaatacatgtgcataccaagtgaggcgcctgaagtgattaaagaaaaccgccccccaaccagttggcctaatgtggggaaagtagagataagtaacttacaggtaaataaaagaatctactctttgatggtttaaaatagctcttgaaaatagaaagaatgctgatgcggtgttgattttcgaaaaaacagatcagatatagagccaactctccacttgttcttcgcggtattagctgcacatttgctggaggacataagattgggatagttggtagaacaggtagtggaaagactactttagtaggagctttgtttcgtctagtggagccaactcaagggacaatactagttgatggcattgacatatgtaaaataggacttcatgatttgaggtcacgttttggagtaatacctcaagatcccactctttttaatgggactgttagatacaatttggaccctttatctcaacattctgaccacgaaatatgggaggtaaccataatacaatgttatactaatgtatcagttgaatgaggcttttgttttgacaaaacaaggtttgatcatattttccctttttctgactttcaaggttcttggaaagtgtcaacttaaagaagcgattgaggagaaaggcggtctggactcgtcaggtaatgacaacaaaatttgatacatgacaagtaagtgacacattaagagatgtcataagtgttgttttgctattctcagttgcggatgatggctcgaattggagtatgggacaaaggcagttgttctgtttgggaagagctctattgaggagaagtaggatattagtgcttgatgaagcaactgcttccattgacaatgcaactgatatgattctacaaaaaaccattagaactgagtttgctgactgcactgtcatcacagtagctcatcgaataccaactgtgatggactgcaccatggttcttgccatgagcaatggtaatcttcaaacttgtggttattccactctgtcaatactaatttcggtttgactaaatcattttcaaaggggagagtctagattttcattttgaaatttgattttggatttcaggaaagatagtagagtatgaggagccaatgaagttgatgaaaaaagaaggatcactttttggaaagctggtgaatgagtactggtctcatttgcaatctgctgaatcacattgatactacttagaataaaattgcaagtcaataggtgacattgcttagctcttatattgagatattaatgagtatttattggatgaaataataagttatcttctataatcaatcaattcacagttgattctctaatcttcatgtaaccaatatagaaaattgttggcctttttatgaatagcacatgcaatattttcattccatagtaaaaattaattacaaatgctatttggtattttttctttctaagtttaccttttcggaaagctcttttttattgggaaaggtcctaaaatttacttttgggtaaggctatagtgcatctctaatgaggtatttcagtagtttccctatctgtttcggtatttaggagagttttttagtttaattttaataattttgaattacctgcaaattttcaaaaaatttcaagtagctacaatgctgaaaataaaatttacatattttgttgcatgtgtgactatttttcttatatgcgaggtatgtaactgtttaaatcttattttcggcattgtaaactatttagaattttttaaaaatttacaagtagtcttacatagctacaacgtatgcaatcataaaaaaaaaaaaattagactaaaaacctctcatggatcctgaaacagatagaaaatctagtaaagcgatcatttagggatctactacagaaatttccaaagaattttatatcagaagagttttataaatctaggtctgttttatggatctaagtctgaaacaaaatctgaaactcaccagtaatttaatgagtaattaaagtatttttaaaactttggaatttttttatattaaattcaattacagacatagtatttatccagtgaaattcttttaaactaattcaacaagaccttgtagaaaagaacatctcagagcttaagtaattcaagaatctaattccatatttattacaaaataagttcataaatcaaactattggagatcttatttataattgaattaaattcaacaaaacaaacatcaaacacaaatgtaaaagcctaaaaggtaattaaacatgagaagcaaaaacaaacaaacaaacaaaaatctttatttgttttgcaatatcaagacattgacattcaactacatctaatatcttgtactaaatattctgccaaaacctcccatctactctgaataagaagtgtaatataaaaaggttctctttttttttttttacccaaaaatagttgagtccctacttattttataatccctacttaattaagacttgcctttttgttagtattatattatgctatttattggtatcatatataatttgatactaattactatttacaataattctttatgatatccaaataataaaaaaaaaaattgagtactaattttcaaatttaaatacttgtgttacttgcataaaaaaaaattattagtatctaaatataattttattattgaattttaataaaacataataaaaataaaaatataattaatattaataattatttaatgacatctaaaaaaagtattcgtattgcatcccgtcaggttcttgggaaagtaccagcacagagcacctcgatcatcctgtatatactttcgggtctgaagtggtttgttggtccttaccctctaaattttgaatcaaccattatcatattcaatctccaagtggatcaacttggttctactgtgggtccctttccttttacagggtcacgagatagcctggaattagtagaccaatgagaggtagctctcagtggtaatcaagtttccttacgattcatattgctctgagtagggtccttattggctcggtccaccgagggtttgcttccccattaatgggtccctcacttctggtttgaggcttgtcagactcttgatgggggttagcttccctaattaggggtccttcacttttgatttgaggcattttgggctcttaccaaggatttgcttctagggacattagtgtcagttgcttgaggagcattggcagtgctactgggactagtagctgtagcattttgtgcatttagggtttcaccccaaacgttggtgcctatgtggccagttggcggacgaggcacccttcctctagtggatgacattttccctagttgtgtcatgttatcaacttgatattcatcgcgtatcgattgagccatattggctctcctctgcctctaggcaacttgctgagcctcaacgctagtccattgctcttggaactagcattgtgttgggtttggtgccctaaataaaacccatt

SEQ ID NO: 225450 - DNA, 2172 bp, Cannabis indica
ccgcaaattatggttatgaatgtttatttaaatatataaattagctggataataatattgatatattaaaaggaattttcaccgaaatataggagatcaattgtgaatatctgatatttcttcaactgctaatctccaaaattttgaattattttttttaaacaaattatagttttatggaatatattcttgatatttctgaggttgtctcataatatttacaaacaatatttgtattgtatctgtttgcttttaattcaaaactgattgccaagctcatctaacaatttaattaagtaaaattatatatttttacaaattaaacatttaatttagtaaatataatattgtatttataaacatagtctaaataccactttttaggcttcaagtctatatttctcttatctaacctcaaaaagaaaaaaaaaaaaaaaagaaagaaagaaaaaagaaagtggatatagaaataagaaataataatgtcaattatttttcttttaactagtaattatgagaatgaaaataacaataatatcgcttaataaattatcaaatttatttttgtcaagtaaatacattggtttctttttggcatttattgttgatgatacaacactaaacaaactctaagctttaacggtgtgtatatatatatatatatttgtttgtttgtatatgagcttcattttcaaatataatatctggaaattgccgtgggattgggttaattagggatggggccatgttgagagttggtgcctttgacaaaaactaagtagcagttaaatgctattatgaataattttgccaactaatactaaattgtaattttgttcatatatttttctacgaaaatgaccactcactccacataaatcaacactcatttccccctaatttagtcaaaaattgaagccaaaaatttggttggaaaaaaaatgaataaatccaaaaataagagtagtgctacataccaacaatgtagttatccaaaatggcatccaagaaataagaaatataagtttcttcagtccttgaaggtaaggtggttttttctaacttttttcttttcaatttaaattaatattattgtgatttatattaaaatatgtgaaacttcatattaaatattgattatgtcaagtaacattcgctagttaaaaaattattatagttgtagaaatggcctaggcttagtgcaaataattaaataattaaacacacatcatcaaaatttcatgttaaatattttcctttcatccatatctttctaattacttctaggttagtcattcattctttaccaccatcatctttacaacttatactttgcaaaaagtcctatatcaaattagtcatattaattatattattattatttaaccttgttttctcattatatcatctagtgattctcttactaagtttcaaattgacataaaaatgtgatgatatacgttttttcataggtttttttttttttggcatggctgtgctagttctttcacaaatattgctagcaataaggattggttgcaccacttcatgttttaatcaagtgagcgtagcaactttacaatcattttgtatttctatttggattaattaagattttttctccctaaactttaaaaaatactaaattaaattcttgaatttttcgttaaaaattttctctgaaattgagattgttagattcaagaaattctgtctaattacattcaattctactaacgtgacaattgtacatgtaataaatcgtcccatccaaactttgatatctactaaattgtgcccccagaactttgacatgtatcaaattatactccctaaactttcatccacaccaggcttctgttagtaaaattaaacgaaattgaacaaaagtcattgaatccaacaatttcaatagttcgagaaaattttttaacgaactgagaagttcaggaggcataatttgctatatatcaaaaattaaagggtaaaaattctaattagccaaaaaaaatatttatgaagtattttatttcttattttgtgaaaaagaaaaataatgaatgaaaatatatataaggaaattccatgatgaatcttattgaaaagtttatcatgccttttttttaagtccatataggtataattgtttacatgaaaactgttgggttttat

SEQ ID NO: 225451 - DNA, 4187 bp, Cannabis indica
aagacccaattggatcagaacctgaaattgggggacgatttggtaaaaaaaaatccatttataattcattcttttcctgatctctctcaacaaactaattgtgtatgcggtttaaggttcaatttattttatatatatttttaatttctagagttatagttgtgattatatatagagttgaaatatgttaaatatcagttcaaatattaatatgatttgttttattattattttattatgtataaataatattttattaaataaaaataaaaagtcacccataaatttctcataaaccaagaatttcagttatatagatacactttatatagaatagatgtatatataagtgatgagagagagtaatgaagagctagggctaagcaataatgggtatggtgatgtgttttttttgtgcatggtttgaggaggtatttataggaagaaaaatgaaggagaatatgaggtcatatttttttataaatatatataaaatatttttaatgttattttgatttccttcaacgtggacagattttttaatagaaaaaaaaaataaagaacatgaaaatcaagaatattttggacattagtttgatccctattgacaaaatatatattattgtattcacatggtcatgtctttattataattatttgggtctagttcgatctattttgattttgctagaatatacttatgtatacatacaaagcccccacaagaaaattaataatcatatatatatatatatagaatatacggtttgatatattcaaagtatgaagattttagagcaaactccaacccattactagctattaatttgatagttttagctatcaaactattatataattaactgaaattattatagctgaaatttatatcttgaattttattattaattacactttttaaatatataattttttgtatgaattcttgaattgtgtcatattaactgtaaattaagaaattataaaataataataaaaaaaataagctaaatacagttgttttgtaaacgtgaattatattagtgcatgcatgtatatgtcaataaaaacatatttaattaaacccttaattatataatataattagcatataattaagttgtataaacagtggatgaattcgagaacagcataaactatgcaaaaatgttggaaaagttcattcacttatcattttgaactaaaaaagtaactaataagagaaagaatataatatgtcattaatattgtatataagtttttggagtatatattaattaatatgtaattgctcattaattaataattagtacaagaagagacaacgaacaagttcctatatactaattacgagtggaatattcctcaagtaatcgatcatattcaatatcattgttattggaaaatacagagaaaagagcctcttattattataaattgtccttttattcttcttcaaactcttccaaaaatgagaaagaaaaaaacaagaaagaaatagaagacaacatatatatatatatatatattacttcttttttactagatatttattctttattaagtaaattactatatcagccagacctagagatttttttttttttgagtcgatgtcgtattttgtaactataattcgatttttgttactgcgattagttttgagtgttttattaattttatctttgtaacatgactttgagtgttttagttttctctatgtgatatagttttattttgttggttatttgttgtaatccttagacgactcgccatcaagttctttgtgatcagtgaagaagttgttagtatagtgtatgtattttatacaatatatagttgagtgcttaagttacgatgttgaatgaacttgctgtaacagtttctatatattgttgtaacttgtatcttctgagggatggatgaaataaatatactataagtgttcttaaggttaatttgtgatactacaattttttttatctgattttattttaattttttttatcaaacaatttaaaaattaaacaactaattatttgattcatttttctaattttaatcattatggtgtctttagtaaagagatgtcgtaatttgattggaggatattattttaatcatttcataatttattaaaatatatatatatttatatatataaaagaagagaaaaaattatatatagcattctaataatgtggtcctactctagcagtactgggcagctggatgggagtaagctatagattgaccttttaactacattgtcttaattgtctttttcaaatcatatacataattacatatcctctcgtcggcgtatataatatataatatatatatttattgtagtagaaaataaaatggaaagagtttatagtatattttagggttgagttgtgaactaggtcgttttcttaagacgtttgtagtattgtttagaataattaatatgcaagatttggaaaattagattatcaagataacataatccagttagtactgtctcagactagggttgcacattgtgcaggtttaatcgagttcgggttttcaagtatcgggtgtaggaaatcacatacaaaacccactcgttatagcaccgagtttagcaagtttctggtacgggttttactcgggtagatttaactaggttttgggcgagtttgggctttcattcaggtttgggttccaaattatttttcttcaaaaagccactttgtaacaaaaataaaataaaattctaccatcatttttgttgaattattatatgtttgttaaaaatttcacataaactattcacaatgctgaaagatagaacttttgttgagttttatgatacatcaaccacatcatcattaaacatcagtattatgtgaagaattagtgctgacgatgcagagagtttttacagtcagcatagtggtccctgccactgccacttgtcatcagctggtatcaaaccagatttgggaatttccatgaagatcctaccgttataattttctaatgattgcaatcattgtataaagcagattccttttttattttctgttaagatttgctgccagctgtaatagggtaaatacccttctctgtattttgcctaaaatggctccatctataaattcaatggaaatctctcagcattgattgagctgagatttgcaatatcatattttcctaaaattcaacttggtatcagagcgggaatcaccatgtctacagactcccaaaaccctggaaacaactcgactggccaacctacagctgctgctgcaacctctactgtcatgggcgcaagttcagccagccctcagctccaaaacccaatccctcatcacttcagcaccctaaaccagccattctccctaaaactagacagacacaactatagcctgtggaaaactatggtctctaccatagtaagaggccatcggttagatggttttctcaatggatctaacaaatgtccctctgaatttgttgatgcaggtacaattatggaaggcatagatggagaagtgtcacaagttgtcaaccctgcttatgaaaattggatcataaatgatcaactattaatgggatggttgtatagctccatgacagaaacaatagctacagaagtcatgggagttgccactgctgcaggtctttggcaagctcttgaacaactctatggtgctcattcaaagtccaaaatggatgaaacaagaacactgattcaagtcacaaggaaaggaacaacccctatgatagaatatcttcgtcaaaagaagaactgggcagatctgttagcccttgctggagaaccttaccccgagtcacaacttgtcacgaatgtcctctcgggcctcgatgttaactacctgtccattgtgcttcaaatcgaagcaagagccaaaacaacatggcaagaacttcaagaactgctgctgagtttcgacagcaagatcgaaaggctccaagcactgtcatccaacaacaaactcactcacaatttatctgatccgcaagccaactttgttcaaaaaccacatggaggaggtcaaggcagagggacaaaccagtattctcagcagtatgggagtcatggaggcagacacaccagcagaggtggtggaaatcgtgctcgaggcaggggcagatttggtggcagatctaacaactcaaagcctacttgt

SEQ ID NO: 225452 - DNA, 3935 bp, Cannabis indica
ttttcgttttttcttttaatctggtagcttattgttttctgccaaatccaaaacatattagatgcctacggtgtccaagaaaagcttctaactttagtagaaagtgactcgtgaacccaccctccctttattatctgccacaacccagaattcatcatcatcttcttcttcttcgtatttggtcttagtttcagtactccttctcgttgctgggttaccattagattcctcttctgagttattttgttcttggtagttggtaccatccaaaagtaaaaaggggcttcgatgaaaaggactatttgctccttgctactactgtgctaatggctaatctatgagagaggttcgaattctaatcaattttcatcttttctcagttactttaaacctttttgtttattttgcttaattgtttattgggcagttgatttatttttattttatttttttgctttgttgatttgtttggagttgttaaagtctttccaattagtccgacctctttgattcttgtataacagtcaccacaaaaattttgctaattttcttaataagtcatttagtggaacatttgattgtgtatttcattctttagatcatttctcttaaaaaactcctctattttgtttaagccgtcattgaaatcctcatattaactacttacacaactgttttttgtaatccaaaattgggttttaagcacttttcaatgatttagtgaccgtactttgcaagggaaccagcgctgtactctttgcctaagtctgttatttcgcaagctatattctcagtttctcgattaatttactttatactttatgttctcttaccaaataatattttagcccctttttcttattgataaataggctgtttctcaattctgtttttcttttttgagatttctcacaccattgctataaatctgcttgttccaatcatctaggggatgtagccccattaaactttaatcaaacattgcacatgatacgatttatgtatatgttttttgatatggcctgtttatgcacaaagtttggtgattagtcattaccctttttgaagacaacattggtatctgtctaaatagatattctcaatcggtttgacgtgtatctgccacagttatttcttccacttttcttttcatgttttaaactgaaacagtatttccttgtccccttctttttcttcttgaaaaaataatttgaagacttggttattattttactctctctctctaattactttaactgtggattgtattagtagaggaataggatttttggagtattactgaagtgggattagtgaagtgctggtttgttatttgaatttctaactttcttggctttgatgaaacatttttttttgtttagtttgtttctgtatctcatatgttgtctgtcacaagtgcattgtgatgattctcttttgaagcaattttggttttttgagtgaacatgcatagagcttgtctgtatgctataatggattgtttttctttgaattctgtttgttgatttgtgtagacagtggctgagaatcacgaagatgttccactaggatattttcataccaatgcattcattctattaagaagatatagttggtctttttttatcttctatgaagttttatgatttagcaatactagccgtgtttttttattaattttcctctctctcaattcaagtagtatttagtcttgttggcactgaatatgaatagatatttcaaggtttggccatatttagattcatgtagatcttattccatttccttaataatttttaatatttaatgttagaaatttatcagattatttcttttcattttccttcataagtttttcatagttaatgttatgaatttgtaggactaagtgataatcacttacttgaagacaaattgtccatgaagtttatctctctctattgaattattgtttgatattactctatcctttgaaatacataaaaaaaatattgtttgtgctttgttttttagatcctgagatccatgggtacatcagttgcaccagtggactgcatggggtcgttgagcacagatattttttatgatatattgaggcgtcttgatggacccactttggctagtgcagcatgcacttgtgctgccttctcttccatctcaagagaagagaaattatgggaagatgtgtgttcttctttgtggccttcaaccaatagggaagatgtcaaatatttgatatcttcaattggtggattcagaaagttctatgcagattgttttcctcttattgtaaataaggaagtttctgaataccaaatgaatgaatttcgcgagtatccagaagaatggaccgaaactgaatactacggtgacatggatgaagttgagagtatttctccttcagattttatttctattgtggatataaggtataaggagaaaacaatttgctcaaaagttttatgggacattccaaatgcaaatagcttcaatggttggttttacaactgcccatttcggattgatctgctcacttatgcagcaagagatgatgatgattatggtgaagttataatttcagtttctgatggtttgccaccaattacatctttggagagagaaagaaaagacgggaaactatggcaggagcttcgtgatgggctccaacttagttggattgttgtgaacaaaaaaatgaagcaagctgccaattttgctagctggagcgctcttggcgggcaaaggcactggccaaccgacagagactttgtaatacgctttggatccatacttcctgcaaaggacattcttcctcgtcaagtagtggaatgcatactcagtacgaagtttagagtggttcaaacagaaggagagggtattcagacaactcttaagttaacagaggtaagcatgcagttggaagatatggaaggttctcacgtcaacggaaggaatagtttacttatcctaaaggaggcactaagttgccgtaggagtaaaaactacagcgaagtcctcgaatcttgtcatttgtactcgaaagtgcaggatcagttgaaagaggataagatgagaaatgaaagcaggttggatagactctgcatcctatgcggcattactgcatttataacgttttggtactgtgtactatgaaaataaatgcctacttattttaacatgtttccttatactacacatgtatgatatatctaaccaagttgtccctgtatgtattcttctgatgtgaattcaaaatttggtttagttgataataatagaaaagttcttgcatattaatattccaagtatggatttcaaccagttgaatgaattggtggcacttgtttctggtcccattttgatgtactacaggcatttttatatttattttaattagtttggaaatatcgttattgttaacccgtaatgccaatattggctcttctagtactaatatttacaaatttaagatatcgtctccttaaaatgtcgacatcatcttcatcttaatgtgtgatggattatttataattgtttcttaagttttttaaagagaaatttgccgtcaaattcttttaagtttcaattagtatacatttaatcttttttttttatatctatatttttattattttagtgataaaaatccttttgtttgcaaatttaaagtatgtattaaatgttatagttaaatgccaattatgataccaactagaattgctaatgtgtgtacatggcatacttctattggtcaaaataattttaattatttttaataactttcaaaactaatttaataaaattcaaagtattttaaaattgcaaaagtaattaattattggtaaaaaatatatctttcatttttcttttccttctaattaatgtctacactttcttctttgtgtagaggtgtttattgaatcatattcaatgga

SEQ ID NO: 225453 - DNA, 3485 bp, Cannabis indica
gatgttaatgaaacatacttgttaataaatctagatcctggtaaaatattcccaacaggacacatgttgcacgagggtcacgtttggcaaacaaaagtgtcatgggaacagtcagacaaaaggggtgtatgaaaatgcattggtggcgcacacactaccatgatctgacacaggggacaatatgtgatcatgtgttagaaaggtggacacgtcagtttaggacaaacgtgcgcctctcgtctcgcggtagacatccagtactcacaccctgatagatgttcgactatcatcctatggtaggcgtccaaaagtttcctgcgtggtttgtttcgaagtggacccttatcttcatttgaaggttttatgcttccaagtgagcccttatcttcgtttgaaggttttctttcttttcgtgtctcagaaggctagggaggattctaggccttgcaagaacattatatccccaaggcaaaactttgggccttcgttgggcttaggcccattcgaggtctagactagcattctgagagcgggaaggcttaggtctaactttatgtggtgattacattcagattatgccacgtgtctctcttccagaaacacagataacatttatccccaagcttccaacacttaagagtggcaaaagcttacagtcttcctttcaggcgaccttagagtcatcaggcatgtggacaatcatgaaagaagtggaagcatttttctctttccagcactcatcaattgaaaagtcaagaattaatgtagagaataatcggcatcacatgcgtgtctccacttccctaattcgtgagtgccatgccctttgggaagacacattttgtgtgaaatgatggaatgacgaccatttactgtcaatgtgggccccgaggtgagtattaatgattaaaaaacgtctcgtttcctataaaggcatctaatgttgtcccctcacttccttatccattagatcacaattttttaatttttctagggaggtcttggcccttgatttcaaagcacgtgaattgccactcttgcctatatataggcgtgagggaaccactttcaccattttcttatttttgaatttttgagcttttgccttcaaatttgaacgaaagctttttaccatagaacaatccccaaaaattcctagcttcaccctttggtgaatgaacaatctctttgacattggcatccaacttttactataaatctgagcgagggattacaggagcgtcacccctgaatcctgttgtgagccacccctagtcgtctgaaatagttgacattcaagcgagatgtgaacagaatcttcgttaagctttcaattcccaagccaatcaccctcgtcttcctctattcccgcgtcatattacaagtaagtatctctaaatttttgaactttttaattatatattgtaataggaatttatattcgattatcgatttgagaaaccattattttcatgcgaatactaagagggttgaataagtagtgtttggattatctgataattataggtctgttgaattgtcaatgcatgctatttttctgggtatgttagctcgatagtccctgtttgtgtaagtaggttttgaactggattgggccctaggtctccacatccaaagctactagagctttggatgggtctttttagatttcttcctaatttttttaagttcccaatctgctactcagaggtatggtttcaataggactgtactttcgggtaacaggtctagaggggacttctctaagaaattttaggggaggccttcccttgtagccttgttgtcttcgtggtttagggtatttaactgcttggatctttctttttcttccaatgacaactcctaatggagttccaccttgaggctgtggatctcgaggatgttgaggtacatgctctggtcaaggagccaaaaatagatgcagtcccgaaagaggccccaaaacggaagcgcaaaaagaaaaacgttttgattgtatacaactcgtccatttgggaaatgaaccaaatcaagaataaattctagggctacgatatgttccagtgactcagataaaggcggattccgaaacattccaggtctatgttggaacatgctctccctttcaaacgaatctccttccaggagtgtagatgggtttagtgcttggagttgggcccacatctcctgcggaacccatctgttgatgtgaacttacttcgccaacatttgtacaacaatgatcgtgtggtatgccatctcctccatttatgctttttcctctagtttcttttctgccaataacttctcgtcttcaaggactttggacactttctgatgtactaagattccttttagactttttctccatagtgcaaagtctccagttccattgaacttctccaattcaaatctcgccattgatgacattcaaaatttcttcgagaattgtaacagattgaatcttaattctacgttcttgatcgattaccaggctctgatttgtgaaaaaattaagactaatagtgcaaaatcaaatcaatgaaactctaaacaatcaaacgattagtaatgacaagatgaacaaatcgagaacaacaatcgacagtataacatgggcaaatagagtatataaaattagaaacaataaatgcagaaattaattaaagaaatcaacaccaagatatatattggttcaagtctgctggatcgatgtgatctatggctgtactccaactctaaaacaccaccaaaatctttctttattgattgagcaagaatatgtacaatacagtcgagacgagattctttattgagtcttcacaaagtgtttcaactctcacactttacactcaagaatcttcttcatctacagaagattcttcttacaaaactcaaatccaatctctctcttttctctgcacctctctctctatctctcgatctttttctctctcaaactctcaatctcatctgaatagagctttgaatctcttgtatcgagtctatcgtaaaatgataagtgaaggtggtatttataggcctaggatcaagatcttaaaattagtggttgcaagaaaataaggttgttaagttagttaaacataactaacttaaccaactcctctttgagcgaagtccccacgtcaggttaagtattagagccttcgagaacaaatatgagctcctagacttaaggactaaggacacttgctgaaaggctttcggataggatagagccagctggagtcatctatctagatctaccattctaggagggataactagccaactgaaactcctttctaggggagagctaactatcttgaagactaatcttggaggagacatgatagttaccgggaacatcctttgttaaatattcttctcatacttttttttatttcaaatataataacaataataataataataataataaagagctatgaataaattaaatttgaagagtactaattacaacc

SEQ ID NO: 225454 - DNA, 3590 bp, Cannabis indica
tgagtgggagagtcattatattacgctgtaatcaatgtaaggttacttaaactttatatgtgttgaaattccattattttagaaattcacatttaggatgttaataaacatacttgttagtaaatctagatcctggtaaaaatatattcccaacacgtatggcttaggaaagctaaaaagggtttatcacttcatcattttctcttcagagaatgttcttgctcctttgttgagacaaaaataagaacatcatattttctatatactatcgtcccacactgatccttgtgtgttgtggttgatctcaagatcaatgtgtgagtttcattactgttcttcgatacaacatacgaaaagaattaaggataccctgataggcatcaagaagtcaatattctatttcatctttttttgttttttgatttaatatagatacacatggagatcttagggtatggtacgatgataatcctcgtaaaatgcttctattgcacacctaatttagtatcacaaaaccaacaataaataggccttgatcttatgaatcgacaataatacaatatttgattgttaaaacagttgcctaaaccactttttttagtattgctcgagagttttcaaaacatgagtagaggttttatagctaacgacacaagtgagaatttcttcagtcatcgatgaaagaagccatgaatatatagagaagttgatcttgaatctcccactgagtgaattgaggattgacaagactagattcttgatcacgattggtgagaaaggtgaaggattttgagatgaaatgaagtagttaatggcctttgatattgcatagagaatctgaggtcgccaaagaagaaattgtcagtatcaagcttaattgaaagcttgtaagagaaaattattggactgaacgaactagtagtagtagtatgagaggttgttggagtagtagaagtggaatcagacattgtcagagaagacgaagtgattggagaatcaacaaatgatcagagagaaagacaaaaaaggcttttgataccatgtgaggaataacagaatagagagggagagggagagagagttgagctgaaaatgattcacttcattaacagatgagcaatgagctcttatatacaaacctaagaatttgtttcaataataactaaatgtaactaattacatctgtcaaaaagttaactaaataatctttaagcataactaacttaacaggttactaaagctatctaagggcttgtttggtacactacaatatattatattgtataatattatggtgtgttgaattgtattgtattacattagtattatttaatacaatactatgtttagtattgacccattgactcggaatcgtcggacctcggactcgaccccaaacccggaccccgactcaaacctaagacctggacccgaacctcaaacctagaccttggacaccgaaccccgaaccccaaaccccaaacccccaaactcagacccagaccaggaccttggcctagccttgaaccccgaaccacgagtccgagtagatgggtctatgttcgtggtccgggtttaagtttgggatccaggtacgggtctaggtccaggagtatagatctagggttcaggtccatgtccatgggtctgggtccatggatttgggtccagggtccgtgtccaagtccagggtctaggtttgggtcaagggtccgggtctggagtttgggtctgggttcgggtccgggtttaggtccgaggtccatgttcaagttcggggtcaggacccaggattcgagttcgggttttgggtctggggcccgaggtctgggtatgcggtcctaggcttgggtcggggtcgtagttgacccttgaccctttgtaaatattataatacaagctattacgggtcatttgttacatattaaataatacgactcacaatgtattaaaatttatagtcgtgatatttaatacaacataatgttttatccaaacataatattatttgttatttaatacaatactacctttatatgacctaccaaataagattagtacatcctaatttgtgcacccttaattactagatgaacatggacattaagattttgaatttaatttaatttagtttttttaaagattaattttgcatttaattattttatatgtattatatatgacattatattggacttctaaaatcttcccactaagtattaggtgaaccatttctcaagtgttcataagtttatgtttagattttctagcataaagggatcatgttatgttgaatttggggtgtatatgtataagctatacgtgggtaatattatttgaatatagtgattaaacagtggagtgttttcaagcccaaattagttctatccactatgcaaatggaatgtagttgaggatcaagattctcttattactcaaggaagagacaagctattataatagaaaaaggctcgtgaagagaattattggtcaaaaggtatcctaataagcaacttaaaagagttgttaaatatagataaaataattattaatgtatatttgggtcggtagaaagctaaaatagaactagctagtaacgtagccaccaaaacgcgcaaatttattaattttattttcatacctcaagtactacacatttcaatgattttcattttatataggagcatcattattagataataatattgtctaataatatcacttaaagttggtattttgtgattgatcactaatattttttaaaaattattatattaaattaatacttaattataccaatagtaatatgataacttgaaaggtgttagattttgggataaggtgaatgaaattctatcttaaaattaattgacaatgagaagagtagcacattcatcttatatattctattatctttcaacatattagcaatgtaagactctctaacatcaccttcaagatagtatctattttatttgctcactatcttaaacaactcgatcataagcagttctttttggctcactatccctgattacaagtggctcttttactctactttttgaatcggtatttatgaaattttggtaactcttttttttggctcactattcccgaatcacaagtgtctttttttgggtcattttattttttgtttatttttgctccgaaccatgttagattttgagataaggtgaatgtagtcctatctcaaaactaattggcaataggaggagtagcttattcaacttacaaatattatattatctttctacacattatcaatgtaggactctttaacagaaagtactatgcactattggtgtcttttagcatttaaagggaagagcattgatgtgggacactgccatacgattgattaatgatattctttaaaagttattacattaaaaattatatgagattcttcaataatactaataacaatataatttctaaaaaaagtatcatcttatttgtaccttttagcatttttcttttgataattattacagaatatcactaattaaacagactacactgggggcgtttggtacgaggtgttcaaaataatttgattataaggaata

SEQ ID NO: 225455 - DNA, 4865 bp, Cannabis indica
cacaaataactcatattatatccacgtatttcaaataaatctccgtaattaacaaatatgtggatataataactcatattatatccacatattttattccacatataggtcatattacattcacacatacactactacaaaattggcttttcccaacggtttataactgtcttttatattattttccaacggttcctaaaaccgttggctatgtgggcgtcataaaaatgcagaactttaaatgacagtttataactgtggcaaaaagttactttaaatgacggttaagaaatgtcagaaaaagtcactttaaatgacagtttataaccgtcgggaaagacttccatcgggtaataactgatggaaaacatctctttaaatgacggtttacaaattacgcttatttaaaaaatttacattttatgctgaaataaattagtaggatcataatcccacttattacctgattaactcataatataaataaaaaccctaattatttaccattagacttattgggatattacattttcaataaactcgaccccaacaccaactacgggttcaggtccagctctgggtacgggtcgcgactcccaggtttgaatccgggtcttgtgtcctggtctaagttcgggtctgagtccgggttcaggtctgggtccaggtccaggtcccgtgtctgagttcgggactgagttcaagactaggtcctagtttaggtctaggtctcgagtcccgggtccgagtttgggtctgggtctgggtttgagtcccgagtccaatctcaagtttgggtctcgggtccagattgatgtctaggtctggctccgggtttaggttcaagtctgggtttgggtccaggtctaggtcaggcccagtctcgggtctgggtccaggtctgagtccgggtttgggtctcgggtccgggtttgggtctcaggtctcgggtcatgggtcaggggctaggtcctgggttcaggtctaggtcccaggttcgagttcgggtcccaattcaggtctcaattctaggtctgggtcctgggtttgggtctgggtcctaagtccagtcctgggtttgggtcttgattatcgggtctaggcttaggtgtcgggtttgggctcgggtctcgagtttgggtccgagtctgggtttggggtttgaggctgggttttgggttcgggtttgagtcccaattcaagtctccaatccaggtctcgagtccgggtcctgcgttccgagtcctgagtttcgagcccaagttcgggcccaagatcgggtcaggatccaggactgggattgagtttgagttcgagttcaggttcaggtctcgggattgggattggatcccgggtgagtcccgggtgagtccgagtgtgggtccgagtctggaattcgtaatttttttttaatatattgaaatcggatcggaccggatccgatccgatccgaaagaaaattaggcgggacgaagtgaaacgaatctaatctgagacccaataagtatctgaatattttggatcagaagtgatccgtcgaatcaaaactctgacccactttaattaattggattttttttgaaatggaggtttactgtttatggcagcacataaacttgcacatgtgcatgtttttaaatataatgtatgaaggcatattctgtatttatggccaaggagttatatattcccattaaagtctttttttttttgaaacccattaaagtcttttaaaaatagctaaattaaagcaattaattatgaaatagttaaatcaaagtgactattatcaatagttggcacattgaatttggttagtaacttattaaaataaaagttttgacaacaagatgctatattaattgttgcacataaatatttatatctatatatatggcatagagaacatccacgactatggtttcaaatttgtttattaattgtaaagcgacttaatttaagatgccaaagtacaatacatggaatttatataaaaatagagagaagaaaagtagatcttgaaaagaaaaaaatatatatatatttcctatgtaatttatttcaaacctaaaagtatttgtagaattaggtggggttcttttttttttgggtgaattgtgatgctatctcttttcaccactttaagaatatatgttgagaaaataaataaattaaatttttaaagttttgttttatatttatcagccataatttatttttggttacgtttatttgtcaaaaataatcttttgtacacgtctattaggtagtggtgtgacatgaatatttatctcaatttcaactaataattaactatatattaaaaagtatgtatgacatgttttttttttttttgaaatagatatgtatatgacatgtttaggtaatagaaaaactctaaacacagaaatatatatgtatatattatagatgacatgttgtgcattgcttttaaatttgaactttatttttattctaataattattttgtaagcgttcgaataaacttcgagaaatactttggttctttaaaaggtacgaactaggaagcatgtatcaactagcttctcaatgcttttttattttttaaatgtatctttttcttttattattattattattattattgttaaaattaaagaagaaatacgtgaagatatgaatgagatagaaaatattaagtgtcattaatttattaagttatttttcaatagccaggataacatttttttttaaaattattcatctaaaactatattttgagcattctaaacaaaacttttgttaaaggggatgatgccaaacatgctcattagattagtactagctttttattttttttattttttttaataataaaactcaatatatacaaattaatataggaacataaatgttgtataaaatcaaatgagaaagggaataattagtgattttgttaaatattgaaggtttggattaaataagtacggtcttgtcctttcacgtagaatcgaaggccacctctaaatgggcaccaccagacataaaatttaattagttagtcacaatctcataacttatataaattataaataaccaacttattaaatttctttcttgccaaaaaaaaaaacacttattaaaattcatattaattaatttcagcatttttttatgacacaactttctcctccaactaccataacagctggagattgaacttgccactctgtattttttttttttgaacaatgtaattgtactattgcaaactatgtaaaacctcatatactttttgaaggattacataccacaacacatcttagccgttggattctaaaaaataaaattttgctaagatctaagggatatgtgatgttaactaaaaagtgagggcaatctaacaatagattttggtgacctattctattttgtgccattgtactttattcttatttgtaaactcatgttcttcttctcttcaataaatatattttggcaattcgacacactttttactctacctatatgtatgtagaaatttaatcaaataatggaaaaataattttaggaaatttattaatatcaacaatttgtctttagaaaattaaattaattattttgaacatcattaatataaatttacatagctccaaatcaactaaaaaaatttatggtaaaagtctctaaaaaattcattttaatgtagataaatcatcaacctcataaaatagcagtaatagtctcaaagttcgagaatcttgtaagtccgttggtcctcattttaacagatttgtgagttactctaaaaatgacacatgttaatattaaatagtgacataagtttcaaaaagtttactttgattcggataaatctctaatttcaaaaaatagtaaaagtctttaaacttaagattcttgttagtccgtaggtacataattgaatagcttcgtttatagttcttaaaattaccacgtgtcaaaattttgttggtgcatatcataaaaaattattttaacaataaaaatattattaaaaactttaataaattttttttttcttttattgaagattaaaaaactttatatatatatatataaaaaatttttacaaacttctacgatttgccacctacccttctcgatggtggaggcttactgtcgagtatcgacgagtaccattccttcatctccacattcttccccatccatcccactacctaagaaaaccaattaagtataagagaaaagaaaatatgtgatgaggattgagatcagatctttgagagagatgaaattttttgtttttttttctttatgtttctaggaaactgagagatatggatggagtatgccatagagaaacagagatatggatagtggtgggttttggtggtcgattctttgacctcaacttttttcggttcaaagtttacatagacaatttttttttagagtggcttctcttgctaatagaaattgaagagttttagtagagtagatcagggctgggtaggttgggatgagagtgacaagaagaagaaagaaaaaaaatagaacagataaaaaaattaattaattagttttgaaaattatttatttatttatttaaaattaaaattatgatttggaccaataaaatattaatacgtgtcattttcaggagcaacaaatagagaaattaaattgagtgcctacagactaacaagaatcttgagcatgaggctattaccacaatttttaaacattgggaacttatctgcatcaaagtaatttttttggagacttatactgcaatataatatcaacacgggatatttttggagcaactaacagatctcttaaattgaagactaacacacttacaagaatcttgagcttga

SEQ ID NO: 225456 - DNA, 2582 bp, Cannabis indica
aacaccactcgatccaactaaaaaactaattggaatttggaccaatcctctcaaccataaaggaagacagagaagagcaaaaggaattagagagaagttagaaagttttcaaatgagagagatattttagaggatacataaattttaacatatttcatcaatattgggtaacttaaattttggttattaattttaacctaccatatgcatgtaaagtccaatttccttattaatattcatattcatatgggtcaccctagtactcttttttctcattctctaaacaatatattaccattaaaataacacatttttcatgttacttcaatacacacaacacaacacccttgtatgatattatgagttagattttaacattttatatatatataattcttttgactggattttttttaaaaaaaataaaaataaaaaaaaactttgagattttgaaaaatttaacatggtcgacctcaagaaaagagaaaaaatcaacaaaatatagaaaaacaagttgatgtgctttttgtacgaattcttgctttaaagaagaaaagggaatttttttggtagtaaaaggtataatattaacactaaacactattccaccaccatttattcttgctgcttttttcttgtacatatggccaaaagagaatttaataattacgtattttttatatatatataaaaaaatatataaaaattacttaagcactgagctgagactgagaaaaaaggtcctgatacaggaatacacacactacagatttcacttattttgctggttttcaaaaagttatggagacaacaattggtcatggatccagagaaagggaagatgcttttggcaccattgccaccatatgagagactaattgtttttctaatattaattatattataataatatcaatcttaggcttaggaatcctaagagattaatttaatcctagattgaaatcctacacacaaatatgtactattcagcacattataatcaccacaaaatacttcaaatttatgaaagtcttgaaaacaagggggagggaattgagaagaaagcactgaaggaatgcttaaactttcttgcattcaacagagaccttaagctttatttagatcaaagtgtttgtgtttctacaagttgcattaaaaaatcagagttagttaggaaaacagaaaactaactctaacaaactattagtgtatcatccccctcaaacgaaacgggtagataccactttgagtttgtctcatcaagttcgttgtttagccgctgatctcggacgaaatactagtcaattttgatgtgtttgcaacgagcatggaagatagaattggctgctagagaggctgcatcatgattatcaactcaaatgactggaacattagctaaagtaacctgtaattcagttgataagggtcggagccacttgatttcagcagccctattggctaaggcacagaactcagattcagtaaagaatctagctaccacttgttacttctttactcgtcaagaaataaggttggaaccaaaaaaattgcataaccacttgttgaccatcgattatcaatgccttgcccaatctacatctaaataggcaactagggacattcgagacataggtcgaataagaagaccatcagaagtggtgcctttgaggtacctacataattttttataagcttcccaataaacatgtgtaggaatatggataaattaagacaatttgttgacaatataagcaacatcatgttctagttacaaaatgtttgtgcaagagagacgctaagctttatttatatcaaagtgtttgtacaagttgcattacaaaatctgttacgaaacaagagttagttagggaaacataaaataaactctaactaactattagtgtatcaagtctaatgatactcaacattgactctcagcaactgccatgtaccaattgtaccattacttcaaatgctgtccaaatattcaatacaaggaaaatgtaacaaatacatttatttatgagttgtgtataaggggaaagaataaatgaacagcatcaattttcttttttatttgttttagagttcattacattacatgtaacattcaaggatgtatacattgtaactagatacttataataaacattttttttttcaatttacaagaaccccacacttcaccggagaaaatatttagataattgtacaacctttttgtaattttgatgtattttagctcagtataaatctagataaaaagtttcgaaacctcttttaaataacagaaaaaggcaaatccaactatagttaccatcaccagttcagagaccaaatataagtattgggaatttgattccaaaccttaagctcaaggcctaaagccccaccattccaccagcatcatttgaataacacataaaacacactattctttttgtgtataatttgaaaaagggaaaattgtattaagtcaataaaaacttatatttaatgtagataagtctccaacttcaaaaatttctaacttatataattccacaatttttcaactccattagttgtgcttaaaattacca

SEQ ID NO: 225457 - DNA, 3110 bp, Cannabis indica
tctttctctttttcaaaaaaaaattcttgtaagaaataaaaagccaaagtagatgtagctcctataccatcctaactaccgtcgcgacatgaagagtgaactactataaattttgcatgtctctctaaattatatacttaaatttattatttatttcgccaatctaacgagctagtgttagtcacttttcagcatcaacaacttattctagaaataaaacaaaccaggataaagttttacaaaacggaggttaattttgtaaatttagataactgttacattaagttagttcgggagagttgaatgtctcttgagttgccttccctcttccagattctcaccaatttataaagaagtaattcagctcaatgtgtttgtctttttctctcctctcttaatctttctcttgctctctcattattgctaaaacccgtccataatttcctaagagatattggggatgttaacaatgtacctttacaccaatctacaaaatattaataaattttttatgaacaaaaaaagaacaagaaattagaattgagggatatgtagaactttaaattgatgtactatatacaaagtattaaatgctatcaagttcgtaagacaaacaacaaggtaataaaatggaatattcccttacagtgacttcaaaacgaaaagataaaatgggaaaaaaaaaagtaaaaagacaaaattagaagcgtttatcgttgttgcacaatgctcacttctagtgctatgaaactgttaagtttattgtggaaactaagcctggtgtgcagcaaaattgcagagaaaaaggaagaaacgcctgaaaccaacaatcatattaatctcagggaaacaataaaacagcaaaaggaagataattcctggaattcgagagcttggactctcctaacaacccaccaaaattcccgtaaacccttttatcacgcactccactctttattacaaaacccaaaactaactcagccttctcttttctatgagtcaacatctctcacaacacaccctacactcatgtcacaccttttcgtctctattctttctccgcacacaagtgtatttgaatattggcctgaagtggccatattgtaagactcagcataaaagccaaacaaacgaaactaaaataaataaataaaaggacgggaaaacaaaacagaggaaaaggaaaggaaaattacgataaacttactcggtttataacaacatatttttcttacaaacttaaactaagggcactagttataaaaaatgcattcagcttatgttattttctctgtacgtataaatcttgaaacagaagaaattgagaaaagagatgaaagacaaagtataataagtaattccaagtctctaagtagcataatgagcttatatcttgtatccatttcattgttctcaagaattatagttttatttataggaaggactatatcctaaaactaattttgttaaatcaaaagattttggtgcgacaacaagagaaatttacccccttcgtggatattgtaattgtattcctatgcaaattactactgtatactattttattgtctaatcaactgcaatggagttgtcatgttttattatgtatagtttcattacattatggcatactgttaaatttcatttgtaaaaatgcaattatgcatcccatgtgtgatgatagttgaaactttatggctcatgtgtcatgttacttgctttcaaaatcagaaggaaataactgcttttctttattattttgttttgttaaatgtagagaatttgtggctttcttcgtgatattttgtagctatatgttgtcattaaggaccacttttgggtagaaaactagagcttggtatcttttggagtttatttcctagtaaaagttcaaatagccatgcatgaaaattttgctagggtatgctattaaacattaatcttttctagaaacagaacatagaaacatgagaggggatgcacacaaataaaactatagtcccatgtgtgattttagcgccagataaaccttgcaagactggcataactcatgaataacgtggctgaaaatttatatgcttcttgtattcaatgtcaatcaaattcatcttttctcttttaatttagcagtagaaaccgtttgaataagtgcatttttctttagtatgccttgagaaagttgctacataatatcatgtaaattttggttgatgcctcaagtatgaggactattttaatttgttctatgctattctcatctctgcctttctttttcctatttcatcatattcaagttagttttgtctgtcaaaggtgttctgaccttgcaggatgattacgaataatactgaagatttttcttgttttagaacatgtcgctcgtatgtatccattcattcctcgcagaagagatcattgacagttgttttttttttcctttcagaaaattcagattgacgagtatataacacataatctggcatttggggatatcaataaagctttcgatctcatgaaagagggcaagtgcttgcgctgtgttattcacatgtgaaagtatttcttcttggttcaacaaaattataaattgcagaaattgcaatgatggaatatgttctttgtaatgatcgaacctgttgtgaaatatgaccaatttatgatagcacatttggttgaagaagactaatgattctgacttaaatatttatttttatgttgtacccttattcttaccaccttttgcttcccttctcaatatatccattggattatggttgtttgagaggcacctcgtactcactcatgatgaatgggcgaattcaaggtcaatattaagggtgagaaaggtcttaaaaaaagaacctatctccctttaatctttatcttgatgatggagtatttgactcaccttatccaacaagctcctggaagaggaaattaagctgagaaggcctagaggttgcgtgataactcttgaataaagagttatttgtcatgtttttttagcttaatttgtgtgtattttatttatatttagttcttttccttcccattttgtgaaaatatatgttattttgtatttttatattcttttgagtaatttggagttg

SEQ ID NO: 225458 - DNA, 3952 bp, Cannabis indica
tttttttttttttcttcattatttgtttgttttttagatttgtgtgtttgtgtaaatgtggttaaatcccattgtttctattttggatcctttgattatttgttgttttagaaggttaagaaaagctaatagaaattgttgtgcttgttggcatggtgggttgggtaccaaatagatccttatttgcatattctctaatcatagcggtatcttcatacctatttagtgcttgggaatattaactgtttgataggacaattctcttattacttgagatacacttaatgatttaagagttattgatgatagtgttgactatgcatctgaaattgcttcggaaatgatagaattgtttctttttttcctttttcttctctctctctcaatatatattatttatatatgtatgtaagctttttggttcagattgatatgcattctcacttgagcatgaggctggcaagtgagtgggttgtgggggtctttctgtatttgcggtcccgtgttcaagtcccgtatatgctatttttctcttaatgatgctatattgttatatggaagtactgttaacggccagagaattgtttaattggctgatataggcaataattgtttccctttttctgaacatttttttaacgttttgttttgtcacttggtaggttaaactgttaaggtttttgagacttctatatttgagtgtttggtgttaattgttagtaaaaagacgatgtctagtggtgtagacacgcactggtgttaccaatgcagtcagactttctggcttcgaggaggagatgttgtctgcccttactgccatgggggctttgttcaagagattgaggagattcatggtttggggtctcagaatgtatctgcccctgattcaggagaagtagtttctcatcaaagtcaaatgcctgatatttttgatcttatgtatgctttgatggggcgaaatggctctgaccgaagaattatagaaactatcagacatagaatggctggaagaaatcctaacttcgatgttagaagaagatctgttcccgaacagaattgggggaaccccaactccaattcgacaccttttttagtatttcatggtcaaattccaggattagctttttctaatggcagctctggaagtggacataggcgtggtgattttggtgactactttgttggcccaggactggaagaacttattgaacagctgactgtgaatgatcggcgcggccctcctccagcagctcactcttccattgatgcaatgcccactatcaggatcacacaagtgcatattcgtactgacttgcattgtcccgtctgtaaagaaaaatttgagttggggtctgaagcaagagagatgccttgtaaccacatttatcactctgattgtatcgttccttggctggttcaacataattcatgccctgtttgccgtgttgagctgccccctcaaggccggactagtagtaccggcggtagtcgaagttgggttggaggaaatggtaacagcagcaacagcaatgtagatggtaatagctctagtagtagggagactggtcgtcagacctttggaagaagaagcgcattgtcatatctctggcctttccgttcatcaaattcaagctcatctagtccaaactcgacaatttcaaactcatcacttccaaacacatcaaatccaaacactcgctacaattctgaaactggaggaaatagctcatcaaccacccttgaacataacaatgagatgagttactctggttggccttttgattactagttgtttgcttggttttcttgtccagtggcatttgacaccaaataaaagctaaataagtatggtttggtgtggaaatgctttgaaaatggtatgttcttttgcattatatatactattatataatgtagcttaaggtcagtagaagctcgatggacttcatgtaaatgttgtgctggctttaaaggggctgcaatttcttttgataaatagtttacgttttttctttttgttcgttagtttaatgaatgaatgtgtcttatagagtcttgttttggttttcctggctttttttatgtttctctaccatccctttcattagttttccttttaacaaacagattactaagattgggataataatttggtttcctttctattaaaaagaaattattaaattactgtagttttgtgcttggatgattaattaaaactgagttgaatcatgtggagtttaattttctgttttacacgtacccatttaattaattaatctgtcaaaacagtccctaaagtgagtcagagtctgaaacattcttctttttatttcttgcaatcttattcatgaacttgaatgttattgatattttagtaaactagacaagagtgtagaagagtaataatagtactcatatccaaattagccttaggcaccaaactagtattagcatttttcttgtactttctctataaagcccttgctggggcctaggcataatctcttcattttcattggactctttttttcaaactttctttctttttttctctatctatcctctttaaggtacctaacgcatctttaccaccctcttttttggttgtttccttggctcactcagtgcactctttcttttcacttgtgttcttctatccaataagtacaacccttttactcatttttatcactcattcttttatttatctttttgcttgactatgatataaataagtagcctatctcatttattgatagaaaagaaaaacgtttttctctttaattgaaatttttatttccctaaaagaatttaaacttgtttactctaaagtgttgcttttaaggaagttgctgtaactttgggttctaacataattagaaatgtttggttctagttaagtatgcaaacaaaattgattgtgaaaaataatggttcaatcccatgcgaccatagtcgagtccaaattagttcagtcgaagttaaaaataatattgaagattgtttttcccttaaattttgtgctcaactatctttaaatggtcgttaggtatgttttgggtgattatatatatagggacacgatttgtcctgtgatgtactttcacggaacgtatttcgtggtacattggatgagtctcactcagattaaataactctcccatcgaacaactgttgtacatcacgggacaaaatcgtgtccatatatatataaaaataaaatatatattgtaatataatattttttatttagacaagttgtttaatctaaagtgaaaattaaattttgaaatacttggaatgcaatgaagaaactcttcttggaaaaatatgatctgccatctgaagtggcaaacattcagttggaaattggtgcattcacttttacgcgtcattatattagcaccgagatttgataaaaaaaaaaaataaaagataaaaaaaattgtgtgcaagctggctcaatctcaaccatccaaaattgttattcattattttgtattagagttttattagcacactataaaataatcaatacactttattattaaaaaaatataaatttaaataatttttaaaaattactcatagttttttataaaaatttcacattattttatattaattaattttaatatttatttttatttcatttttaaaatttttctaactcatgtatatatattttttatttgttgaagaaaattttatataattttttattttatttttttgttataatatataaaatataatttatttttatttgataagtattttttaaaaatatgaattagaagaaaaaagttaaaaaaaaaacttagtagaattaaaaatataaattttatataaaataaaaattattaaaatggaatgttcttaaaaatttttgaggtgtaaataaaatttctatttttttaatgtattttttattcttttgaaaaatttt

SEQ ID NO: 225459 - DNA, 2453 bp, Cannabis indica
aaaaaaaaaaaaaaaatattggaatgaaaagagaacaagttgctgggtattcgagagacccaactctctcccaagagctaatgctcactttagcaaaataattctctaccctattaccctccttactcactcatatatatagcatcaatccctcccattacaattacccaattaccctctttatttataccctaagacctaacacacacattctcatcaaaggtatcagttgaggagagaaaagcttcttggtgattacctgagttgttggagttattgaagaaatgaccaatgttgttttgctagtttagtggggaagagtttgagcccacgggtgcttgaaaggaaatatcaaagcggtgatagaacttggaagcaacatggccaggatgagtgcatagttgacatattgtttgatttcctcgaccacctcacccacaaccacaacctctattgttaaaaccacaaccaacaaaaggttgagatgaggagccaggaagatttggaggcctcaaggttgagatgcgaaattggcactagggagtctttggtcagtaggagcattgagttgatccaaatgcatctcttggctttgaagcatgtattggacttcctgaaaagtaagttgttcatggcgagagctaagattgataaccattgcttcatagtcatgaccgagaccccaaggatatagagtataagatcttcatcagatataagttggatagcagcaaagaggttatctgccaagttgcgcattttgagcatatagtcgtggattgaaagatttcctttattgatagattggagttgaaaataaagttgtagagtactggctttggagctagtgacaaaaagaagttcaagagcgtcccatggttccatggatgtttggcaccgaacaatgtgaccaaacatgaattcacatatggagttcatgagccaacttacaatggtttggtcttggggtacccaatgttaacttggcgagattcctcttgttgtgttgttaacaaactgaggtgggcatattttagttccgagaatgtatccatcaagttcatgagctcaaagggcagacttggaatttccaaaaggaataaaatgtgcgatcaagttttagtgtgagaggagccaaattggaagaaagaaagaagccaggggcttgactagaagatgcaagagagtaggctacaattgatgtaggaatggaagggaaatcggtggtgaaggatgttgactccaggaatggtggatgtgaatgtgattggttgagcaacactcttgtttgttgcagaggagtttgtatcagattcttgtggggaagccatggatacaaatcacgagctctgataccaagttaaatggagagacaagagactaaaattattccttttattgactgtattaattggctcaaattacaaatgaggaaaacgtgagaataaataggagggaacggttacaagagaaaggcactgattggtgagaaaaatacagctcatcattggatgataatcctaatttggtgtatgaaaggacatcttcaaggaagatttgcacaagtgtgataactggcacaaaggcacatcctcaatcgtgcatatgcgacttcacacctgatgacgaagggatttccgtatcctctgtttcaataccgatcattgccacaacaagactccaatcgtttaaccctagttcctacttgacacagacaagacaaattcccactaaaacaaacaaaacaatcataaattattgttattgtttaaccctagtgcaaaataatgttacgtaagctcaagggatatggagtctctagttcttagtcatagattaatttgagaatctaatattggactatcactccaactccaagtcatttctgattgtctacaggtagctcaagtcaacagcttcccaaaagcaattaactgatgcctcttctgatccttccttttcccaaaatgtaactgttgactgtgttcctcgtgtagcattggggacattctacctccaattgtttttgtgttacagctgtagaaatccgttagtgtttagcttccctaagcttctactgtaaaatcctatttatactctcttaatgaaagatttagtcatgacttccattcaactcattgtcactctttcactgctttactttctcaactttttgttattgtatctgaccatttatttcgataaacagtatctttccccgaaaacaataaaataatgttatatgaccatttatactctccttcgtaggttttaaatctctaaaatttcaataaaaaataataaaattaaaatgtgcaagacacaatgcactgctagaattcaagcagttctcagggaatgcatttacaaaaacccacaacttcaataatcgctcctttgaatagaaaaaaaaaaaaaaaaaaaaaaacaaaaaaacaaacaacaacaataat

SEQ ID NO: 225460 - DNA, 6753 bp, Cannabis indica
caaaaaaactacaataaaagtaacatacaaaataacaaataaaaaataacatacaaataaacaaaaaatcaacaacaaattaacaagattacaacattaaaaaaccgtattttctagtaaataaaaataaaaaaaatcaataaaaatgtttaaaattccgtgaaactgttatttttgtaatttttttttttttttatgttttcgtgaaataatctttttatttaagtccaatatgtgaatgttcaactcaaagcccactattattgtattgttcaaattaattttttttttgcgtatttattttcaagccttatagtatttttgacgagtattgctggtgatagtctaaaccgcagaaatcgcaccgtactgtactattttttacagtgaggtttctgcgattttttagttttgatgtgcgtgtaatttagaaaattagaaaaactgcatgtgcgggttggtttgaaaaaatagttaaaaaccagatcacccatactgcgaacacccaatgatgtttgttacgaggcatgagcattaccctttcttattagttttcatatcacttttgatatttattattggttttcttttaatattttgatatttattatggttagttatataagtccatactccatatcaaatttctacatgtttgttaaattttggtatcaagttaaataactttaaataatttgtcagattttgtatttcttttatattttgtttggagtgatacaacaaaagtttctatataaattagtgaaattttttgtagtttatattttagttacatatgttactacttctatataaacctagaactttgtttgatgttaacaatagttgtaacaaattttggtaagatatgcatgttgcttttatagtactaaatcaggtacgtagtgaaataagtgtttttattattatctcaccatacgtctaagatccctatatgtatatatattaaatttgaaagtgaaaacatgaaaagattatttacttcttgaactctatcgatgtattcttgaatccttttgcatgttgtatcttgaaacggtgacgtcaaactcataccttgatcttttagatctttcaccacacacaagaattggtgtgtgtcagtgggataaaaagtgtatatgaagttcttgtttttctcaacacatgagcaagaacaattctataatattaatggagataaaagattaattatttttaagcttgcttaaaaggtacgttaaaattctgtctcagaatttgatttatattgtatatttaataaaagcttacaaatattttatttgacttatttctaaaataactaagtcattggttatgctatcatatattagcgctcatttacccttttaaacaaggatatataagagcattcatatataaatataggaggccagtactgatcccccaatataggttaggaatagtgcatatatatataaataggatttggcatggtttcaatgtaaaaccaggagctgtaggggagtggaagagagcatggtcatctactgtgcttctctctctcgtcgcgtttccttgatctccttgactttgttcgtttcttcctagtctggggttcttcgctgtatgatccttctgtttcgtgtgtctgttttgttggttttgttccctgtgtcgtgtgtgtttttctggttggggtttctcgtttgtttgtcttcgtctatctgagtctctcttttcttttgctcgtgtttcctcgtggggctgtggttgggtttgtccatagctgttgttggtttgttgcgtgtttgtccttgtctgggggtattccgtagtgtgagttagtgtgtgatagcttttatttctttgttgttttcgtccctggtggttggtgggtttgtcatttgttgtcggcatttatggaggtagtaaatgcttctagttctacttctcctcttaaaggtaagtgcctttctgttaatgatgagttggtaaagttggttccttgcgaatcttctcgaaaagcactgtccactttttgtctgctgggaaaagtcgtggcccccatgtctgtgagtgaagctaatgtagtggagtttgtggccaaagcttggaagtttcctgtgacagtggtggcactggctgagggtcctaaatacaccaactgttttgagctaagttttgcacgtgaggaagataggagctgggcgctggaccatggcccttggtgtatccgtggctacactttttttctacaagtttggtcttcaaccagtgagtcccctgttttgagtgatatgatgcgactatgggttcaggtacacaatattcctcatgaatatttttctatggaaaatggttatttattaggaggaaaagctgggaaagtcatttatgtggacttgcaagagaacaacccagcctcttggagtaaatacctcaagattttaatcgaaatagattttaaaacacctcttttttcgggttgctttttcgacttggactcgggagtcaggagatggctccagttcaaatatgaacaagtaggcattttttgctactattgtggacgcctgggacatcaaagaagaggttgcaaactttcttcgccggagttggtgactagtgataacgggatccccttccctctgtttgggccatggttatccacgtcgtcaacttaccgggatgtgttctccagcgccaactcctttattccctgtcgagaacaccatgggtatgccctttttgcctcgttccgtcgtccttccaaagcggttgttctcggccatggcgatggtggtttcgggagatcggtttccaatgctccccgtggttcgagacgttccaggatggtgactaggcaaggctctctgaccgttggttcttcctagcgtcctgtgtgggtctccaaatcgaaaccagctggtggtgtacctccggttgctatatcaggtagagagggtgctgttgggtttgaagaaaatgaaaaggagactgaaccttttcctggaatagaaccgcctatttctgaagctacaaaagaccgttcctcgatgcttgagcctaatttgaatatgtgtagaaaagaggggttcatttctttagtgaaccggcaccatgttgggcccatttctgaaggtgggccgattgtttgtaatgacccaattggtgtgaaatgcttgaaccaagaaaatttgaatattgtaactgttggagataatagaggggatgttgggtctgttgctattggaccgtgtgtgagtgaaagtgggcaggccgtccatcatgtggacaaaggaaaaagcccaatgctccttgatattaatatgggtaatgttgttagtgggccatctctcattaataatgctactctctcgtgtggacctgctttggtggagtctcaggttttttctaatcctaaccgtgggttaatggggccggctatgttgggtattaatgctaatggtattgggccaaatttttcctctcaaaataatgttgggcatgtggaggctagttcccatttgcctaatgtctctcatggagccgtggagcactctaatgaagaaaaagcattgactcaattttttaatgctcaagaaagcttattgcatgacctcaaacactttgggaaccttgatttgtatgaaatacggaaaataggaggggacattagggtcccggcttcctctgaagttaatgagagaacgacacctttcaagaaaaggaaatttgaagcgtctgcctctctttgttctaggccccataaagttccgcgcaagtatccagaagttgtccgtgactttccctgggacactaggcaaaaagcaaacgattctgatttggtgattcatgacccttctgaggatagctctagctccccgagctgctccgaaatattgaagaacgccctggttggttcatttttgatcgatgactctgtttcgagtgggtcttcttactcccacaaccctgtggaggagaatgtcgaatctcttccacaggagccatgagaggtattgcctggaactgtagagggttggggcagacctctacagtttgggaactgaagtccctgatctttacccgctctccggattttgtttttctttccgagctcaaagtggatgctaatcctctggtacgtactcttaagtctttacacttttacttcaatatttgtgttccttctattggtaatgcgggaggtattattctggcttagaagttgggttttagttttgaatgtatctcttgttcgcggaatcatatttcggggcttgtttattcggaccccccccctctttcccgtggctcctttcgtgtgtttatggccccccctatctgcatgcaaagaaaaagttctggtctgagtttctgaaattaggagataggtttggtgggccctggcttattttgggtgataccaattttgtcctttgtgattttgagcgtgatggctcttctggtcgggatccttttattccaatcatttctaatctgattgagagtagaggtcttatcaatatgcatatccaaggggacaacctgacttgggacaatcatcggtctgggaggcaccatgtgaaatctgcgctggataaaggcttagtaaatggggcttggattaatttatttccaagggctattctctgctctgcccaaactagcaactcggaccataggccgctgtgcctcctctctggaggtttggaacccaaatttaagagatgcttcaaattcgaagaaggttggacccgtgatgttcgaagtaatctggtagtagcccatgcttggaaatcggtctatcatgattgggcccctgctcgtattttcaagaaggttggtgccaccagggtggccctcctcaattggaaccgatcccaattcggtaagttggatgtgatcataaaagaactagaacttaagcttaattctcttcagagcctcccggctgggtctcgggactggaaccaggaacgtgacatccgtcgagctttgaatgaaacgctagaaagataagcgatctactggaagcatagagccagagtgtcttggctcaaggacggagataagttctctaagtttttcttccttacggctgctattaaaggtagaagaaatgtcattgagagtatcttgaataaagataatgtctggatctccagtcggggagctattgggagagaatttattgatttttttaagggtatctttgtcggagctgataatggtgtggaatacaattgtgctcagctttttccacagaaaatctctcaggatgactcggaggtccttgttagttgccccagtgccgatgaaatcaaaagagttctttttgccatgcataaccataaggccccgggtcctgatgggatgtctgttcttttctataaacattattgggagtcagttggagctgacttttgtgatgcggtctcagatttttttatttcagggaacatgcatagagggataaatgccacaaatgttgttctcatacctaaagtccaaaaccctacctgtaccaaccactttaggccgatctctctgtgtaatgtggtatacaaagtaatctctaacattatagcgaacaggataaaacctttactcccttctctcatttgtccaactcaagctgcttttgttccgggtcggaacatccatgataacaatgtgatagtccaagaaatcattcacttgttcaacaggaagaaaggcaaggaggtcttcttcgctataaaaattgacctggtcaaagcttatgataagttgagctggcgttttattgatcatgttttagattgctatggaattccccaaaaattcagtctttggatttctcagtgtatctcttctacaacgctaaacatttgtctcaatggaggccaggttgggaggattaacccttcttgcggccttcggcaaggcgaccccctctccccttatcttttcatttgggcagctaaagttctttcaagattatttcatgatgcccttgatcaggggtccattaagggaattcaactaagtaggggtgggccggttctctctcacattttctttgcggatgacctaattctggttggtcgagctaatttacttgaggtgaatggcttctggagatgtttagagaatttctgctcgtggtctggtcaacaggtgaataagctcaaaacgtctattttctttagtaaaaatacccccttgagcctgcgagaagaaattaaggaagctttgggaattgattatcctgaaggctgcattaaatatttgggattgcccctgtttagatctaggcagaaagatgctgatttcaattttattcttgacaatctcacggcaaagcttcagggatggaaggcaaaaactttatcaaaagcaatgcgagctactctgataaagttagtgggcttgtctatgccaatgtatgcgatgcaaacttcgaaactctctactcgaatggtaaacaaaattgatggtctggtcagagatttttggtgggggtttgagaaaggaaatcatgggattcatcttaaggcttaggataaactttgtctccatgaatctctgggtggtcttgggttccgaaaaaccaaggagatgaatcaggcctttctggctaaatggggatggaatattctcaatgaaagtcaatctctgtgctatagagttcattttgagaaaaggagcttgtaagttggttgctaatggtgagaatactaagatctggggagatccctggattgcgcatcagaaagactt

SEQ ID NO: 225461 - DNA, 1817 bp, Cannabis indica
ttttttcaaacaaaatgttctaactcgatatgggacaaagtagtcagactcttgtacatgctaattcataaaaaggcaaaatgacgcctcacctaaaagctatcctagttccaatgtcaagaattagaatcgtgtaatacaaaattgaccagaaaacaaattaggcagacatacttaaagaaacaacgaagacaaagacaaacctgatgcttcccgcactgttcacaatcagaacagggcacgtaagtcacagtgcttcccgtatcaacaatgagagcgaattcctggggaggagtcccaatccatagccgcgtcgtataatatctgcaaagagagatcacaaaaaatattagcaagtttcagacaaaataaaatcccaattttgtcattatcaaggcaaagatcaaagaaagaaatcgaaaaaaacccattggatagaaggtcgtcgtagagcctcatgtgagcattaggcctaggctggtccgatttatgaagacggcggccctcaaactctcggcgttgagaggacgatttaggaggcgatagatagagcggaaggaccatggggtgacgacgagagtcggaggaggcatggaaggcctcggaggatggtgaggcaaaggagtggtagaggagagtgaactggattaagcagtagaagatggagataaaagagggtggagccatgggagggagatggatgagtgagtctggggcagaggaactgagcaagaccaagggagaaagaatgaaagtagactgttgttaatggttgaaggcagaagaagaaaagtttgggtttaagaagaagtttcgtgtggggttctccttttatacgattttggcgctcacctcatctcatcgcatcgcatcgtagctctcttctctctctctctctctctctgtggagcaggaatattcagacgacagacatatcatttaacacagcagaaactaactaaacggacacaaccccaaaccaaaaactctactttggtcaacggatactccaatctctctctctctctctctcttttaatgaataaataatttaaataaagcgttccttccttcaagataaataaataaataaagaatgaaaataaaaaataaataaatcataataacaaaagagaaaaaaaaaactataaataaatgaagtaaaattagatgcaacttcctacttcttcggtacatctatcacactctttagtcttcatctattttgatttttgagctgtttatattgtcattaaatacatttcgaaatttcttagatgggatagattttcttaatttacttaacaaaagatagggaatttaatttttttaaaaaaaatttaactaaaaaaaagtaacgatattacaaaaatacttacaattggccaaataaataaatatacagcccaaataaaaaaaattacacaaatactatttacacatatcttcaaccaaagatttatgcttcctaggcaactatcgcacaaccatcgcgcaactacgtagcaaccaaatacaatcaaaacgaaaattcaaccagaaagagaaccaccattaattccgacgacttcacctgagaaaacgaccagaatcaatcaaaacagagactgtttctaattcataaaaaaaaaaaatgcagaaaaactactacgaaattaaaggtcaaccgaaaatttagtttaatttgcataaaaactaatgtcctaactttaatttttagatccatatggtagatctcaaaaagttgaactagagttcccaaacaatctaattaaagtataatccaaaaaaaaaattacatcaatactatagtaaaa

SEQ ID NO: 225462 - DNA, 1546 bp, Cannabis indica
gaaaagaagaagaagaagattaattaggcgaggaagatacatgggtatagtttcggaagctcacaacgtcaaggttttaggtaatattgccaatggtcaacaaatcatagtcctcggccatggattcggtacggaccaatcagtatggaagcacctcgttcctcacctcgtcgatgagaacaaagtggtcttgtacgacaacatgggagctggaacgacaaaccccgattatttcgatttcgaaagatacgctactctcgagggttatgcttatgaccttatttctatattagaagagatccaaatccagtcttgcatcttcgtcggccactccgtctcaggaatgatcgcccttatcgcctccattactcgcccagaccttttctccaaaatcctcatgatcgcctcctctccaaggtactgttcaataataataattaacaaaaattctttttctttttaattaatttttttaaatagaaattctattatattattataggtatttgaatgatgtggattactatggagggttcgagcaggaagatttagaccaactttttgaagcgatcaggggaaactacaaagcgtggtgttctgggttcgcaccattggcggttggtggggatatggactcggttgcggttcaagagtttagtcggacccttttcaatatgaggcccgatatagcgttgagcgtgggccagactatattccaaagcgacttgaggcagattctgggcttggtcactgttccatgtcacataatccaaagtatgaaggacctggctgttcctgtagttgtgtctgagtacctacaccaaaacctggggtccgactccatcgtcgaggtcatgtcaacagaaggtcacttgccccagctcagctccccagacatagtcatccccgtcttgcttcggcatattcgttgtgacatagctgtttgaaccacaataaccatcatcattaattaccaagataacaaatacgtgagtatgtatttaatatataacgactagcttcacataatcacacactacatccaattttcgtaatataattcgataatttaataacaattttttttttcacacttgcaggccgtatcttaattagttattatcggattaattggattcgttgaaaatttgcaaggggatgacttcaactataagtcgatggaaaattaagtgtacttctgttctcggattgattagtacgtacgacgtcgtttttaactctttgttttttggtcgatgcatgtacaactgtaaagtctgtattaattaattgcgtaacaatatttgatccgcttggtggctactggtacttgtttgactattgtaacaaaggtcatatatcaagcgtaaatgtaatgttgactattgagagacttcgtgggtcatatatctcggccactagttgtctctagaaagtagaaatcgaatttcaaaatttataataacttattagcatatgttaattaatagataattagttcaatcggatgatcaatgttatggatctaatcccaatcttatgcatg

SEQ ID NO: 225463 - DNA, 5389 bp, Cannabis indica
tcaattggaaacctcactaagatgcaatacttgtaagcctacttacctaaaacttaagcttgaaactaattcaagattattcattgttgatttatttttggcttatatatataatactaggagcttaggcataaatgcactctcaggggaagtaccaaaggaattaggactacttactgagctattgattttgtaagttaaaattctttctaattcagtcatatatattcttgggaattttttgaaataatttctttttatgtgtgtatatatataggtccttttcatcaaacaacttttctggtcctctgccacctgaattagggaatttgattaaattacaacatctgtaagtttgtaacattgaatctcttttcttccctttgtttttctgttaaagaatttaatgaagtccttattgactgcatttcaaactcatttgacagtttcattgatagtgctggagttagtggagagataccttcaacatttgcaaagcttcaaagcttggaaacattgtaaattgtttaattcttctaacttgtgttgtgcatcatttatagacacactactattacataaaaatagggccaacctgaggtgagacgaaggaggcggttaccttagagttcaaatcccaacaactacactttttcactggggtccaaattagcctaagaccaaccctgcataaaaagagctacaagattattcttcttttaatgaaatctttaactttctacaggcgagcatcggacaatgaattcacaggaaagatacctaagttcataggaaattggaaaaatcttaataccttgtaagtcaaattgagaagttcttagtatgttgatgacattacttaatatatcacaatattaacaattgttagttctttgtttatgtttctttaggaggcttcaaggaaactcttttgaaggacctataccatcaacactcgcaaatctaacttctttaacagacttgtgagtaccgccatacttaataatcttactttcatatttatatgaaaagttttaaagctaacaatcatgagtatgaattatatgtaggcagttaagtgaaatatctaatgcgagtacttctcttgcatttatcaagaacatgaagttgctaagtacattgtaagtaatctaattcaaacatatcttttcccttgttttgaaacataatgtattaactatttattacaacttgtagagttcttaggaataacaacattactggttcgattccatcctatatgggaaacctcagacagttacaacaactgtaagctcattaaggaactcaaaactatccaatttgcactatcaactttctatattcactcattgcattttactgtttgcagagatttaagcttcaacaagttaaatggacagattcccaactcgcttttcaacattagttcactctcttatctgtaaaacatcttcaattttctctattttcttttgtaacatatgtaattcctcaagaactactttttatctgtgattttgcttctttaattaggtttctcggaaataatagcctaaacggaaccttgcctcgaaaaacaagttacatctcttctcaatatgtaagttaatatgtctgatatgttttgcaacatttatgataaagactctgaaattgagtttcatgtactatgcttttattgcagtgatttatcatacaataatctagttgggagcattccttcttgggtcaacaatcaaaggaatctacacatgtatgcattaacatttagagaattaatgattgaatttctctctactaataccacatttgaataactctttgtgctacaaaaaaattgcagtaacttagttggcaacaactttacattagataacttaaacaacaggtaactcttttctcatttttgttcttagttgcatttgttgctcaatatgttatgttcttcttttgtttaaaattattctttgttctcttcagtcttcttctttcggggttgaactgtctccaaaagagtttctcttgcggtctaggcgatcccacatgtatgtatatcataacaccaagaaaatgttatgaaatatctctaattggtaacttgtcctttatgtttttgtaagtaaagaatttcaatggtgtacagattctagcttcggggttaactctggcggtattgaactaaaatctttagatggaattgagtatgaaaaggatgatgaggctttaggtgcagctacacattatgtcaccagcagcaaaagatgggcagaaagtaatgttggaattttcgcaaacaacattaattctagctacataagtactatagtatctcaattcaaaaatactttagatgaagtactattccacacagtaaggctttctgcttcatcattgagatactatggtttgggacttgaaaatggtaactacactgtcaaactccagtttgcagaaattgctttcgataattctggcacttggagaagtgttggcaggcgcgtttttgatatttatatccaggtattgtctacctacatacaagtagtgttcttgcaaaaaagaattatcaagtgaaatttttgttacccttttcctaactgtaactgtttgtgtgtatatttcagggaaatcgagttttacatgattttgacataaaaaaggaggctggtggtctctcttttagagcagtagagaaagagttttctgttcatgtttcacagaactacattgaagtccacgtattttgggctggaaaaggaacttgttgtatacctgctccaggtacttttgggccatccatttcagcaatcagtgccaccccaggtaagaataatatgctgtggaaattttttaaattctatgtttataggaaacataagaatattattattgttttgatacagattttatacccactgtgagcaacatatctccaagcactagtaagtacatcatattgtgtggatattcttagtttctttgttcaaaggaaatatgattctggtttagttgaccattattattgttttgatacatattttacatccacagttagtaacacatctctaagcactaaaaagaagtaccatactggtctgattgttgcgggagttgttgttggattggctgttttaagcattttcagtgtgttagtggctttatacattgctcgacgaaggaggagagctcaaatgaatgaaggtaacatggttcgatcttggaattttgaagtgtatggttgagaaattagaatagtgtgtatgatccgataaagttttatctcaaaatcaattgacaactagagaagtagctcgtgcatcttatatatggtattatgttttcatacattatacattatcaatgtgggactttctaacatctccctcatgacaagggtacttttcggttcttctttttagattgataccatgttaagaatgtgtaaatgtggttgagaaagtagataaaataggtgtagtatgatgcatgtagtttaatctcaaaaccaattagcaatgaaagaaatagcccatggatcttatatacatatggtattaagtttcacacattatcaatctgagactttctaacacattccaacattcaagaactacttcactataattgttgtgtagagttcttgggaatggatgttaagccattcacattcagctacagtgaactaaagacagctaccaatgatttcaattcttctaataagttgggagaaggaggatttggacctgtctacaaggtatgtaataatgttagtttcattaactaatttcttaaatcatttgttgatgacacaaaactcattatatgattttcttaataactcaacagggaagtcttgaagacgggagagttgtcgctgtgaagcaactgtctgtgacatctcatcaaggaaaaagccagttcgttgctgaaatcgccacaatatctgctgtgcaacatcgtaaccttgtcaaattgcatggatgttgtattgagggagataaaagacttcttgtttatgagtacctagaaaacaagagtcttgatcaagcattatttggtatgtaaacaacaaaagtgttgtttgttttgtataaattttaaaacaaaatgtttattgtgtgtgtctgtcatgtatcagggaagcatagtttgaagctggattggtcaacgcgttttgacatttgcatgggggtagcaagaggtctaacttatcttcatgaggaatctcggattagaattgtacacagagatgtcaagtcaagcaacattcttcttgattctgatctcatccccaaaatatcagatttcggtttggctaaactttatgatgataaacagactcatataagtacacgagttgctggaacaatgtaagtaaaatcttcatgacaacaacgtagccttgttttgttgctaatggtttttaactgaaatcttttggatgaaattgcagcggttatcttgcaccagaatacgccatgcgcggtcacttaacagagaaaaccgatatctttgcctttggagttgtggctctagagcttgttagtggaagaccaaattctgactcttctttagatgaagaaagaatgtaccttcttgaatgggtactgaaaatcaaattataatgagctattctttatagtttttcttattagattttgatcttttgatacatgtttttatcattgtttcatgcttgctaggcttggaatttgcatgaacaaggccacgaaatcgaactggcagattcaaaactatcagaattcaatgaggaagaagtgaaaagaatgattagagtagctctactatgtactcaaacatcaccaacaatgcgtccatctatgtcaagagtggtggcaatgatcttaggagatagtgatgtgagtactgaaatttcaaggcctggttacttgggtgactggaaattcagtgatgtcagtaccttcacgagccagattataatagggactgattctagctttaatgactcgtctgcaagcacgagcatggtggcggacgcaatgccaccgccgtcagcaagtggtgcagctcagccaaatgctcacaacaccatcaaaagtgaaggtgatgaaaaattggtttgagttttaataaataaattttctccaaaaaataaggtaacaccacacccgccagctcagctcagcacaacggcgcgcatggtggttcggtgtgtgagtgatcacctatgcgcgcaaaattgggtacccctggaggcccgtacccatatctcaaacttgcactatttatacacttctaatgaagtgtttttatctcatgtgagactccaattactcacacacttcactatttatttttgtaagatttcacaaaggtccaacagctgtgtaatataagattccaa

SEQ ID NO: 225464 - DNA, 4075 bp, Cannabis indica
agagagagagagagtaaaaaagtgtcgttttaattttacgacaactgaaaacggtaaaatcgtataaaaacatgtcgtttatacttttgcttaaataaatcatgatctcgattcgaatatcttttagggtttattctgatcgataactcgtcccccattcccaattcctttattttctcaaattgctcgtttcgaaggtactttcctttttcctcgctttctttagttctaaaatttttgtgaaagctgagcgtttagcgtgcatttctttaattgggcatttaaatagggctaaattatcataatgagtttaaagatatctatggctgtattgtttacaatattgggttttaggatatatatgacaacgacaatgaaacaaatttaagttttttctagttcttgtgataaacttgatcttattatctgcttatatttgtttctttgtttgacttatagtttgagcaaaggggctgagtctgattgatctgttttgtatagagtaatgtgaagtcaaaagtttagaagattagatttataggcaattgtctggtatatattgaaagcataagcatcaaaattcatgctttattaataccctgcttttgaatttgaattttgattttgatttcatatatgtatagttttaatgtcccatgatcttcttgttttcagtcaatatttgatcttgttaaaaaaaagagtcaatatttgatcactcaattacttggtataattatgatgtttaacagtctgttattacggacttgttagtgacctttgcaaataatctgcttttgaaaattgctagtgcaataacatgactttggggtaaactaacattagatgatcagcctgtgttaagggtttggtaacaaaattcatgttttttttcatctgattgatcgacacaatttggttggatttgctttttcttttatagatggaatcaaatgcagaccctgagaaccaattgatgattgaagcatcaccagatttgcaaattgaccctaaaagagcccggtttccgtgctgcattgtatggactcccattcctgttatttcatggttcattccttttattggtcacattggcatatgcagagaggatggtgtgattttggactttgctggtccaaattttgtgtctgtggataactttgcttttggagcagtggctcgatacctcccaattagcaaagaaaaggtataataaggaatttgcttggcaccttatagcacttcaccaaatgccatagtgatttgtattagcttcatcattattgccagctcatgcttctccatgattttgatcagcggtgtcatgcatttccttgtccgagtttgtatattagtgaggatcaacagcatgatgaacaacctgaaaatgagatattgacatgggatgatgcaattcggaagagcacgcaggaatttcagcaccgctcttacagccttttcacttgcaattgccattctttcgtggccaacagtctaaataggttacggttcaatactggtgggtggaatgtggtgaaccttgctactttaatctttctaaagggtaaatgggttaacagagcttccatggtgaggtctctcttaccatttcttgtagttattagtattggacttgcttttggaggctgtacctttctaatgttctgggccttctttacctttttccttgttggttggttcttctttggtacatacattttcaagaatttaattgaattgtaacttctgccattacatatttatatatcaattaagaagattgtaaagctttgaccacggttcttaaaatggggaagaagaagaagaagaagaaagacactgtagggattgagtgctttttgagtgagagtatattgttaattcattcattttgggaagatttttttaagtgtggtactctggacacaagtatacatcatttctcataaccttattgatttgaaggacataaaaatatgcactcttaatgagaaaatactatttggtccaatattttcatttgtaaaagaggactgatattcaattgaaatataatatcttcaagttatataatccattcaaagtgtcataattatatactgtattttaaatactgatcatccttttgtaacaatataagataattctgaaaattgtaattattgtatttaacgaaaacctctaaattatagtaattattgaaaacttgttcattctattaaattttgcccagtttttaagcgggttcttcatgtagtcataattcatagtgcttgctccatatgtagtcataaagaatttacaagtattaattctaagaatacatatactcctgatcccattctgaccttgatatgtggaattgatttgctccatatgtgctgagattattcgggtgacatggtccaagcccaataattatattatttagggaaatttacatggtatactaacttttgccattttcttacaaaaatactgtcaggcggtattttttacttttttactgtatttttctataagtttcatactgcagtatactgtgttaagttttcactggtgttctactggtgttttactggtgttctactgttgttttgagttgttctactttgtgttttactggtgttttataaaaacacagtatttttgaaaaaatttccgtgtgacagtatttttgtaaaaattaaccgaaattctagtatttttgtaagtttccctattatttatttgtatatatatttttatgtggattctgaaattgggtcatcagtgttacttgaaagtaaacatacacaataaaaatacttttgtaattattacaataattttgtaggaatttttgccaaaataaataagtaaatctaaggataaacttttaaaaagataatagtttgggagggaaaaacattatttatcctttagaaaatcattataataataatgtaagcttgatttggttatacttgatactcaaaataggtatttaatccattttttttttttatggtagctaataaaatgtaatccagcttggactctcaaatgataagctatggtcagtaagaaaagtggagtttgttaaggtgaataattgagaaccactaacttataattaacattatttttgttaaacctttggagtaatataagtcactggatttgcattatctttaacttttttttttgagccaatgtaaatcttgttttttagtttgaaagaagtttatttatcaataatctattttttcttgtaataattattagagctcatatatttgttcctccagaaggatttattgaaattctctcaaacttttgtaatataatttataagtaggcactttatattgaaatgctaattaataaaaacaaattaattttaaaatttttatattatctcaaattatgtgttcgtatttctaacaaagacaagaaaaaaacgaagaaagattatttacatgtcattaattgtgacactattgagatatggaacaaacagtttcaaaaagctaacgaatccaaaaatcttgtaagttcttcattttgcatctcttttttctttttttctctaattgttattttatgattttttttaatttacatatttatttactctataagtacattaattcttgcaaatacaaatataataaatataattaatcatgttttcttgaatgttggagtgaaacaaagagtcttagttttccttgaaaaatgctataagagaattggacaagtattagtattttttttttctttatcaattgctttatattatctcttataattaggtaacataatatcaataaaaaattatgtatatgtatacatggcaataagattaaattactaagatatttgtgtttggttcacagatgattattaatttcacagcttcatggtgtggaccatgtcgtcgcattaatccattctatagagaattggctaagaaatttcccaatgtcatatttctcgaggttgatgtcgatgaattgatggtataaaacttacatccctacaaactttcataataacgcttaataattctatggtaggctctacttttttt

SEQ ID NO: 225465 - DNA, 4120 bp, Cannabis indica
tatttatttaacatttaaaaaataaattatcattttaactatcactaactcaaaacggaaaagaagaaaaaaaaaaagttgaaaaaaataaaattgtaataacaaatttatgaaaaaataatataatagtaacaaaaaaaataaatcaagttgtcaaaagtaagtaaaaaaaaaattgtaatacaaaaaatatattgagaagttgatattattttacttattgcaattaagtcaatattttgttatttttctattgctttgtagttatatctttttgttgttttataattattttcatgtcgtttgtttagttgttctagggttgctttttagctatcttagctgtttttgagttgtttcttttattttaatttataattttgaaactttaacacagtatttttgtaaatttgatacagtaaagatataaaaatctctgtattccaatatttttataaactttcttctattttacagtattattgtaagtttcccttttcttaatgtaattaaggaaattactaaccattaaaaagttaattaggatttgtccccctattcaattatgatatgtattaaattagtcttctaaatttttcaggccaactattgataagattatggaattcaagcactttagtttaacgggcacctggcgtgaatggaagttcgggttgcacgatttggtacttgttaaagttcaagaagctagcataatttaatacacgttaaagttcgagagcacaatttatagtacatagtagggttgttcatcaaactgttcaaatcgcccgcacaaaaaaaaaatacgatttgaaattttttgcggtgcggtctcagtttgaatttttcttaaatcgcgcggtgcggtgcaatttgcggttttgaattgttaatatgcggttcaaattgcaccgcatattataaatataaatttttatatttatttaggtccaatatgtaaaggtccagtccaaagcccgctaattattgtattgttgaaacttaattttttttttcatatttttcttaagtcttatggtatttttaacaaatattgctcaagttttattgtatttgtgatagtttaattatttggtgatactccaaaccgtagaaactgcaaaaattgcaccccaccgtattattttttgcggtacgatttctgtggtttttttaattttgcggtgcgggatcagtttgggaaattagaaaaactgcatgtgcaagttggtttgaaaaatggtcaaaaatcgcaccatccgtaccgcgaatacccttgtcaaattaggtgtctgttagtaaaattgaatgaaattagataaaaattattaaatctgacaatttaatagtttgatggaagtttttaataacctgaggtataatttaatatatattaaattagaaaacaaaaacaaaaagttgtaattatagatgactttaatgaatgtgaactcagcaaattcaattatccaaacaacttgagtatctctactatttttgtgtggtatgtttgaattatgcaccagacagttaacattggagacaatagaagatgttacatacatacatcaaccatagttttttggtgagaacaaggagcaaacacaaagctataaccaattgaaactacatcagatgaaagattagttactgatctgattcagtttttttatgacactattctttctatacatattgccttaacaactcttgagtagtttttatgtgtaatttctcatttattggcttactatcctacaacacaggtggctccaacgaataagaatgataatatttacttctctttcctaattatctattctttatcataataataatttagaatgtgaactttacataagatacttttgcatttataaaattggacaaaaatttacaatttactaacatttacaccactaaaaaaattgttagatttataccgagtataaactcaaatcttataacataaatatccaatgataataaaggtttattattagtatttgggttacttccatatatatagtttcacgttatatcgatgaactaaacttaagtctattgcccaattattatctatggttgaatttatttcatatgcatttcatttaggtcatgtctatcacctttcattagtgatctttttcaaacgtttagtgacattataaatagaataaccaatttaatgaagaaaatttgaatttaccgacaaattcattgtcaaaatattttataaaagtaaaatatgaattcctaaatataattacgtatataaaattgaaataaaaaaaggagactttaatcacaagcttattaatacttcatatgacattaacccaagaatgagagaagggattatgaggaaatttgcggtaaaatcatttaaattttataattagtgacacttaatcatataaaataattttttagtggtaaaattctctaaacatctcacttcttttagttatttaccatttcgtttaaaatgctctgttaagtgttacgatagatatgtcacagtgtacacgtggtaaacttttagtgagaaatattggcagtaaaactacttaaactctatgattagtgaaacttaaccatataaatcaattttttagtggtaaaactctccaaacctcacttaagttaactatatatccacttcgttcaaaaggctaggttaagtgctctgcggctggaactatcgcatctctccttccctcgttgcttcttcttcttctgcgatgaactcaccagaccacgaagaacctagggaagaaccatcaaacctagcgaaccccttgtaactgcggtggtatcggcgaagagttgtgggagagggagaatcagatccagcgaggtcgaggcgagaaataaaaacttcaaagaagggttgggtctcagggcttagaacgaagctgaagggttgggtttgtatggtcggaaagttggttttagggtttgtttgggttgaaggtggtcagaggtgactcgccagagttgtgcaagaaggagaacggaagagagaaggagtgcagatggaaattagagttataaggagaaaaatgtaaaagaaagagaagaagagtaaaaaagaaaaaaaaattatttttaattatttttaatttatttttttaaaatatttaataaattaaaataatgtggaccactaaaaatttactacgtgtacaattgtgtacattgtagcattccaccatgtcacttcacagcgtcttttggactgaaggggtaaataactaacagaagtgaggtttggagggttttaccaccaaaaaattgatttatgtgcttaagtgtcactaatcatagagttcaagtagttttgccgtcaatatcctccactaaaaatttgtcacgtgtacgcttgtgtacaccgtggcatgtttaatgtggtacttaacatagcattttgaacgaaaaaggtaaatagctaacatcagcgagatttgaaaagatttaccactaaaaaatcaatttatgtgattaagtgttactaatcataaaatttaagtagttttatcgccaatatctcttatcttaattaaatgttgcttatcaattggactataataaatgtcaatactgtcaaaatattcatatttatagaaaattatattttaaccaaaagcatgggctgagttcatcttttattgttaaattttcatgttaacttaattgaaataaattaaaagtattaatatttagataattttatattttgaaattaatagggcatttatctaatccaaatactaaatgaaaaagaagatagtgttgaatttattcccatctaataaagatgggttcactaaggaccaacaaaagagtgttgtgatgcttgagttcattcaattagtaccacttacgtcatattcaatccaacttgtcacactattatttactgttgattatacacaaagttagtgctattttcatattattcatttttcaaacttcaattacaaactaaacacaaaaaatatacatattatcttacaaaatagatatcatgataatttataaatactaattttgaaggaattttaaaaaaataatattttataatatttttttaattttataatttttacagttt

SEQ ID NO: 225466 - DNA, 4340 bp, Cannabis indica
agaaatgagaaccttgagttagacaatccttttgtaaaaagatcagcaatctgatcatgtgatggaatgtacctaacttccaatttcttctgcagaaccttgtcacgaacgtaatgaacatcaatttctatgtgtttagttctagcgtgaaaaacaggattggaggctaaagcactggcactgatattgtcacaccaagtaattgaaggcatgagtagaggaaaattcagttctttaagaagggattcaatccaggaaatttcagccgagacatgagctaatgatctgtactcggattcagtgcttgatctagagacaacagcttgctttttggatgaccaagacacaagtgtttctcctaagtacacgcaataaccagcaacagaacgtctgtcatcagggcagcaagcccagtctgcatccgagaagccagtgatgcttaacttgttgctgcagctgatgtgaaggcccaaagtcttggttccttttaagtatctaagaactcgttttacaacactccagtgaacatttgtaggtctttggaggaattgactcaatttatttacggagtaggcaatgtcgggtctggtgtggcataagtactgcagtgagccaatgacactcctgtaggcagatgggtttttcattggttctccatcttggatggaaagaggtttgcctgctgagattggggtaggacatggcttaatattttccatgttgactctttttaaaatgtcttcaacatatcgtgtctgtgtgagatacaaaccagtaggatccctgaaaacttcgattcccaggaagaaatgcaggggaccgaggtctttcaaggcaaaggacccgttgagtttagagatgaatcctttgacactctctggattgtttccagtcactatgatatcgtcaacatagatcagcaccaagataacaatcttttctgttttgtagaagaacaaggaagtgtcagttctcgagtttttgaatttccaagtgatgagagtgttcttgagtctatcgaaccaagctctaggagcttgtttcaatccgtagagagatttattgagtttgcaaacccaattttcttttcctttctcttcaaaaccttgaggttgagccataaacacctcctcttctagaatgccatttagaaaggcattattgatgtccaattgccttatttcccatccatttgacactgctatagtgaggataattcttacagttgaagcttttataacaggactaaaggtctcaccatagtctatccccggtctttgatggaacccttttgcaacgagtcttgcctttagtctttcaaccgtgccatctgctctaagcttgattctgaaaacccacttgttgcccaccagattttgaccagctgtaggtggaaccagtacccaggttccatttctttttaaggctataacttcagtgtccatagcacctttccatcctggatgtcgaagagcttcatcaacacttgttggttcagagaatgtgtgtatggatttggatgagctgaggtaagtttttggcttgaaaatccctgctttagctctagttatcatctggtgtgttggctgtaatgcagtggctaaggttggttgaggtgagtcgtttgcagcaggttcagtagtctcaacagtgtcagatgttggttcaaggtcagggccaactgaaaactgatcaaaacggtcagcaaaatcatcattaaaaccagtataaaacggactatggatatcctcccctgctgaacttgaaccagacctgaggttgtttggtgaaagaggctcatgttgctgaggtgatgcttcagagtgtactgcagaagaattgttaacagaacttggtatggactggtctgagatatttggggcagaaaatggtagttgagaccatgaagagctgtgtatgatgacaggttgaggaacatggtaattgttaagaaatccttgcttaaaaggaaactcaagttcattgaatacaacattcctagaaatgtagactcgacctgtaggagttaggcacttatatcctttatgggatagactatatcctagattgacacattttaaggagtgatactgaaatttgtgagattggtagggtcttatgcaaggaaaacaagcagtgccaaaggttttgagatatatgtaatcaggctttcgatgatagagaacttcatatggtgatttgttgtcaagaatgggtgttggtagcctatttatgagaacaagagtgaataaattcaatgccatgagtttgaaccaaggctgtgaaggggtgatattcaccaccccaatcggttttgaggcatttaattttcttgtcaaattggttttcaaccaaattcttgaactgtatgaaagcatcaagtgcttctgatttgaacttcagtgggtacagccatgtgtacctactgtagtcgtcaatgaaatgtatatagtatctatgattcgagttagaagcaatgggagcagccccccacaagtcagtatggatcaattctaacacagatttggctcggttaggtgaaagtttaaatggaagagcatgagacttcccatattgacaagcatcacaaaacgattgcatttcatgtttagattttcttacattagcagtatttaaaacaagatttaaaactttggatgatggatggcccaaacgcctatgccaaacatccattcttgacacagaattgacactaacttgggacttgtttgcactagactcgacagaaaaacaaactggaaaacatgaagactctgactggtttttgttgatgacctggcagtgattttgtattgtggatgataggttctgtgatggagtttcaagtctgtacaatccttctttaagtactcctcgaagcaccaccttccgagttgccttgtccttcaccaaacaaacatcagaatgaaattcaattagcacattattgtcattagtgagttttgacacactaattaaacttttggcaatttgagggacatgcaacatctcttttaaaagcaaacgatttccacagttatcttttaagtaaccactacctatgtgtgatatgttgagtttggttccatcacccactgtaactttttccttaccattgtagggctgtttttggtttagagctgaggcatctgaggtgatgtggttgctggctccactgtcagcaaaccacacatcactttcaagaatctcagggctagcaatgaaggcattgtggctggtatgttgttgtttgttccctccagtgggattgttagggtctgtacccatgaaattctcatcgaatcgattataacatacagcagcagaatgaccatacttgccacagacttggcaagtaggtctagttgtgttgccacggccccttccacgaaaacgtccagtgcttccacgacttccaggaaaccttcctccacttccagagtagtgattcatgttgtgagttccacgaccacgaccagtgtgatttcctccaggattgtttttagcagcaagattggcttgcggggcagtaggagtagtggttttgctgcttatgctcagggtctgcaacctttcaattttactatcaaaactcaataataagtcctgcaattcttgccaagtagtggtaggtcttgcttcgatctgcacaacaatagataaatactcagcatctaaaccagacaagacattggcaacaagatgtgcctcggggtacggatctccagcaagtgcaaggatgtccgcccagtttttcttttgacgaaggtactcagtcatgggagttgagccttttcgaactgtctgtataagggttcttgtatcatccattttggatttggagtaggctccatagagactctccagagcacgccagagaccagcagcagtgcttgaacccatcacttccgttgctattccttcagtcatcgagctgtagagccatcccatgagtagctgatcgttgatgatccactgttcgtactccggatttgtagtcagttctccttcatatttggcttctgcagtgacaggaataaactctggtggacacatttttgttccgttgagataaccgtgaagtctgtgaccacggacaatggtggaaaccattgttttccacagtgtgaaattgtttctatcaagctttaaagaaaagggttgatttagagtagttgggtgatgaaaagtgtttgggagctgaggttgagatgaggaaccaccatctcgattactgctgtcaacagcagagttgtttgtgccaccctctgtttgagcttgatcttggggagtcgccattgacgggggtcaaggtgctctgataccaagttaaaaacaag

SEQ ID NO: 225467 - DNA, 2062 bp, Cannabis indica
aaatgcttatgcttgtattggaaaaataactctaacaaggatttgtaaaacaaattgggtatagtcaattcttatgttacgcatatatagtataaaaagaataaactttaactaggattcgtcaaagaaatttacctggtgccatgtacccctgcaaccgtcaaaaaacaatctgccagtacaataatcagacaatctcggctaagattcccaataagaatatgtgttgttttgtttgctgttgtttttctttatttctttttgctgtaaatagccccttcaaaccgaagagggcgagcagaaataagaaagcaagagaaatccaaacaggcaacccaacaagccagatagaaaccaaaagatgctgtttagtttttgtttgttgttgagctacatagtttgagaatgagattgagattgaggttgaggttcatcccttcaactttagagtgttatctgcacaaaccagagtttcccagacttttccctattcggggctggaccagtcaagtttttgtaagagaaatcagccgaaattagactcaccataccggaaaacaatgacgggattcaccgaaaagttagttatttgagacttcgaggatttccagaaatgaaagcgcaactaactttgatgggatttctctaaataatgaatttgcagctaagatccaacgttgccaagctcttcaggtatttcacagttcttctagccctttaataacataactaaatattggaggtaataaaatagaatgaaatgaaaagaaaacaattttcattctattcttttgtttggttgcattttaaagtattggaatatcattccaataaaatgtcctttccaccattttagtagaatgactattccattttgaaatgaaaggaacgatcattctaatgtatcatgaaaaaaaaacttaataatttttttatgcattttaaattttattcaattccattcttattcctattctcatccttattcctatgttttcattcctcacaaccaaacaccaccttaaagaattggaatatcattccaataaaataacttttctaacattttggtggaatgaatattctatattttgaaacaaaaggaaaaaccattctaatgcaagatgaaaaaatatatatatcttttcaattttatttttatgcatttcaaatttcattagattctattcctactcttattcacattctctatttctattcttattcacattctcatttctattcttatgttttcattcctttcattctattttgaaatggaaaaaaaaaaaaatttcaattcaagatgaaaaaaaagtatagatttttcttttaattatttttatacattttaaattttatttcattctatttttgttcttattaatgtatttttattccttccaactaaactcaacttattttttttaatatcaacgatatatccatggaaattcgatgcatgggtgcaagaaaattgtcatttgtctcaaataagttaaatgaaaaagagtaacataattgattcaagaattttggaattgatattttcttgagtatgaatctacaattgataatatttatgatgacataattaagacgattttataatatttatatttaaataaaaaatttatttattattaaattatatgtaattattcaaatttattactattgcataaattatatcactaatttttatatttctaaacaaatgtaaatgtacgtgatatacgtaaagtttcttaaattttcatcgatatcaaaaatattttcgaatttatagtacctatattttcagtcttcattggtgctccattaatgatataactctataaattaattaatagatagagaggtggccatgaagaaataaaaattttattaaaatagtaattaaaaaattaaataatataaaagtttgactaaaaaaaaaatgagaaaacaaaattcatatgagatggcaattcatataagtagccacatcacattctatgcaaggaaatagagccatagtttgagcgatcattcagaattttcctgtgaaaaaaataaaatt

SEQ ID NO: 225468 - DNA, 2640 bp, Cannabis indica
tgcacagcatgtttaaaaatcacataatacgcctatgttagttagggtgttacaattaccgtggctcgccattggtgatttcaatgagatcctctccaatgaaaataaatcaagtggttgtctcattaatgaaaaacaaatggaaaccttccgcaagtccttagatcattgcaagttacatgatactcccttcgaaggcgagcgccttgattggtgttttgtgaaccaccattgggaaaacactttcaacatacctcaagtttaccatctggagctatttctattgtctttacactagtagatacaagcctttagcaagataaaagaagaagtaggtttcgctttgaaaagatctagctttcggattcacaaagcaaagatattatcacggcttgctggaactcttccttggctaatgatctgataaaggatgtgcttgccaacttagaagattgtgctactaacttacaaagatggcatattagtaagtatggtcacatgaagaaaaaaaaatttgatcctcaattaaaagtggaaaatctgaataatgctcccctccgtactgctgaagcgatgcaaaatttgaaacactctgaagcaatccttcaggatttgtttgaacaagaagaaatctattggtaacaacgttcacgggttgattggttaaatttgggagatcgcaacactacgtttttccatgccaaagcttcagcaattaaaactaataacaatatcaagtttttgcatgatgaggtgggcatttgggtaacttctaaatctgatatgacagctgctattcacgaatattttgtagccattgtcatttcttcaactttagatgatgatgctcttgctgctactttaaatgtcattcctacaatggtcacaccggagatgaactcgaaactcctaaagccatttgcagctgctgaagttgagtttgctttacactctatggctcctgataaaagtcccggtattatggtatgtctctaatgttctaccaacaaaactaggctattgttggcgacttggtaactgaggctgttttaagtgttttaaatgaaggtgctgatcctactggtttaaacaaaacacttataaccctcattcccaagataaaaaaaccacagcgactgcaagactttcacacaatcagcctttgcaatgttgtcttaaagcttgtcaccaaagtgcttgtaaaccgtctcaaacatgctctcccttatgttatctttgagactcaaagtgcctttttgcctaatcgtttaatcactaacaatattcttgtggcctttgagttggtaaatgctatcaagaacaaaactacgggtcgcaaaggtattgcatctctgaaattagacatgagcaaagcttttgaccgtgttgaatggaaatttcttgaaaaaatcatgagcaaaatgaggttttctagtgaatggattactgtcattatgagctactagcgtactaacattttctcctttcttttaaatggggaagtgttgggttcacttattccaacaagaggtctttgatagggttgtccgctttcaccatacttattcctaatttgttctgaggggttatcaagagtgctccaacacaaagaaaccagtggtcatctcaatgggtttaaattaacacgtcatgctccttcagtctctcacttgtttgtttgctgatgacagcctccttttttgtcaagcaatgagtcttcctgccttgcaataaagaaatctttggatgtataccacaaagcctcgggacaggttctaaacccaattaagtctgttatgtctttctcgccaaacacaatgctagctgcccaagtttcctaccaccgacaactgtaaatgccaatctgtgagtgtcatgaacgatatctgggtttgccatcctacttgggagagataaaaaaggaatgttcagtgacattaaggagaaaatttggcgactaatgcacacttggagtaaaaaaaatttctcaacaggtgggggcgaagttcttctcaaagctgtggtccaatccatcccaacttatgcaatgagggtcttccgcttacctgttcatttctgtaatcaacttgagtctatatggccaacttctggtggggtttaaatgagaatgacaacaagatttattggcgctcttggaaacttttgtgtgaaaggaaggatagtggtggtatgaggtttcgttcttttgtgcattttaaccaagcaatgctcgttaaacaagcttggaggcttctacaacaacctgactctttacttgcaaagctgttgaaaagtcgatactatccaaacaactccttccttgaagctaatctaggacactccccttctttaacatggcaaggaatccattcgggtaaaggtttactcattgttggtctaaggtggaaaattggtgaaggatgcagagttaattgtgctagggatcattggataccatgacactcaaacttcactccatactatttttcttgacctcctgatgcgattgttttgaacctgaccacagatgagagacaatgggacacggctctgctcactcaatggttttcttcacctgatattgatcgaatcttaaccattccactgacttttttttttttttgtcaaagatgacaccct

SEQ ID NO: 225469 - DNA, 4592 bp, Cannabis indica
tacatgtacaaagttcgggggaaaaaattactaattagccaataatatttgacaccataacataatgtgtcccttagcatttcttgtaaattttctcttaagtgaatactcataaattatttatgaatacaaataaaatatgaaatgaatcaatattaatggtgcatagtgaaatttacgttgatagctatatataatccgaacaaaataagcaataaatgtaatcgttgacaattttcatgcatattcataatttagtgtgtggataatttaaatatatatagaggaataatttttaatgactattattaattgatggatactaaataaatttaactataaatattaattttaaaaatattgagtcattagattttgatccgaataataaaagagaaattcaaatttctatacttaaattaactacttaattacagaaaacatcaaaaaatatcttttttttacactatatcgaaaataagtttatatgaaaaatatttaagtcaaactcaatattttttttatcattttttgctgaatttttgtttatttttttttttcatccgatggaacaatctcagcccatataatataaaaatgaaaggtttttctaattaaatagaaaaattaagcataaaaactcaaattttattaatattatctatttatgaaaaatactcattaaaagtgcatctatatatatgtttatataaaataaaaatatacatctcaacattgtcaatttattactttttatgaatgatattgaaaataattattattgttaaaaaaattatattttacactaagtaattagattctttaaaaaaaaaatgcttgaataccattaaaaaagacaaaaggaaaaagaaaagaaagtagagagctttatttttccaaacatgacttagtggataattaatataaaaaattaaaattatatggatttttatattttttgtccaaaaatatagccctttttatcaaaaagattattttatgagaaaattagaaagaaagttaaaatatatagaaaaataagataaaggtaaccaagataaaataactatttttttttttggaaattttttttatttttgtaaacttattctttaaaaactataaaaataaaaatttcccattatttttctacaaaaccgacttttagggttatgatttagatcgatttttattggttgggcttttaaaagctatttttggactttagaagctctatattaaacttaaaaaaaaagttacatacagaacttattcaaacacatgaattttacatcattacaaataaatattaatttacattaatagataaaaaaaacaaaaatttcaatcaaactaaaatatatacatgtgcttttgcaaaagatttgcaagaatacatatacaatattagttattattattccattacaagtaaccaacaaaataaaaaatgaaaatgaaaaggcaaaacataaaaaattcaacttggaaataatttcaaaatcacatattcaaacaataacaataattaatgtttctagttagcaattggaggagttggctcagcatctccatcattctcaccagtcaactcttcaagtgatattccctttgactctggtactaaaaatgtaaatgccattccaagaaagttgataacaccaagcataatcaaagagtttttcactccaatacctggtgggtaaccagcttcggttttcgttggatccttactttgagcggaatacaagaacccgaaagctcccaccattgctccggctttcccagccgcagctgatattccatgacacgtggatcttagccgggctgggaaaatctcagcagggacaacaaatgtcgtcgcatttggtccaaaattagcaaagaagaaagtcaatgagtacataatcacgaacccaatatggttatctttttgagtccagtgattgtaaggaatagctagggcaaacatgaacaccgtcatgaaaaagaatcccattagttgaatggcaaaacgtcccatgtggtcaataaaagcaacagtgaaccaataaccggggacagtactacacaaggcgattagggtttgagctctagcaattttgtaaacttcttcaatggcattcattgtgttggccttagggatccaaccaatggcactgaaaatgtccttttgaaaaaggttttggctataaaacgcaatgtctaataaaaaccaagtggttgttgtaccgacaagatggagaccgtgtcgtttggcgaattgcttagagaaaagcccaaatgaatttttactttgagatagtctttctaccttttcaacatcagcttcaagctcgacttgtagaaccttggacatgtcagaagcagcttgcttagcatctttggcaaccaatgctgtgtaacgagcagtttcaggcattttcatacgccaatagtaagttactgctgctggaaaagctccaaacatgagaatgattcgccaaacatagtcagcctgatgaaccaacgagccagctctatcgactaagtacgagggagcatcatattttgcgttgaatgcagctgatcatcatgatgatgaaattttaattagtatagaaatcaaaaaccaaacaagagtagatcatgtaataagaaatatatttacttacttgagacaatcaaagcaacaatcccacccccaagaattccaaacccttgcatggcaaaaacagcggcgataaaagcgcctcgggtcttcttgttagcatactcagacatgatggtggcggagagagggtagtctccaccaataccaaatccgagccagaatcggaagaagcaaagagtggccatgacggccttagcatcgtagctgaaggacaaccctgaggccactgaacacacaaccatcacaagtagggttagtccatacaccttctttcgccccatcttgtctcctagccatccgaagaacagttggccggtcaaggttccaacaaaagcaacaccatttaccgctgctgcaacattgggaggcaagtttcctggcttgtctgaggctaagtcggtgtagtatattcgcccaagaagcttggtcaccagagagatacagaatagatcgtatgcgtccgtgaagaatcccataccagcaataactatggcggtgaaatgatagagttgtgtcttggccacatcgagtgcattaagcactcccatttgttctcctgccatggttaagtctcaagctttcctcaatagttttctacacatacacaaatataaaatgaatgcattagctagctagtattattcaataagtccataataaaatatgtataattttaattgttttaatattagatgaatataatattattattgtttgaaaatcccgactatcacaaacaatcttccaatcaaatgacttggaattatcagatattggtcgacaagcttataagcctgacgaccaatttcataattttatatattttatatgagtaagagattgtttcaattaggattgagacaacaattttgaaaaatgtacacatctaaatttatgataagaaaaaagagagaaaagtatattaatttaattactaaccaagtaatataactttgagttctgaatatggagaagtgttgaggactatatatgagattatgtctgaagaagaatggcattgaagtgcaatatatatatgtattgtatgtatattataagagcatcttaattagtatatgcccatttcagcctcatcatcacctattgccgaagtcaatgtttatatttcataaatagtccatatcacacagatcacattatacatatatacagccctttgttatttttctatttttaagaaaatgtctcccaatatttatatttatatttgtatcaaatacccatagtcttattccatctgtcacattttttttttatcttttaatacatatcctcagcggaagcattgtttcatgtacttcttattgagctggagagtcacatatggtaattaagaaataaataaactaaagatgaaattaataagaagtttgtgtacaattataataatataatttacaaaatgatgacaaaacagatgatagaagtagactacaagagtaataattcagagaaattaactacatgaaaacttggactgggtctgggtccgggttcgggtttaggttcgggttcagatccggatctagatctaggtcctgagtccaggtacgggtcctgggtctggatctgagtttaggttcgggtttgagtcccgagttcgggtcatgagtctgggttcgagcttggatctcgggtctggggtctaggtccaggtcttgggtctcgagacttagatcctgggatcgaattcaagtttgggtctggctcccgagtccgggccggtcacgagtttgggttcggatctgggtctcaagtctaagtctcgggtctaagttcggggttcgagtttgggttcgggtttctggttcaggaccggttcgggtctgggtcccaagttggggtctaggtccggctccgagtcgtggtctatatgtccgaatccaagtcacgatctgggtccgggtccaggttcggg

SEQ ID NO: 225470 - DNA, 5808 bp, Cannabis indica
aaaacacaagtaaaaaagtaaaaaataccgcctgacagtatttttgtaagaaaatggcaaaagttagtataccatgtaaatttcccataaaattttgaaaaaattattgaggaaattacactctataccctttttatattgtcctcttttatttttaccctcttttttaaagtttcttttttttaaacattgtaccaattttgcccctgtcacttcaagatactctccatgtgactcttttatgtcaaggtattttgggtacaatgcatataaaaagaggtatgtttcaattaaatataaaattagaggtaaatttgattaattgattaataaaagtggtatttttcaacttaccccaaaattattttgctcatatttttgcaaataataagtgtaaaacctataatttgaaattcccctacatagcatttctaaaaaaacaaattgggtatttttaaattatatatgttatatacatataaatttgcttcaataaatagtgttgaaacttaaaatatggcatttttgaaaaatgaatgtagatttttttaaaacaaattttgaacgggaaccttaggcgatgacccaacttgctccactattgggccagctctccataaaatacaaaattcaaatgtcaacactataatatgtaaaatagtgttgatatttaaatgtaaaatagttaaactattaaacttttttttttttgactcaaatcagtatctttattaattaatcaaatcgttaaaaacaaatagaacgtgcttcagaggaacaatcctccaactgaagcacacgacctggagagaaacaagaatctctggctaaacagtgagccagcttgtttgcagatcgtttgacaaaacgcaattcaacattgtcgaaagataaaagcaacgcacgaacatcatgccctaaaagaccaaaagaaaatgacatagagacttgtccccaattgtaacgatcaatccaacttaatgcttctttgatgccaaccatctcagcaacttcaggttgaaccctccctacatgaccccgattgaaagcctccacgatattaccatggcagtcgcgagccacacaaccccacccaaacctgccttcaaccatctcaaaccagacaaccataaaacatctcaacctagaaaacttagtcactcaaaccagaaaacttagactctcaaattaaaaataatggcaaaaaccagaacaatctcaaactaataaccaagaaccaaactcataccataaaacaatcacaccatgtcacaaagacaagacttacggtaacggaaccgaacggaagacaaaagacaaaagacaaaaattttactagataaactaataacagtaaattaactaagaatctatccccatataaacctaattagaattaactactaacagaaattaaagcaaactcaaaacaagatccccttgtcgctgcctacgtcgctgcagaatcccatcgtcgaaatcatggtgcgtgatcatcaaacaaccaaggacttcaaaacagagacaaatgtgatcacatggaagcggcaacttcaatacccgagtgcttcaataacaaagaccaatgtcgtcgtcgtccctgcaacttcgtcgctgacgtcgtcgctggaagcggctggaatcacatggaagcaagatcccgtcactgccttcgactgggactgggaagagcgaccgccgacgcactgaccagcaccgtcgactacgaaagggaaggcaccgccgtcagccaatcgaccaggccaaacgatgaaacctagcctttgcactctctccagttaaactattaaacttaatttattatattatagagaattttagtaaaaatgtatatatattaatttattcaaattatttaggcgggctagaataatatttgacccaaccaatatatttattgagcagtttggattttttgttaggttattcaggttgtgttttttatcagtttattctattttgtttggacaatttgtttgagctgggcgatttgtaattttttttaacacccctaacgattagggttcaacaacccttaggtcgtgtctccttaagagagacacaccaaccttccctgtataaagggccagacttggcttgatgggggattcgaaaattcattattcataagcagaaactctagttttttatttcttgcactcaagagtctgttcttgacctacaacccaaattattaaaacacaagggcttaccaacacttgaggttgactccacgtcggtgttctcattagttacgacttcacgtcgtggttagctaaaataacccgtcaacaatatatgtataatgaagctttaaagttacaactattttcggtaaaaaaatttacacttttatgttcatatatatattatttgtatttttacagtgatcttgaaagcaatacgaaaacaacaaaaatattatataaaagtaatagaaaaataacatcaaaatataaaaataatatacaataaacaaaaaaaacaacaacaaactaataaaagtacaaccattaaaaaaagatgaaagcatcaaaaaactttattttccataaaattatttaaaatttcgtacgaatattttttttttcttttgtatatttatgaaataatttcaattatttaatactagtaaatacataaatactatagagtgcatacttcattcaaagcctgtacttcttatgaaaattcagattgatcacctatggttattccctaattaatttaccttccctagacctgaaaccaaaagaacaatctcaaatagcttttgctgcattgcactgatgatctcccaacacacaaagtcatcaatgagtcacctcaacaatctcaaatctaatacacagtacaagtgtcaatttttgtgtataggacgttctgttctaggaagtttaatttaatctattggttatggttttgagagaaattgcagggtattcgtccttagccaatatctgtgagtgaataagataagagccacatatgatctacgtgtgtatttggtttggggtggctggccactcatttcccttgttcaatttaaatgttccccaatcacaatattattcttaacttacttattttggattgcagtttcgtttactcttctatactatttcatccaattaaataagactatacgttatacatcggttaaacaagcaattttgggttctttttttttttttttttcaagttttaaaacaaaaaaaaaaaaataaataaataacaatagtttaaataaaaaaaaataaataacaatagtttaataaaaataataataatattataaaaatacttctaaccagcctaaataaaaaaattacacacatcttcaacccataattcatgcttcttaggcaaccatcgcccaaccatacagcaaccaaacgcaattgaaacgaaaattcaaccagaaagagaaccaccatttattctagcgacttcacttgagaagacgatcagaatcaatcaaaacaggggctgttttgaattcatgaaaaaaaaaagtatagaaaaactactacggaactaaaattcaactggaaatccagtttaatttgcataaaactaatgtcttgactttaattttcagatccatgaaatgcagatgtcaaaaagttgaactagaatccctaaacaatccaactcaagtataatccaaaaacaaatacattaatactatagtaaaatatttatccttgtgtattttcgttgttttctaaatttctaatgatgaatttgttcatattaaattatgaaaagacatgtaaatggagttacgtacgtggaaacaccgttctaatttttaatgtttcataacagttacattatagttgcataaacattttactaacagttatttcgtctgattgaaaccttcgtttgatacaaccttcggccaaccacccatcaactttcgtttaattgaaaccttcatctgatgcaaccttcggccaaccacccaacaaccacctagcaatcttcgtctgattgaaaccttcgcctaattgaaaccttcgtctaatgcaaccttcagccaaccactcaataaccacctagcaacctttgtctgattgaaaccttcgtctaatgcaactttcggacaaccgcccagcaaccatcatctgattgtgtaagtggtagtgtaagatgtattttggtaattaaaagctagcacataaaaaatataaatattgtccacaccttatgaaagtatttttgtaaataaagtgttaatttgtcttttccatgtaataatttctaaataatattactggacttataaatatcttcctattattatttttttaacatatttaaaaacatatttttattattaatttttgtttaaacttactgtacatatctcaaaaaaatattttcctattaatatttttaaaaaaataataaaatagagaaaatatttatgatatttgactttattacttattgaaaaaaaaaaaaactaaaaaccaaaatctttctatagcttttctaaacaaatacaacaaaaaatatacttaattaaaataaaaattaagaatataactaagtatacgtgcattatatatatataatattatctagtatatatatatatgggttgtgtagtattgtgtcatgctaactttttataggatagatcgatctgacacgatctataggccttgtattgttgtgttgtatttgaattattgtactttattcgggctgacctatttttctcaaaaaattcaacatgttttcttatacaggttcaaattcatgttctacttttttattttattttaaaaaataataataatgagctaactatactgaagtatgagtattttttttaatatatatataggtttaattatttttgtataatttttgagcaatatattttacacaaaatcttataaaaataattataattattagaatgtgaatatttactcataaatgctcaaatttttaactcacaactcttaaaataaactaatatgcagttttaattttatattttaatagttttaattataaaattataagagttagtgttatattttaatttttattatcattaatttatatatagtttatgaataaatattaataattattattattatcatcaaattataagacttttcaacgtgtcatactcacgattagtttgtttgtgattatgtgttatttttttaggcttatcgtgtcgtgctaaatcacatatttttgtgtctatcatgccaatatgcaatatcgtgtactttgcaaaagagtatatcaccttatgtcatgttcgtgctttttagactcctgcgctttcatagcatgtcaaaaaatttgacctatatttacatcaatttgggacaaacgtcgtaaacttcacttaatatacattaataatctaactatattttcatgtaatacaatagtaaattacatgaaaatgataatctctagcagtctaagttttggttatttaaaaaataataatgtcaaaattgtaatttgaaaatatattagtcgcttattaatattgaatgttaatattgtaaatcaaattgtgtgttcattactatgccacacaatactatcttatgctaatttggcataaatgttttttaattcactatcagagaagtattttgtttacaaaaatgctaaaatatgtcattacattataaattacactaaaaattacactaaaaagtattatattatttaattaataaattagattattatataattatttattttttaaaaaggattatttaattattaaaa

SEQ ID NO: 225471 - DNA, 1541 bp, Cannabis indica
ggcttaaaagcgttattttaaacattgctctaacaaaactaataaagcaacaccaaaattcatgatagcctttacccttttagttaactctgttgcccctcatcacatatgtgatcctattgggaggtttatcatacgaatatgtttttgatcacgagaacaatataatagaaataattagaccatccactgtaaaagattagtaaagaaaacactacgattgtgacaacaaaaaagagcaaagaaagttagactaacctgtaactggatactacaaactgcccagagcataaacctctcttctccagcaagtttgtacatcttgatagctgtctacagaaaaataaaacgaaacaaaaaaacacttgtaaataacataaattcatctcctatacattatcaaacagacataaatatacatcaactaccacagatcactcaaaaaccagggtaaatacaagaacacaaacctgttgctgtttcacaaatgagtactcccgaacatagcaattaaaaagacccatcattagttccaaattatttggaaatttcccacaagcgtgttcataacagccagtagccaagtccactatcacagtagaattttgatataaggaaaccaagtggccactgtttgtatagaaaattaaaaagacaattcaaatcagtgaaagtttaagacttacagtgatcaagacgttggaaaacaatttgcagcgtactaagagtgaggtcatccattaacatggaatcgtttttgtataaaagctcttttgcattcaagcaaacagataaagcttcctcagctttccccattctttccaagataagagctttaagtgcctgtgaaatccacaaccggaagatattaacacaatgcagacctctgtatatctagtaaaaaattgcttacatgctacatcaaaattcgaaataaattacactgtacacagcttcattggtttaaaattcgaaaaaaaatgaaaatttataaaagaatacgaacctacacatctaaattcacacaatccttcctttcccaaaaaaaaattaactttctcaaccatgcaaaaatcatcaaacacgttttaagaactaaaatcgaaaaaaaaaaagttaggaataaaaaccagagcatatggtgaatttggattcttagtgaggagagcggtggcgagcttgagagcatttttgtactggcgagaatcaacggcgtcccaaatgggtcggacccggcgctccggtatcccaccagccaatccgaacttggacgccattagagattcccacggttgaaatgagggatgtgatttagggtttttaaaggaagaagagagagtgttaacagtggcgttgattatcttggaggaaagtactcgttctgactcagcctctactatgaatgtttttttaaaacacagaagatttgttccaaccccaaacggaaaacctaacgctactgtttggatgcaactaaaacccaaatgatctaacactgcgctcggctttcccaatcccgctcccctttttgcctaataaaa

SEQ ID NO: 225472 - DNA, 2491 bp, Cannabis indica
attacacaaggacaagactttggttacagttcttacagaaggatggcctagcctattatgccaaagatcaaaatcactaagttgatttttattacaatgactgcagacagtattacattgaagattatgttgagatgcatctgtggtattatttgtgttggctgaggacacttgtgaagcttcgggtaagagttggatttgagattggtcaaaagtatataggccattcttgtgcttccccatcaaaagtatatgatgactcaactcgtccttaacatagcacatgtcatgatgaaattggaaataaacattattatccaaggcaaatttagaaaacactcaacaaatttttggtgatttcaggtacatgaagcagattgtttaggacaagaggtttattagtatgatctgtcaaaaaacgagattggccaatatgagtaatagacaaacctgatccgtctccaacatacattctttcgaggccatcatagctggtgcaattggtgagattgctcatatctggtgtgcaatggttggtggctccagaattggggtaccaattttcatcaattccttgagcagcagcagctagatttgcttgagcattagtacttgaagatgttgccatttctgtagtgtgagagggccctgccaaacccgtaaaagactttcaaacctgtaaaaacaggtatggacagtatggcctatcttcaagcatagctggcattgttgtttgtgttagcaggaacagagggcaatctaccagatctattgaaattcatattacctcgaccatagtaggggatattagatggtgtgaagttagagaaacctggtggtggagccaaggatgggccttgatggtaatttggtctgaaaccattcttgttccctgggtttccattgaatcgaaactgttgctgctgtctgaagtttctgtaggcaacattggcttccatttgagcattaacatccaaatcttgaacagccatgtgtgcgcttagatcaacttcagtgtccctcttttcgattcttgattcggatgagagtagtaaagcttcaatttctgcaactgaatattcttcaatcctagtgtttgaggaaataacgaaggtgtcataatcactagggaggcctttgaatatggctgcaatgtgatcccgtgcactgagtttttcaccaaccgaagcaagaaggtccaccatctgtttgactttcagaaggtactcattcaatgacaatctccctttcttgatctgctgtagcttagttctgaattcaagaatcttggaagagacttgtagggcaaagtgtttctctagggtattccagatctgttgagctgtattacaacccaccatccttgtaagaaggctctctgtcatggaggagagaagccaagaaactaggagctgatcttgaacctcccagtcactgtaagtttggctagtattcgattgcgcacgatcttcatcactgagaaattgagctggtggaggttcgaagatgaatctttgaagtctgttacccttgattgcagccaaaacttgttgtttccacagcaagaagttatggtcattgaggcgtatcgagagagtgtgattgaatgagactggagaagaattgtcactggttcgattcgctggtagattagcactcctgttgttctgcgaaggttgggctccgatcgtcgccatattcgccgtcaatggaggaaagtcccgctctgataccatgttaattctgtgagacattggggttaagaagtgaacaaagaacacagaacagagaagtaaagaaacagaggaaagaaaagagaaagagagtagaaagaattgaaattgagaaagaatgatttcattgattattggtagcactgagatcagtactatatatactggtacagaagactagccaagactaataacagaaacaacaacttgtaacaactaacagactaacagcttttaactaacacaatcattagctgtcttaacaggtgacaacttcttcttctattgctaattctttacctttagtacctttgtctttgggtaattgttcttcttgttccattggtttatctcttgaccaagaattcattatttcatcttcattaattctactactagaagaatccattttgattttcttggaatatattgttatcactacactcttttatatgtaatacttgtaaatctatttataatcctcggattgtatataatatatttatttatttttgttagtttgtgactagtgagataatttagaaattaagtcaacttgctttcctggttgggaccatttctcttttaattacctttttgtattgattagtcacaaataatgataaaacagagtgagaaatatattagttctttctagtgatcatattaatttctgaaaatgttggtaaaattataaactatcgaaaagaaaaagagataaatcaaaaagaaaaaataaatggtcctattaaggtcgg

SEQ ID NO: 225473 - DNA, 4376 bp, Cannabis indica
atggggagctatgctatcttggttttgcaatgcatgggaagccccaagaatgttttcaactgtttaatgaaatggtttcacaaggattatcccaaccgaatggagttgtttttgtggcaattttaacagcttgctctcatgctggattcgttgaattgggacatcgatatttcaatagaatggttaatgagttcggaattgtaccttcaattgaacactatggatgcatggtagacctccttggccgtgcagggaggttagcagaagcagaagatttcatttcgagaatgccaaaaaagcctaactcgatcatttggggtgcgtttctcagcgcttgtagaacatacaaggacacaaaaagagggaatgttgcattcaaacacttaaccgagttagagccaatgtctggtgatcggtacaagcttgcaaggcttatgtttcacaacactggcgaaaaggaaattgccaacgcgattagaaagttcatcgacgaaaatgatttggagacaactcgcggagtgagcttcattgaaatcgatggtgtagtgaatgagtttgtatcaggcatagttaatcatgacaggaatgaagaactctatacaatgtgggaaagagtaaacagatcacttaagacagcaaaatctgaaactgacaaacaaaacctttctttgtgtgtgtgattattattaatgtagtaaacacaaatgtcatagcattacatcattattttcataatgtttacaacaatatacaagtcaaaagactatatcaaaaacaagctatagtcttgactgtcatatcctttttcattttgtataaattttataagttaaacagatctgatcttgagtttttctacaagtatacaactgatttcgataaggaaggattcaccataggcggttgatcctaggtttctgtcgaaactgcttctttgtcacgcaccaaggaccggggaacgtgctcaactgtacaaacaacaacagaaatcatacagcaaccatttccaaagagttgtataagtccaaatgtttatggtaagttatgcagcttacattgccgattagcttagccccgaaccacgctgtgtcttggccgtagggaggaggaatgaccttaactccgcttgacatagatggagagagtatttcatgcagttccttttctagccgatctgaaacaacaaccaaaatgcataccacaacacatcagtgtgtcaattttcaccaattttatgcttttttccacatgaaagtgaactgcatacacctgccaatccgggtaaacacgccgtgcctcctgatagtatgatagtcttgaaccaagcattgtcacttgttagttctgcagcatcacaatggtccatacagagtgcaatagcctggtgcaaacccatcgctcgcctagtaaaaaaacataccataaagcgtttctagacatctttttcgatgaatcaataagtacccactgtttgtaaaactgtaattgttttctaattttataatatggcacatataacacccagattcttgatcatttggtctggacagaaacatgtagtactagttatcttcaaattttctattaataaattcaaaatgaagtttgtactgacgaaactggaagaaaattatagtttaacaaacattaggtacttttaccgctatttaccccaataaatattattaacgaagttggagaacttacactcctgccattcgtggctggaataagatctcggctgtttgaaaccgctctttagaaagtgtgaacagaccttctcctgtggcatcacatgatgcttgtgtatctttgagtagctcagcttcataatcataagcaacataacagagattctgtatagaaatcggccataaacagaactcagcctaaacaagatcgaaacattcgaataacaagtaaagagtttgtacctctttcaaagtgcgaacggtgtacaacgattcgaaactaatattgttctgctgcatcaactccttaagaaacccggtaagttttagtgctcccaatccaacaacctccacaccaactttgcgcattactttaccgtgtaaaactagaagccgaaaaagaaaaggaaagattacatttcagagcccgaaaaagaaatgacaccagcataaaagaaagcagtggaaaatccagggaatgaaaactaataaggaagcatgaactgtagaaactagcaatccttactgggaacaaccgatgtgacttgaaacccgatatttacaacaattcctgaagttcttctagcagcatacaaagctaaagttgcctacattttcaaaaacagataatggagataagattttacaaataataagtaagttcaggattgccaaccactcaaatcacacaagcttggtttataaaagggtaatgaagagtgaaaattggatcaaggggtgacggctcaaatagtcaagctcctatagttttccagttgttctagggcccttctgcatagttcttctgaatttcgaataatctataagatcttctgttttcgattatctaataaatctttctattcatttcaaaacttgcacgatcctcgtcctcaaatactactagtattaaggcatagagaaattcacctgattaattgcacaaacagcaggaacattcatgtcaaagagtgttgtatagatggcttccttgagttgtcgtcttgatgcttttgcggattcggtatctgcaattagaagacagaaaccatatcatatgaacataaagtgtctctcaaacaagaaaaacaacagacatatcaaattatagaaattggtgctgactgaccatcataatgcaagattggtatagacacaaccacaggctgtgatgctgctcttacctgcattctacaaaattcaaaacaacacacacatcaaattatatattaactaaatacttattggtgacataacaaaacaaagagaaagagaggaactaccttccataaatagtggaaaagaactgcctaagtcttgaatacattggagattcaatgttaccaaattcctgcataagaaaaattaacaattgggattagtgaatgaatgaaatgaatattgaaactatgaagttggggagtttaaaatgtgaccaagaaagtagcagagcgcacagatggagcagcatacttgctccaaccatatttgcaataaccagaaccacctgaacaaagaacagaaattgggtattcaatagtgttcttataatactacaaagatcaatatctttatagggatatttgcggcaaaatttcttatgcaatttattttgttgcacttaaatatttatgtaaattttttggtggtgaaaattccttagttcattttgttgcacttaaattcttgtgtaaattttttagcagcaaaactcccaacgattacatatttaatgtagcattagtccttgagttggtaacaacaaagagactaatattgtaacaaaatgtctactaacaaaaaatttacctaagaatttaagtgcaacaaaatgaactacatatgatttttatcaccaaaaaattaacatataagtatttaagtgcaacaaaataacctacatggtaatttttgctccaaatttccctatcttctttatatcatgtagatattaccatcaatgataattgagagtaacaacaaaaaactaatatgataacaaaatgactacatactcatagtagcaaaaaatttacatagggatttaagtacaataaaataaactacataaggatttttactactaaaaaattaacataaatatttaagtgcaaaaagtgaactaaataaaaaattttgctgcaaatttttctatctctatatcatataaatattaccatcaataataattgatggtaacaacataggaactaataaatattaccttactagtaaaaaatttacatagaaatttaagtacaacaaaatgaacttacataaagattattaccaccaaaaaatttacataaatatttaaatacaacaaagtgaactacaaacaaaattttgctgccaatttccctatctctatatcatacaaatattaccataccatcaattatcattgatgttaacaacataagaactaatattgtaacaaaatgactacgtagtagcaaaaaatttacaaaatttacataagtacaacaaaatgaactaccaaccaaaaatttactagttattattactattgactagttattgttcttatattactataaagatcatatctttatatcatataatattaccatcaatgataattgagccaggaacttgcacacgttgaccataaaatctcataaaaaacaattgagtaggttgagtagtgagtgttctgcaata

SEQ ID NO: 225474 - DNA, 3110 bp, Cannabis indica
ttgaacttaatggctaacaaaatgaaggtaatataaaaacaccattattataattccattgtgattagagtcacaattatgcatggcatggaagaatatatagttttatatataccaaatatataatttacataaatctagagcatgaaagatagtcaaaattgtaatagttttttgttttggtaaatgtatctgatcaggaaactgatgctgaagaggagctaagagaggctttcaaagtgtttgacaaggaccaaaatggatacatatctgctaatgaggtagatttttcctttgtttctatcacaattcacaaaacatgcctaattatttgagaaaggaaaaacaccctttgtaaggcttaaatatattgataaagaaatagacttttatcaatgagttttgtttttcaaatgagacattatttaatttaatatatatatttgaataaaaaggtagtggagatttgattctaccaaggagaggtttatgagttcaagaaaaaccccatctagtacttaatagtatagatagaagaaaaaaaaaaacaagcttcagcaagatgtgttagagccagcaggagtgtgttggtgatctatacctgtgcataaattaattcaagtttatctactattgctaagatttgccagccaagagggacaggggaaagaaaatattataaatataaagagttaattataaagattagtgacaatattaaaatggtttccatatgggtaatcgtgaaataatttctaatttttaataagggtaataattcacatgtttttaccttagtttatattaattttagttaagagtatcccaatcatgatcctctgtactttttcctaatgcaatgtacttttagtcatactttgattagggatatcttttctttgttttcatactttgtatactagatggaatctctaactctatttatataattatatattttcataactattttttatttttattttttttagttgagacatgtgatgataaatcttggagagaaattaacagatgaagaagtggaacagatgattagagaggctgatttggatggagatggtcaagttaactatgatgaatttgtgaagatgatgatgacaattggataaaagaaaaatcttcactcactttgattgatgatacaaaattctttccaaacgaaaattcattataatccaatccttactttttgttttcttttcaagaaaattaaatattaatgtttttggtttgttgttgttatttagtccagttatgatgtcaatgaccacaatgtagaatgacttgacaaaactacaccttgatttgttaactagttccatattgtattttattttatttttttcattttagttcaatatagtttctgtacttttcttatttatttatttatttatttatatttttagtttgaaaagtgtacccttttatttatgaataaaagacatgaaatttcaactaatatcgatttactatatatacattatacatcatataccaatcaattttttccaagtgggttattaatatatagagagttatattcacatttagcaaatatagaaatggatctttttagttaaaaattaattacatatttattctgaactaaaatttccattttctctttaattacatatttattctgaactaataaaattatgttgtgattataatcataatcataacttagtgattttacaaattttaattttaaatttctccttccttaatatcaaaagatatatatgctcttttttcaatcagcctttcaaatatcttaaaaaataattatctcataacatagtatattaacacgttatatattatgtatagcctaattaggatttttgtccttgaactttgatatgtacttgatcatgcccctgaacttttaaggtcgttaaaaatgccccatgaactattgagattgttggatttaaggacttttgtctaatttcattcaattttactacttcagtgattatttatatactaaaccatgctccccagactttgatatctaccaaatcatgactctcgaactttgacatgtctaaatcatggcccctggactttcatcatgttagacttttttactaaaattggaaaaaagtcctaaatccaacaatctaaatagttcatgagggggcattttcaacgatcttaaaagtttaggggcatgacttggtacatgtcaaagttaagggggtaaaaatcctaattagccttatgtatatatatctaaatatcatgtaatatggtttcaaaaaaaaaaaaaaaaatacctgtaatacacatatttacccttatagctctataattattttatgtttatcttccaactcatataggtgtacccgatttaaaagttgtccaacttttcggttctcaaactttgaacaagtagttggaaacgttatccgtttatttatctatttattattaaattttaatttgagaaaaattaagctctagagtctattttatatgattttaaaaaatatagagcctaaattattatttagaaaaataaaaaatataatcaataatttttacaaaatattaaatctgaaatagtattcgcacttctttcaaagccttgagttagatacaagatcatatgcatagttggtccaatgtggcggtagaaataacactgtattaatgcggtgcatgctattaaaagtagtgttcatatgattttcctatatggcacaatttaattaggctatttagaattttttttttccgaattatgaattacaatgacccttgaatttttaagcgtgttaaaaatagtcactgatctattcacaatgttataaattagttattttgtcaagttttgtcacacgtagtaaataggatgatcgtatgacttaactagttatcacgtcaacgccatatatataatttaaaataaatatatatgtattttttaaaagatcatgaaattaaaaaacaatcaataattaaaaaaattacaaaaaaaaactaaataaaaaataaatttttccaaattaattatacacgtgacattaatgtgatactgatgtgccacgtgtgataaaacttgacataaaaat

SEQ ID NO: 225475 - DNA, 2626 bp, Cannabis indica
agagagagagaggggcgatggcctatgaagcggttgttggcagctaggtagttgtttgggcagtggtcgatggcatcgtcgacatctgggttcttattaagagagaagcggtaaataaagaaaattttcgagagagcgtgaaggggaaagagaaattagggttcatggttttttttactttagagagagacgtgaggaggaaagagaaagaaaaaaaatagtaaaagaaattaactgtttttatgaatttttttggtggaattaatttttttatgattcattacacaatttaaattagtttatctaaattttattttatttaaataattaaattatctggactaataaaattgtgtcatgtgtatactgtatacacgtgaacaatccaacttgattgttaacaatcaaatttagatagaaattgtaaattgctaatgttactgtgattttgagggttttgccgttaaaatttagattctgtgagttaattactaacaaaatgaaactattaaatgttggccgcaatttattctattttaagtattgttataaagtaccttggtctgcaaaagctgatctaaagtggtcattcagctaaaataactattttataaatatctatataatataggaaaattttgtagtaggtcccttaaagagtcgttcttgtatatttttttttatatctatttctaatatttaggagagttttttagtttaatttttttttttattattattgcacacgttgtagttatttaagaacacttgtaaatttctaaaaaatatcgtgtgtatatgaaaatcattcgagcatgtaaaaaaatatttaattctttttctctgtattgtaaactagaaattttgaaaaaaatttaggtaattttaaataactataccgtatacggtcagaacaaaaaatagattacaaatttatgtcgaaatagatagaagatctactcaaacattcttttaaagagtgctagacttatcctataatatatagctaaatggttagtgtataggtggccaatgtaaaaatagagtaacttatattctacctactactcaacacctaccgaggaggttaaggggttatttggtatatgacataaaaatattctttgaagaaattagtgtatatggtgtagtatactgcatatgcgtgatgcttgcatgtttaccttagcagtgaagaagtcacgaattgacgaggtaggattgagttgatacaaactaaaaaaaaaaaagaacgagggagaggatagtaacgacggcctggatatagtcgaataatttgaaacagaatctgcaccgactttaatgagaatgaatggtataatattgattctcatacaattatttaataaattttagaaagagataaaatagtatgaacacaaattaaagagaaaacaaaagtaaaagttctccctatttttttttagggaatacctctttctttcctaacttaattattttaattttcattttattaattaaaaatgaaaaagataaatatgccctttaaaaatttataaacagaaaataattacatgttttaataatgacaattttatcaaattaaaggatttcgattaaacaaaataatatgattctatttttctttccggacagtttagtaaacatcataataaaatattgtttccgattattttctatttaaaactaatacatttctctcattaattattctgattccaattacagtttggtaaacgcgccacaaattgaaaattttttccaagagacttaaaaaatactataaaatgatagaaagtttacaaaaataccgtgatatggagtttttacatttattttgtaccaattttataaaaatactgtatttgaagtttcaaaattataaaaatattgtgtttcagtaaaataaaaaaaactaacccaaaaacaactctaaaataacttaacaaacaaagcttattttaccattataccaaagcttattttatgtgtatagatatcacttttatttataaatatatgttgtaactaactaaaatgcatatatatttttttcttcgattttttttttcagggtaggcgactatcacctcgcctctatctgagttcgcccctgctcttaaacatgtaaaagatagaaaaatataagaggagtgctcttaatttttttttttcttaatagagagaaagagtgataagaaaataagatatcaaaatatagacttattttatatatatatttatatatacaaagataaaaatatgtataaaaaaaaaatagagggaagaaaaaaaataaaataaaagctaacaactgacttaaaaaaaaaaagctgaccaaaaatatattaaaaagaggaaaaagaaaaacttttttgaagatttaatatatataaaaaacagtaaaaaaaaaaatattaagtagggaaaataaaaataggaaaaatttattctataaatgtaaggtttagaaaaaaaagttagaagttgtttggttgtgttctcagttttcagaattgtgtttttaaaagtgagaacagaaaacaatttattatcatttcaaaaatttaatggtatttggttcacattttttaaaactctttttacattttttttttactta

SEQ ID NO: 225476 - DNA, 4651 bp, Cannabis indica
aaactaaattagtgacaacttgtaactaaatactacgtttgagtcataagtatttttttgttgtgactaaaagtcatatttagtcacaaaaattttatattgtgactaaaagattgtcactaaaagtaacagttttttgtagtgataatcttattaaatgcgatgatcctatgcaaaaaaaaatgcgagggtcgaataatcaaataaataattatcatcaataatcaattacaaaaaattataataattgaataaaaaagtgtaaaaaagaaaataattgaacacttttctgatataaaatttgttaatattttgtttgtttagtgtgttaattaatttcttctttgtgtatttattttgtaggtttacttaaattgtttatttagattggatatagatggtctcaaattattttgtttaaatttttaaagtaacatggttttatataagtgggttttttttttttttttagttaactaatttatattttgattttgtatactttttagctagacaattaatttgttggcttgatattattcttggtccacatttatctgttattctgatcactctttcaaaaaataaaaaataaaataaaataatatataacaattgatattgaaagtggtgtctcattatttgatggaaaaatactttaaatgaatctttattttaaaatatatattaaacctaaatactacatttaatgttgttaatatataatagcgggatctttcttctcattctgatatgatgttagctttcatagggaattaaggttgatacttgatacacatattaattgggaatactctatttgtagcaataaatattgaaaagaaaagaaaattaataaaaacaatatatatggaaaatacttaggtagaataaaaacttatgtaaatacaaattattttttttcattatctgttacttttatatttaatattaatatttaattaattttttatattatttttttaaaaaattccgaaaaacaaaaaaaaaaaaagtaattagtttttaaaaaactaaataaataaaaaagttgttagttaaatatataataaattacaatgcaatgttattattttgtttttttcttaaaaaaaaaaaaaatcattttagagttattaggagtgtaccatatatttaattagtaaatttttttcttcttttgagaaaaataaccttccttatattgatatcaatgaaataattaaaaaaaataatataaaaagaattaatttaatattattattaattatgagagtgagacataaatgaaaaaatatatatttatatgtatagacatttttttgtaactctacctaaatattttcctatgtattaatatataataaatacaccccacccgtgttttatttatacgttccactttgcatatttcatctacacaaatatttgaaaatataataatgaccgtcattaggatgaggtatatactgaccttgacaattttatgttgtgttcttattctaaatattgattttgcaaatggaagaagattaatacttagttcagaattaggcaagcgcaagggaaccatcaaaactattgaggtttgtatatatatccttgttattttgtatttaccctgcagtcattactatataggaatgcttaaacactttatttttcttctatacttcaaataattaattatacaataatcgtattatttgaacttgaacatgttcctaattataattaagaaagaactaatgtagttaattgggcagagtgaagatggtgaagtcattgattgtgttgatatatacaaacaacctgcttttgatcatccacttctcaagaaccacatcatcgaggtttttgctttttacgtaccttatcatcatcgacacatttatatatttcttttcaatacacatttatgttttatatgcatcataattataattgactttcacttgtttttatttatttattttttttttttaaaaatagctactttggacacatagaaaaaaatgtttttgacataataaaggaatgttttcgacataataagtgcatgtttgacagcataattaaaaaaatgttttttgtaaaaaaataatttagcttggttggccttattttttgaaaacagttttctaaaaacaaaaatcttgaaaacaacaaaatgttgttttctattttaaaaatcaattcactgttggtcaatattgtttttaaaaaacactaactaaatatgacttgtgttttaaaaacttcaaaaattattttttgttcttatttctaaaaataattttttgaaaacaataacaaacatgctctaaattatttaagttttaagctataaaacatatcgagggatagagaaaaaaaaaagtagttctgatttggtagaattttgtaattaatatattttattatgtggcctcaagtttttgcaagagcctagctaattgaacaactcatttatatgtgacatatgcatacagccaagttcaattcaaataaatcagttagaaggggaaaacgatgattcactaaaagcattacaaatatggcgtaagtatggagaatgcccaaagggaacaattcccattgttcgtgcaccaacatcttctaaatatggtcgaaaaacccatttcaaatctcactatagatataatcagagccactttgttgcacctggtcacgaggtaccaataccattatatatatatatatatatatatatgctaattatttgggtggttgatgttgtttatacaattgtatctatttatatatatatatatatgtatataaatatataacatatgttaaatatgtatagtatgctgaagtgacgatgaatggtggaacatactttggagcaaaagccaatattaacgtatggactccagtatcacatggaacaatcagtgtagctcaaatttgggttgtgtcatcaagccaagtagagactgaaattaatactgtagaagctggttggatagtaagttgaataatttcacactatttttataaatggctctgccggtaatataacttagttttaattaaaattacatcaaaatttggggttcttgaacaggttcgtccaaatgccacacaaacagaattcttcatttattggacagtgagttctcttattcctttaagtatatataaatataatttttaaaggacgcctaacatataaaaaaaaagctcattgtgctaagcatcacgagaagaatggtgcaatttaatgtctagctccatatattttaatttaataaataatataagaatctattaactattgaaaatataccactaactcagtgttggacactttaaagtaactaatgtgaatgctcatgaatgagtgacgcccatatacttttatacacttaagtctctatatatacatttatatattataagcttcatctctagtgttgggcatatataataaagctaactatacatataatattaattacatatgcaatatattctaatgagattggatctcctgtgggactttgaattgatctgcagagtgatgggtatagaaccacaggttgttacaatcttgattgtcccggatttgtacaagtaagcaagaatgctgctttaggttctatattgcaacctgtttccatctttaatggggtacaaaccacaatacaagttagcttagctcaggtatattatatataatatactatactatactacacatgcagctatatatatcttttaaactaattaaattgtgtattcagcacaaagagaatggagaatggtggctggaatttggaagtgaaccaataggttattggccaagctctgtattcaagacgcttggtgggggtggcgataccatcaattggggtggggaaatttttaacgatggggcgaatgggcatcatacggaaactcaaatgggtagtggtcattttcctattgaaggatttggtagagcaagctattttagtaatttaatgtacactgataatggcctaacctttaaagatccagaaaaactcaccacttatgctaccaagccagtatgctacgatgtcagaattggagaagacaagtctactgataaaggaacttatttcttctttggtggtcctgggtattcagacaaatgtctctaataatggattaatttaatatatcatctttttttgtttttacatttatagaataagtttagtttaccatgatcactacttgatgaactcttatattattgtaatacacttaattactaatttttttttaaaaaaaaaaaaagaaagaaaatgggtgatcatcgatatagcaataagattttcctcataagagactctgtttcaatttcaaggtcggaaataacaaaaaaaaaaataataataataataatatcgaaccaccaaacaaagtttgaggaaacatcaattacaaactttttgaaaccaaaataaataatggaattaattaatttattctttctgaaaggaaagaaattaaaattttgaatttcgttaataatttcaatttatttctattttttgattggaaattctttaaaaatatagtaaaccccgtctttaagaacgaatagaaagagggagacagaaaaaacttctaaatttcccgacaggggatccac

SEQ ID NO: 225477 - DNA, 1808 bp, Cannabis indica
taaagggaacttcttaaacctcatatttcaagattcatatttaggttgaaagggtttacctcgtagcccaaaaagtacaaactaaacttcatttctggaaaatccaacctctttagtaacctgaaaacaaagaacaattgtaaagaccacaattcaacacaatagaaaaggaatttgttaatttcattcaaattaattaactaattgaagcaatcaattcttacgacatgccgagaacgcgagaataaaaatcaagactgagtttgggatccttgattcgaaacatggtttgttgcatgatgtaacctttagtagcttcatctggagtagcttcaaggcctggattgttcgccggtgattcttttgccattgaaaacaatcggacaagactctgaaaaaaaaaaaaaccaaatcatatcagaacaccgtgagaaagaagagatgaagaattcatgggagggaaggagacctttcgtttggagttggagttggagttgagaaataatggggaagaagagaaagatggagataatttggtggcagtgaagcggagaagggataggcttatgattgaagaagaagaagaagcaacagcagcagccatagaaatcacactatttgtctcattatttctcaaagggctgcagcattcataaattaatcgataaaaaatgattgttagtgcttgaaaactaagttttttttagcatgtccaattaaaaagaaagtgaaattttataatttctcgagatgtgtaaagtaaaatttttaagagaataatgacgagtgtagggatggcaattatactcgcaggttattcgaacccgcggtatgggagttgacttttgggggcaggacgggtatgggtacccgatgggaattcttttcccgtcgggtaatcctcaccccgctcctgctttaatttaaacgggtattggagaaagtatgaggtaaatttaagaagcgagtatatggtgggagatgcacctgtcctgcctagacgagtgttgaaattagttagtgataatttttaataagtattgttattaaatattggtagtgttgatactattaattagtgatattctttaaaatttattctaaattatataagacttaatagttaattacactaatagttgtataacaaaaatagttgcccttttagcaattttctttttccaaagttattggctatttaggattacaaatagtccatgaactgcttgcagtaaattgatagcaaacaaaataataatatagttgctttgacaattgtgtggatgtgagtgtttattaaattttttgaaaaactaattattaaataaaagagctaaaaatatatatataattcagaatgaacaatatataattcatcatcctagtctactgcattgttgtgctgaataataaggctcaacatattcctaacgtttggttggaggtaatgaaatggaaagtcccataaaactctttttcaatattaccgatcatttagaaaactaaatggcaagatgctctgatagttgctagaagagtattttgataaatattcgagatgaggtaaatgccagtgcaaagcatctgtaccgagtaaatgggcaaaaaactttgcaacattgcgcagcttatttgtttcgagccgatgaatcgtagagtattgctggacaaagcatttctcaaaatcttcttgacgcactttgtttatcttacaaaacggctaagcgaaaaaaccataatatcttcagtaggttctttcttgatcttgactgcaacattccaaaatcatgatgcaaagctccatctgc

SEQ ID NO: 225478 - DNA, 2798 bp, Cannabis indica
gacttgaaaataaatatgaaaaaaaataaattttaataatacaataaatagtagactttgggttggacattcacatattagacttaaataaatataaaaattgatatttttataatgtgcggtgtggtgcggtttaaaccgcatattaacaattcaaaactgcaaatcgcaccgtaccgagcagtttagaaaaaattcaaactgcgaccgcactacaaaaattttaaactgcattttttttttttttgcagtgcaatgtggtgcggaaagtttgagccctttaaacacctctactactgaatttcaataaaaagaggaaagtagtaataataatgatagtcccctttccttatttgaccaagtcatacaaagcaaattaacagaagttaacaaagatgagttgtcacatttttaccggtgtgaaacggagcgagacgcacagtggggacagcagatcacattcccaacgatgcatggcagagagactataaattaatgatgcctttgctagtggttcgtctaattatgaagtgaagacacagttggcatgccacatttacatcatcgagtacaaatagtatcttatacataaacataattattaacaatatgttttccataaatataatattgaaactctcctcaatctggtgttttcagctctaaataagagcctctccacctaattataaataatattcatttatatatttcttggcaaaacacatcatgaataataccacatacttaatgttcacatttgaaaaggtttgcattatatataataacagttgtaaaaacaataggtaccgtacaagatatatggaacttattcacttgtaatgttgaagagatttagtgaagaaaggattaaatataacatattatattgcatagttctttattctcatcctaccaaccatttcatgtgaaacaaattacacttatataagactgtggcgtgagagctgagtactctatgcgcatatggaagctgactagtttgatcaagagcttctttgatcttctccactggtgcattaatgacactgtaaaccaattcaaaaaataaatgaacagttgaagtatttcactacagagattaatgaatcatgaaaattggtataatgaataaaattacaaaccttggatttaaggttcaaactaaaaatcccatcaagagtagatgaatgaactgtaaacaatttgctcttcaacatttcctgcagtagaattggcctataattattgccatgtcctcttttattccatgctgcaaagcaggacttgctatccttttcttgtttgaccaaagccccagatagtaatacatagtcacctgagttcatggagccttgaacaccattgctgaaatcatcatccatgagattcaggctttgaacttgtgaagtcccatcattgagaccctttggctggtgatcattcttacagccataagaatattcatcaggagaattcaacttcaactcttcatggtcaaccttaacacacatttggtctttatcatgaccataatcatcatcatcatcaccatttgttctttgatgaaaacgaggcgatttctctgagcaagtaggttttgaaatatctagtaaagaagccttgatgtgctgaagaagattatggtcctctagcacctttagcgcacacacaaaaaaaagatttgacaagtcaaactgagaaaactgaaataattaagataaagtttttaaagaaattctattaccaaatctgttattccaaactcaattacaccacccatatgaggaaaacagaccactgtctacacaatcaaatggagctaagtgttactttttagagattttattcctttaaagaaatttaaaagaaaaatgatgaattaccatttacctgaattgacgcactctttagaaatttaagcatccatataaaaataaagtagagagagaaacagaggaagttagttagctttaattgtttatttaaaatgataattgtcaataataattctaaatgctagaatcaacattaagaaatacaaatcaataaaaaatttaaaaggatctaaccaaccttagctagtaaagagcgagaaaatacattgctatctgcatattgtgcattgcataaccaaataggctgtcccttttctaatgctgtgcttggaagactatgtaacattatagagtaggatttattagtaaaataatgtatgaattgctgatagaaagtcaaaaaagtagacaaatttagtacctttgaccaggtttgaacacaaacgacatgcaaaccaagtaataccactctgcatcagtgagatcatcaagagataatgcagcagcagatgatgatgtagttttagcttgttggtcagtttcaccttccgacagagacatgtaaagctctctcaattgcacacttctttgtaagcctgttttattggtttcaagctccattgagtggactattttcctagatttaatgtctccattgtaataaccagcaccccattccagcaccctgaacaatgtttcatcaagtctcaaacttttacccctgtaattatgaaatttgtgctcctaacacaccaacaccattacaaaatctatagctgaaaacactaaccaattttgtttgcttaaaaaattactcttttacaaggtgtttattgttaagcaatgttttttgtcaagtatcatcattttcctttgtacttattatgtaccttcctcagaagatgatttaagctttacttctgacaactatacatataaaatatttagcagaaaacacta

SEQ ID NO: 225479 - DNA, 3397 bp, Cannabis indica
tgatactctgtgatagaaatgatacaaggggttaaagatctgagtggaaggagtcatttaatccactgcaaccaatgtaagatttctcatactttatatgtttttattttaatcgtttttagagattcatatttaggacgttaaaaacatacttgttagtaaatctaggtcctggtaaaaagatattccaacaagcatgccatctgggacactaaccacccaaaagagatatggacgtctaccttgaggataaacccggattgcctagcaacggttatgctttttctataggatcagatcttgtatcttgtgacaaactgtggtagtgcgcatacctcgtacaccttttcaccaaacggttattctaggaacttactttttaaggttaaaccttttggcgatatacatcttgtacgaatggtggtcctttattgtccagtttcttcaatgcatgagcagagtatattctaagggacccaatagtcagctctttgcatgtattttaccccattagtaggctttaataaaaactctaggtgggtcatgggcatgtcaatacctgcccctttatcttataaatacccttctatttccatacgaaggggggtcaaaattgagatagcgaagctctgctaaaattactctgagcattcctcttcttcaagagaaaccaagaatatagagttagggttcttgcataaacactgtaaaatatcatacaagcctttcaaagctaatagactgactcgtggacttaggctcattaatgcctgaactacgttaaaaactccatctcctttattactgcattttactagttcttaagctcttattatattaatttctaaaaatcttggtaaacaaaggtaatacatcattttctaacacctcctctcaatctaagtgggggtggagaccacacgtagtttgtcaacaagcaaaatgaaatagagaatttgatagacctttagtcaagcaatctgcaacttggtcatgtgaggacacatatcgaatatcaagagctttggacaaaaatttatctccaacaaaatccacattcgattcaatatgctttgttcttgcatggtatacagggttggaagcaagggcccttgcaccaattttatcacaccaggtaatggggaatactagtataggaaattacatttcttaaagtagagattgaatctaggagattttagtagaaacttgagcgaacgcctgatattctaactcagtattggatcaagaacgaacaacttgtttcttagatgaccatgaaactagtgaatctccaaagtatacacagtggcatgcaattgattctatcatctaggaagtgggcctagtctgcgttagaataccctatcaatgttagtttatcacagtacttcatataaagaccatattcagaagttctttgcatgtatcttaagattctctttgcagctgactagtgaggacttgttggggctttaagaaactgacttagcttattgatagagtagctaaggtcgggtctagtaaatgtatggtactgtaaggcaccaatcaagcttctatattctcttaggttttcaagtggcacaccatattctatagacattattttccctactgttattggggtgggatagaatttcatatgctgcatatttttcttttttaagtaattctttaacatatttggactgtgagaggtacatactagtttcaaatatatttacctcaatgcccaaaaaatagtacaaaaatcccaggtctctcaaggaaaacaatttgttcatttttatagtgaattgttttaatttttctaagtgaattctagtgtaaattatgtcatcaacatgtatgagagcaatcataatttcagttgctatcttgtagaagaacaaataggaatctacctttgagttggtgaagttacaactgattaaagttgtcttgattttgtcaaatcaagccctcagatcttgtttcaaactatagagatttagacaattttcatacataatcagggtatttttcactttcaaacttgttggttgattcataaaaacattctcatataagctttccattcaagaatgcttatttatatcaagttttctaatctccaaaggtttggactcaacaatggtaaggactattcttattgtacaagcctttactataggactgaaagtcttttcgtagtctatcccgggtctttggttgaacccttttgccacaacccttgctttatatctctaaaaagtccaatctgagtttctttttaatttgaacgcccatttgttttccacaatattcatgttaggcattcatggcactaagacccattgtagcttcccaaccagcatgggcaagtgcttctgcaaaaattcttagtttttcaaggtcttttccttttaactgtgacttttcccaaataggtcttgggtttaaaaattatattcttggcccatatggaccattaagtgagtgggaatcaactgtttgttacctctcatttcatcttgagtcacctcttgatcttcatcgtcattaagcatttcaacattaacatttgaatcattgatctcatcattctaatcatctatagaatgatcatgatcatctatgccaggagacacttcgtgggtacttgaggtgtgttctctatcagtttgaggagcagtacggtattcagtttgagtttaggaagctatttatggcactttgataaaggtagactagtagggaagttgaacctaaactagtttttcagattgataggttttgaggaaactatttttgaaaggggactctaactcattgaatatgacattttttagtatatacaatctcccaatacttcttagacacatatatcctttgtgactttcattgtagtatagattaacacattttgggaatgatactgaaatttatgtgtttagtaaggtattatgtatgggtagccggccattccaaaagttttgagaaacttataatcatgctttttagagtaaatggtttcaaagggagacacattgttcaatgtaatgttggaagtttgcttataaagtaaataatagtttggaaagaatcacaccaaaatttaaaaggcattcttgcttgagtaagtagagtcaatcccatttctacaatatgcatatgttttctctctgttcttctactttgtctagaggtatgaggacatggatgctgaaaacctatcccattttgagtaactattggtgaaggcttgatattcacttccccaatctgtttgaagtcttttaatcttcctatcaaattgattttcaaccaaggctttgaattgtttgaatgcttctagattgtcatttttagcttttaaagggtagagccatgtgtatctactataatcatctat

SEQ ID NO: 225480 - DNA, 1572 bp, Cannabis indica
acaatcatttgctgagtgaggtgcttttaatgtttgtatgtatatttggtgaaaatcttgtaatatatacactgagattgcataatagaaagagaggtctcagatggtgtgtatctatagttattgaatcttggtagttgttgttgtttttggtgagcatcttgttgtatgttgtctatcaccattcttagtttgtgtcttgtaatctatgtgtaactcttggttaattgatagtgaactaaacatggcaaagacaagaggcacattgtctctgaacaaataggataaatccctcttgcatatcattccacttttgctgcaaatgcaaatgaagacaatcacttcattccataccactttatccacatttggaagaagatttgattctggtggaggagactagcttgaagccattcaaaaagacattaaaaagatttgttttcttctttttctcctccccccaaattgaaaagcttatctttaaaagacattgaggatctggaatgtcttttagactggttggagaaccttacttctctcaataaattttatattcataattgtcctcaatgggacctgaaagtagtctgtttcttctaaaagaggttctgaatgaggagaacaatcatgttatgttggaaacttttaatactcgaccacaccttgtaacaaaagctctgtgacaagtgaaaacgccttgtcaaatgaaagcattacatatgtggatattgtaaacagaaatttagttctatcttcaattttataaaaagatgtaaataaaagagtagatgtacattgttagatcagcacaataacagagttaacagctacctatttaaatctctgaccacataagaaagatactatttaaatttttttgaccaaagcattctaatagacctccccagtacttagttgagtttagagcaagtacaaaaacaggaatgaacaatcatttaattcttctcttgcttgagctgttgttacaaacctcaaaaccaaaaacagaaagaaaaactagaatcacaccaatcttctctgcaaataatctaaggtaaaaatctaaactttacctttaatttcagactgttttgctcttgttcccttattttgatgaatttcttctctacgactcccttttttgcacctaattttcaatttcaaccgaattataaatttatgattttacatttttcatgaaaaagagtacgtgttttaaatagcacacaatgcctaacagctttccaatgagcttcgagggagttttgcataaattgacacactttattaacgaagtaagcaagtttcgatctagtaatggtcacatattgaagtgcaccaaaaacactacgataccaagaatggagcttttcagaacctgtcatgagaagaatcccagcaggagttgagtaaacataaataccgaaaaagtaattaagcagacccaatctttcaaggcaaaacatgtgtaaggttgcgtaataagagtttgaatagctgcattaacactgtcactaactaagatatcatccacgtaataaataagtacaacacatagatataaggctgcat

SEQ ID NO: 225481 - DNA, 2477 bp, Cannabis indica
aaataatactaaaaacaacctaacaaaaagcttagaactcttgaagtagagagaaaatctttcactatgagatttcgagatttgaaatgggtaaaaaagttagagagaagtacttttgtttcctttttataagctctctgaggggtatttcaataaaatgatatttgaaatttgggttttctcccaagaaaggacaataagtactcattaaaggtacaaccgtcaaaaacacattttcccttaaccattcttacaatgctcaatatcctatttcttaggtaagcattaaatgcccaagatactgaagagacaacccataatttgcattgtgcgggcaagtcacgtcagatcagggacgatacatggggttaggcacgtgtcactcatcctaacaacttgcaggtctaataagtccacgttcgagcagttattctcacatggacttgggggacaaatgttatttcaatttctacacaaggtgacgtgacactcaataaggtgacacgtggagatcatttcaagacatggacaatttttcccctctgaatgatccgtctagaagattctacacttgtatttaagtatccaacaagcatatagactggatctgcacgtgatgctcagagtagaacatatttaagtcagctaagcaaaatgctctgcacaaaaggatatggtgaattttagatccttaagatattattcttaaatatctcctcatttatagcatggtcaataccctatatctgtgagatcggttttgaacagccaatagattctaaaaattaatgttagtttccttttttttatttattttaagtaacaatattcattatatctcccatataagtagcggagtgattccattttgttgatggatttgacgagggagcacttacgctaccaaaatatttgtgagctttcatctaggttgttaagaaatttacttggccaactccttgtgatcttaataatattaaaagtaatacaacaaaaagttgagtaggctcttaccataatcacaaggccaaacctctataaaatttcttgtgctctaattgctcataatcattatcctattattatcattcataaatatatctctttaaagactcagtattgttggctaaaatcaagatcaacaagtaccatttttatcaattttcttttacccctattatttgcggctggctccgtcattggtaaatgttaagtataatataaactttacaaatcatactcatgaacaatatagaatagaacacacacataatatatattggataaataattaatttaacacaatatttacttaggatgtgtatggaagcaattgtgtaattactatgtagtttagtttctaggatagtaattaccttatatttttaaatacaatgtgtgtttggatgttaattacatgtgaatttttattgtcatatttgacaagataattggtaattacacaataaattaatattgtgtaataatatttaatataataattattatcatttgaagcaaacatttaaataaatttatcttttaataaaaatatcttcataaaatactcaaatttcttaatatttttgtaacaaatatttaaaataacttttgtctataagactatctaattgttgttgcgttccatatatcttgaattattgtactactgtatggttttccagtcttaaaactttgagtatttttcatttctgtgttgatcaaaaattaataataaaacaaatttaagcatttcatcaattaaaattcatgccaaatcatgaataaatctattagatatctaatttaaaagagaactccaaaatgatgttaatttttttttaaaaaaaaatctaaattatcatatatatatatatatatatattttacaaacaatacaagaaaaatgacattaaaaaaatattataaaataacttcataggacaacaaataaaattatgtatatgagaaatgaaaataataaagaaggcctaaaccatattaaataaataaaattatttttggtatgtaattacacaatatatataattacatttaatacttatgaggggtatgagatttggagagagtaattgaggcctgccaattacgtctaattatacagttattttgtaattacatggctcaataaacacgctaaattgtgtaattaactttaattatatctaattaatttcaatttttacatggctttctaattaactttataaacacactcatataattaccaaaattctagagttaaagcttaataattgtgttaattaagtgtaatataatattaatcctacaatatacattacacatatatatacttcattttctatattgagacttgatataataactttaattattatacattatacataaactattttaatagcatttggaatttatgcttattatataaatgtgcatataatgtagggatattgacggttaaaccacctgaa

SEQ ID NO: 225482 - DNA, 1854 bp, Cannabis indica
cccttacttgacgcctatgaccagcaagtgaccactaagagatctccacgtgtcgtctccctcgatgtcttccgtggtctctgcgtcttcgtgagctccctatttaattctctcttctgaagttccgatttcgatttcgattctttctttagccttagatatgattccctctgtttttcttccgggaacgagctttgactctaagtcaaccgtattgactgtttggttttatgttagtttgtcgcagccatgttatatattaaaagtaatttatggcacatttcttttctgggttttgttgcttgagtaatgtggacgcaacaataaatacatacatgtaaaatggaaaagaaaaagaagaacactcttactgagctaggacgaatcatatatttgttattttattacaattatatcattgtattccagttgttttcatgctcaaagctgtagtttaagctcaagatcagtttgtaaaatggaatatatagtacacgtgtgacaatgaatatattctaatcgtatattggtttgttttgcagctgatgattttagttgattatggtggctcagtttttcccataatctctcattccccctggaatggtgtccgtttggctgattttgtgtgccgttttttctttttattgctggaatttctccggcactagtatacaaggtacgcatgtattccttgatcgtcacttttaatcatacaatgtactttttgtatgttttgataaagagtgacaacttttcaccaatttcgtagtttcaatactcttatcaattttgattcttacttgcgacttgattcatggtttgttgttctttgtaccatacagaaattgcctgaccgatttgtagctacacagagagcggtattgaggggattgaaactatttcttcttggtgtttttcttcaaggtaacattgtgcataaattttaaaaaacctggtcaactttcatacaaatgatcttaagctgctaaaggagaacacgaaaccattaccagtgctctgaattcagcactttctttctcttaggagactttttttgttggtgtcttcttattcgaagttagtctcagtttattcgttttgtctcagggggttattttcatggagtagcttcaatgacttatggtgttgacattgaaagaatacgatggcttggtattttgcaggtaaagtattttatttcactgttttttgtatcttgaaaaggtcatcccccactacccatttgaatgacaaagctcttgagattcataaattattattgtacttaataatgttcaaactcttttcatttaaatcgttctatttcaaaaacctcagtttaattatataaaactagtgcaacatgcttattgtatttacaactacaatctcgtgaatgtcaagtgacaagtaatattgagtccaaatgttcaatcgatcactgaagatacatattgcttcccgtgctgtgtagtttgaacatgtagaacacaactttgaattggtttcggcatttctttcagcggatatctgttggatacattgttgctgctttgtgtgaaatctggctttcacaccaaacttggaagagaatgggatttctcaagaattactatccccactggtaaggttcaaatatatatgacatgtatgtattttgttaattacgtacttttgaggacatgatgtatgtatatgtatgacaaaccatacctttttagcataacaatttctgaatgtgtagttcattcgtgtataataaatctgagaaatcataccttcaaataaatgtgatatgtatgtattttgttaattatgtactttgagaacatgatgtatgtatatgtatga

SEQ ID NO: 225483 - DNA, 1730 bp, Cannabis indica
aattatcactaaaagtagcagttatttatagtgacattaaatgttacttatacctagtttatttatataggtgtaatacattatgtttttaaggccaaaaacctattagtatttcacatgtaactttatatgaactctctctatatatagctaactatgctttgagtcaaggcattccaaaattttcaacttaaaattaaaatgtccacaacaaaagtctagtgtggaagaaaaaatccttgattcatggaaaagttaattagatatgcagacaaagagtattgtagatagatattactaattaattaattttaaaacccatgaagattcataattaattattttgatacatatatctcattccccactattatatgtctttttcttgtattgtaagaaagataaagcaaaagccatgttccctgttttggccgcggtttattaactgctttaattttcttttcatttctgtttttttggtaaaataatagtattaataatcatcataatcaaagattttgcattgaattatgaagcagcatgctagaaaagtagcttcttatatataatatatatataacactaatcttttaccagctagcattactagttttagtatagtttaatattaatatatgtgtggtgttgtttgatcagatgagtgtttattcgagaggagtatcagtgttaatgcccggagagaatactccgaccttcattgctcaccatgcaccagcaccagcaccctcaccatgtcctccagagggaatcttaagaccttttcacagtactcaaaataacgaaggccagcagtattctttcaataatggaacttcatcaacccaaaaccaaatatgaagtgtagtgatcgatcaagtttagtttagtcaactaaaaataacaatattcatcaaattaaggacacaaacactcagtggaaaattaagcatgagattattatatatatgtcactcttgtgtatagagctagggatatatatagagggagagaaaaagagaccgatgagttcatgttgtgattatttttttcctgctacaaggatatcccatcatcctaatgttgttcacttgagacctatctgttcagaaatgctaaaaggtaaaacaaagtgtccaccactaccaccaaaatgtcataattaatactatatatattagtataattaagtataagtttgtattgtgcgcctgttttggaacccagtatcatccgtttttacatattttaatttactaattattgtggaaaacatgtaacaattcactgtgagctcctggggatattacgcaccgccaactaggatggagcattttgagcgggttcgactcgaatctgagcaacccgtctgaattcgaactggtgaatccgtaattttaaaaaaaaatattcgggcaggttgggttcaacccggtacccttcgggcgggttcacgggttgaatttttatgggtatgaggtttcgggttgaacccgccaacctgtaatttaaatatgttatatatatttttattttttaattacagtttatatatatattaaattattaattaaaaaataaaaaataccttaaaaggtaatactaaccaccaaattattatatatatatatatatattagtttttggtttaaatttgtattctcattattctgtctatgtgtcaatacttaatagttgttggtagaaacgacaaaattaaaccaccaaattat

SEQ ID NO: 225484 - DNA, 3186 bp, Cannabis indica
agtttaacatagtattatataaaggagaattgctaaagggcaccattggtggctaacaattttcttagtgtcataccgctattggtgtaattaaaaagcggctctcatataatttaagaaaataaattttaaaaaatatagggtgacacctatggatagtgttgggcaccattggtgtccaatagtaatgctctatatgaaaatgctctatctgaaaatatgatatataatccaatttaatataatacaatacaatacaacttaatacaatgtcccatcaaccataaatgttgttgtcttgatatctctaatcactataactaaaatacccttcaaatattataataatcataaaccattgttactaattataataatcataaaccattgttactaatatacctgatcaaagagatgataatcatttgagatatgattattataaaatatttttttactaccaatttgaattaaattttacctttcttggaaaatttttacttctatgtggtagattatcaaaaatgtttgaagaaaaagagaaagtttgaaaaaaatgaaactttaaaaatcaattgaaagtgtatgaaacaagacatcgtaccacaagatgaaagacccaaatctttgacctttgttagactaatgtcagaaatggcgaggaaattttagaaaaatctttacttctctgtcgtagaatatcgaaaatactttgaggaaaaagagagaaagtttgagaaaaatgaagctttaaaaatcaattgaaagtgtatgaaacaagagatcgtaccacaagatggaagagctaaatctttgacctctgtcagaccaatatcagaaatggcgaggaaatttcagaaaaatcttttacttctctgtcgtagaatatcgaaaaggcctgaggaaaaagagaaaaagttttagaaaaatgaagctttaaaaatcaattgaaaatgtatgaaacaagacatcgtaccacaagatggaagatccaaatctttgatctctgtcagaccaatatcagaaatggcgaggaaattttaaaaaaatctttacttctctgtcgtagaatatcgaaaatgcctgagagaaaagagagagtttgagaaaaatgaagctttaaaaatcaattgaaagtgtatgaaacaagacatcgtatcacaagatggaagacttaaatctttgacctctgttagaccaatatctaaaatagcgagaaaatttcagaaaaatctttagttctctgttgtaattatcgaaaacgccagaaaacttaatgagaaagctttaatttaaccaacttatagttctagactgacatggctatagttattggttataacaaaaaattaatgtgttttttttttaaatgtggcactcatacgtcttttcttttcttttgctaaaaaaaatgaagcgacctcaaagaagcggaggaggaacatcaaaaagaagagcttcaaggaagaaatagatccctgaggtgtaatattactattggtagaattaattattagatttcagataattttatttaatgactactataaaatattgttaactaatcacaggattggtgtcttagtgccttatagatgctattttagaaaaggtaaatagctcatgggtcccaacttcatgtgggtgtatcacctaggtccctcattttattttatttttagatcctcaactttatgttttttcttttttggctcacttcagacttaagctatattccatccaaaatgtattaaaaggtcatgatattatgcatgtggataataaattagaagaaaaaagaagtatgacactcccattttgttcatttgtgcatcatttgatgttctccacccattaaaaaagttttgagtggtaaaaagtaagtgtaataaatattatcttgctacacaaaagttatccaatgaaaactacttgttacattcatggggcattacattcaaataaataaaagaatgcaaaatttaaaaaagaaaaaaaaattaaataaaacctttacttattagtgagactaaattttgctaaaaaaattaaaattcaagaataaatttgataaaaaaaaagataaaattctttaactaatttgtcaaaaaaaaaaaataaataaaaaaaggtttgtacatcaatttgtcaaaatgtatataatttaaaaacttgcagtcacgatcgattctgagcatagagggactagacctatacttaggatccacctaaatagcctaaaattaaattattcattttaaaaatatacgttttgttttattaattttggaaatactatattttttttttaaataagaattcaaaatatatatttttttctatgattcatcgaattttaggaccggccttccttacaaaatgtataaattaaaaaattttataaataatattgtatttgtgatttatatttttacataaaagagaacctaaagcacactatatagactaactactatctctatttaaatatgtgttactagttttatatttgagaagcattttgagaacacttaacacaagaagacttttttctttgtgtcttgagacaatgatttttgttttcttggttggattgccatttcttttgatgtgtattttaatacaattttgttcttctttccttctatgagattcccttttcaccaaaataaaaaaaaaaaaccccaatcaatcaatctatttttcttctaatgtttgtacatatttacgaaactaataagacattattattattattattattattgcccatatttaatatttcacaccaacccaatcaaaatctagaatgtattgttaaaataataataataatcatatagtttggtctaactaatatcaacacattttgatataaaagataccattgtttgagtttgtgatagttcaccttactgtcttttcttatattgtgctaaaaacatgcccaaataatcatttttggaccttaaatattgtcttctcttgtattatattattatttatataaaaatgtaacaatataaaaaaaaatgaagcaaaaattgttgagagagtcctttattgcaggtatgagaaattgactccttaactaattagtagtagttgaagcaaagtctcttctcaccatattataatttcatttaaaaaaaataaattaaaaaaaaaaaacaaaaaaaacaaaat

SEQ ID NO: 225485 - DNA, 3387 bp, Cannabis indica
cagcaggaaagctgatgcaagattctttgtttacaactttacaatggttgctatagtcatttattaagagtaatgattctttgtttatgtaattatctacaaaatgggcgggtgctaatgatttaactgggaagcgactcaaaagaaaactttttctcatcaaaggcttccttccatttcagtattgcaagcttactgtgctaaacatagttatacatcactccagctccttgagaaaatcaacattatctacaaaaacctgcaaagtcacaaaagattgggaataagattaaggtattaagcaaattgaacccaaatgtagtttgtcagacttggagaatagatcgacagaagcttattggtttccattatttgctcgatcctaaatgagccagtgagacagtcttgccaaaatttacatttttatattgatgtatatttgtttaatagttccctgagttactgttatagctaatatatgcaaatattttattttattctagaatgcaaagcaatagatcttcaatagaatcatgaaccataccgatttccaaccatcaggatcaaggcaagcagtaattttggtgttaataccaggcaaaggtccaggttcacgtgtaaccttccccccaacaagtttaactgcttctgcagttttatagacgtcatccgtgcctattgctatctgtcatcatttatgggggaaactacatcagtaaaggacttcaaaagttgtgactgatgagaaaaaattagaagacaatcggtataaaaaatcccaacattttttttaagaaacacagttatgaaagtaccaagatagtacaaacaaacaatgcagtgtaattgtaatgtaccccaatcgaacagaacttatgttaaacacacatcttagaggaaggacttccgtgaaaaggggtgaaatgaagagggatgaagattgtacctgagcataagcatttcctttatcatattcagtgacaccataattgtatgtcaactccagcacagcacttttgtcttcaggaccatagcctagcattgctattgtatactagaatgagtcaccgaaataaaatatatcagcaaggcgaaacaaaacaaaatgttcaattcagaacattgatgcttcagtttatcaatcagatattgtcattccgtcccctaatttttacacgaaagtggtaccatagtgtcccactaccaaaagatgtttcaaatgtacaattataaaaacaaacttctaaaaattaaataaacaggagttaccttgtactcgggattatctcttttccgtagaagctccatgccgaaagcctacacacgatatagatgatactgagaagtgagaacagaacacaggactcataacagtacataaaagtttcaacatgggaccactcacaccttctcataaaagtttatggaacgatcaagatctcccacacgaagcattacttgacaaaagggttcaggtgtaggccctctttccaaaagttcaaatttgtagccatcaggatcttccacaaatgcaataacagtacttccacctttgactggaccaggttctcgggttactttgcctcccttggcttttataagttccacagtcttggcaacctaaccagagaagtacaaatgaaatctcagctcttcaagaaacaaaccatccaaaatagaatgtaaaaataagaaaccagaggtacagtctaaggtcagcatgcttaaatgaaaacagaggcaacataacttgcttaagaaaaaaaatttagtctttaacttacatcctcaactgccacaccaaaatgaccaaacccagatccaatatcatacttgtcaacaccataatctggaaatatcaacatataagtccaaaattccaaatatcaataagatgtacctttcgtgcacagaaaggactagcaccttagagagagaacagacggtaatagtatctcacttccacaaaagaaacataacatagtccaaattgtttacattctattaggctatgtttggaagttaaattttggtaagaaaagaatgagataaagaaaatgtgtagaaaggaaaaagaaaaaatatgtttggtatggaaagaattgtatagaaataaagttgattcaacaaaatttttcatatcgaacaaaaaatgaatttcttgtttattttccacacttttctttttcctacattctccttacatttttcttttctcatcaaaatccagtcaacatccaacttccaaacatagccttaaagatttgttaaacaagaattgttttcttcaaaaaaaaaaaaagacaagcgttgttagacagcttactgtaagtgagttcaataacgaagtgtgaatcttccggtccgtatccaagaaaagcatttgtgtatctttcctccggtatgtcacgtttcctcagtaatttcattcccaaacactctgtgtagaatctaaattcaccagaaatttgtattagatcactgagtatccaatcagccaaactattccatacataacagtacacacaaaactgagcaacaattcgtataatagtacaaaaacatacttaatggtcctatccaaatccccgacgcggtaaacaacatgaagcaagcgccttttgtcacttttaacccactccagtacatcttctggggcagcagcggtgcttgcttgaaccacattaccagcggcggccatggccaagctgttgcattctcctctaagcggcatagaggacttgacaccaaataaatgagactgtggaacagctgaattttccaaattgcaaccgaaaacaaaccccaaattcactaagattatcgctatataaacaatatcttttagctaaagaataatccataacagtgctcatttgattataacaaaccaatgtgtgtaacacaaagaaagattaatcaaaattcaacaagaaaagaaaattaatagagaaatgaccaaatcagaatccgaaattaaaaaaggggagatttaccacttgcgagatgaagaaaagagagggtcggagaaggattaagggaagaaagagaaaggcgggagcgagaagaagcagcagagaatctgaatgaagagagagaaggtctgattgaagatgccatgggtattatcctcaccatctgaatcgctcttcctcttcctccgtggagctcagtaatatgaaaggcaatggaagaagcgagtgaaagctacgataagtattgttcttttcttgatgcgaatagaaaatacaagagaaataaagaaagagtatcgtacggtgggagctgggtgtcgttttgtttttcttttattattttgatgatttctgaaaatatattaacaataatgcttagtattttttcggtttctttttttctgtttttttt

SEQ ID NO: 225486 - DNA, 2768 bp, Cannabis indica
ggaatctagttttgcttaatcttcatattaaccgtatatattcgtacatttatggaccaaaatctgggatcaaaaaacagaactaatggcaacagtaaatcttacgcttatttttttagtattacacatcaaaacatcagtatttctctgccacaggtctagatggaaaaagcctcaaaagaaaagccatcaatgaccagaggcataccaaaccaaggacttggaaggttacaaccattgaaaacaaaacaccacttctttccatcacttctggggatcccaacggaatatctttcaaggcaaacaacaatttctctatgaaaaaggtggctcttgtcaactgatatagtctatatacctgcacattcaattccatcatcaaattctgcactcgattcaaaccagaaaaaactattaaaaaacttcaaccggaagttatttaccgacctcaaaaattattggaacaagtggccaacaagatgatccgcgcttgtcaaggcttagttcaaaaacatactgagcagcgcagccaactagaaaaggaagcactgcaaccaaagctgggaaaccaattactggccaggttacatagacagcaaacatgggtgccataaccttgaagcccattgtaaagaaagaagttgttaagtatcccctaaggcctgtgatgagaccccacctcttagggctgaactgtaaatatggtctttggacatggtgggttacaagaagaaatattgcaacgccaatataaaatgcagcttcaaataccaacgagctcactatttctgcaatgccagtaaaaagattaccgggtgttaacatcttgtgtatttgagaaacttaaaccacaattccaaacgtatgaactataaaaaccagaatcacattgatgatatatgtagaagaagaacctctcagcaaaatatctgataagagattcatccatgttatatagaaaggaaaactatctatatattgctttaattccaaaacttgttggtgcacatgtgaataaagatgttagataaaagattcgaattttattgaagtaacagctcagtaaaacaaatacctacgaggatatcctccttcaagaaagcttcgatggcaccaccgaagaattgtggtagaattaaagacgagattatagcaagcggagccaaaacccataaaaacgaacccttttcttcattgaaaggtgcagacaccaatttactttcctctactaactggtgagtcaacccgtggaatgaaactgatcctgattttccacgaaatggctctactccttcatatctaacaatgggcaacctagaattttcgtttccagaattttccaactttgcattgcatttgcatacaaaacctccttttttaaagcttggcagcgacgtaagcttctcaaacctctttgaacctacattcacatctcccattagaaaaaaaaaatggataagtaaataaatagcactatactatatggtttcttttcccaccagatttcacgtcaagcaaaatgagtgtaaatgcaataaattctcaagtagaaggcagtataattggtataagggaattcgtacatctgggtgtagttccaaaaagaagtctttggttcctaaaaccaacatcttttccagaaacctgagaaattaacaatgtataaattaattttacattgaagagtgcaagaaaaatgagatgtttgagaaattcgcttacatttgatacaccccgaaaagggacacccaatttcgggggagaaaaaccaagacaaatggattgcagcaccattttattttggtgagttagggttttagcagaagcagagttttagctcagtagctaaaacgttaaacccctcagtcctcaccacctgctcctcccccgcctgaaattgtaatcaatgcttaataggtcattgggctttgttattctgggcttatagttatacacaattaagaggaccaaatattttctttttttcttcacaaagctcatctggttagattaattaaattcgtacgatttaatctaatttaatttgtagagtggggatattcacacttttgtaaattaaattggattgaaaaattcaaaatttatacatatacgaattaaatattgaaataataatgttggagttataaaataaaaataatttattttgttttgttactagttttataaagaaatatttttttttcataaatattaaataatttaatattgaaaagtaaccaagtggatttgattcaaaatataaaatccgcacttaatacagatcgaatgcactataaacaaaacagtacgaattaaattggataacaccaacttattcaaagtagccctaatttaatcttaacaaatttcaatatattgattcatgagttactatttattattattataattattattattttatatttaaaaagtcatcaactggtataaatctattacatccgtaaataataatattaatattttatagagagttttgatagatttctaaaacaaaattggaagccaacatgtatttcaaacatcataaaagaagatatattaaaaagaaaaatgttactgtactaattttattaataaattgtaatgataacttattatactttattaattcattagtttttaaatttggtttgaaggtaatgtacaagataacttaatataatcaagaaatcatataattcactgaaaataaaaatggaaatcatgatttaaaatgtatatgagataatattatctaaaaa

SEQ ID NO: 225487 - DNA, 3510 bp, Cannabis indica
ttaataatccaaaatattaatcatatccggtctttacatacaacgtgtacgcgatcatgaaaagagagaaaaaaaaatagactaaaattgttttaaataccaaacaaattaaaaatctactagaacgatcctttaaaaagttttactacataaatttcgatacgtaattatgcagacaggaaactaattactcaacaacatcttttaggaatacaaaggtgaccagtcatgtgccaactttcaccaccatcaggatatgcataagggcaagtaggtgcataattatagtcctccttcaaaagtagattccatgatgcttttgggtcattagttgaaaacattgtccaactagcagtagaattctcatacctactatgtgtaagacgtttgaaattcttcacattcttgtttttgttaatgtcatccgggtcaatatcgacagtgaatatgtctccataaggtctaacagagtgcacaaacaaaggcaaagagattggatcaacagacacagcagcaagatcagcagtcacaacaatgctctttccatcaggactgaagaatggatggtttacatgcccaccaagatcatctccactccccaacactcttatcaccacagaaggattatttgcctttactataaacacagcaaagaatcctgggtcaaggccattatcagtctctggtgccccttttggcttgtgtcttgttgaagagaaaactatccaatcacctctcggtgaccattggcaatgtgtgtcagtccaaggcccttttgtcaaccttgttatttccccatttccataatctccactttctgcatcctccattatgtataaattcttgtgttttttttctcctccatctcttgttgatcgaaatactattttacttcctgtacatgttgaaataagagttcaaacaatctattattgtacgtgttgtcaaaactattattgaatattctttgttcgtcattctaaattatttgaacttttatgaaaatttgtgtgaaatctcatgtaacacacttaccaatcatactaaaaatacttaatagaatataatgattaaaaagatgagaaatttacacaaaatacctaaaattgcactttttttatatatatatatatattttttttttataaaataaataaataaataatttgcggcgtaataagtttaatcctcagttacagataaatacttagtttaatttttgacggtaataatacttaagttatatttctgaaacttttgtaaatatttgactgtcaagtgtcaagtcaacggccatgtggtagtcatgtacctaccgaagttcgagaaatataacttaggtattattaccttcaaaaattaatgttaagtatttatctacaattaagaatatttaaacttaagtatttatgccgcaaataacttaaaaaaatatatatataatttttttttattattgttttttataatttttttttttattattgtttttaggtatttctgaaataattcataacctaataatctttctattattatataatgtatatatataatataaataaataaataaataaaatgattaccatctggactggtagaaggaaatgcattattgctaactgcggtgagaattttgtgatgtcctctaccccttgaggcttcaggaatagcacaaatgtcaagtttttcggtagcattgaaagatggtcccatgcatacatacaatacatctttttctggattttggttccacactggtgcgaagatgctgtctgggcctcttgtctataatatataaattaatgttaatggtaaataaacttttaatcaatatttacgcctgaaattacatattaatttttttattgaagtattcgttatagtactaacaaatactgctattaataaaaattgaaagaaataattcaacgtgtaatttcagacgtaaaagttgattaaaaagttttaattaagactcctcactaaacaacttatgcttatatatatatatatttatattgtagttggtagtaccttctgaacaatacgcaatcctttgttatcggctacccacacatttttgaactcattatcaacaaaggcaagctttgagccatctggagaaaatgttggaaacactcctgaaaccctaaacaatcctacatcttcatgtggggactcaagcttatggaattgtctttcgatatcatctccactctatatcacacacatatatataataattatatatatatacataattagcacttgcatataattttttgaaactaaattcttattaacaacaatcaaagtttaatatgcatcaataaaaagataaaaaatctttaatctaaactaattcatcatccacccactactaattcatgaacagttttaatgcctatatatatatggcgaacataaactaaactaagaatacctcagtaattaattaagtggtctcttaagtttcatcacttcactatcatattaatatgtaaatatattattaatttatatcagacaatttctatgaaattatattggcgtttttcaaaacaaaacaaaaaaaaaccgtttattatttttactaaaaaagtattttgtaaataaaaaatttcaaaacgtaaaaaaaaaaaatcatgttaacatatttttgttatttcttataaatttgtagtgtattatgtaaattttaaatttataaattacatatacatatattattactatcagtgataaaatataattaatgtattattttttaaaaaaatataccactaataaacaatatatgcaagagtgaaatgttggacaccatacataaggatgttatagcaatgctcttgtatatgattagattaattggtaacgtaccttcaacatttcactcttgcaacgatggtaaccaatgcgctttccaccatctattacaaaagggttaaaatggtcggctttcggtcttatgttcatcgtaatttgtctaggttgttgtccagttgtatcgaaaatttcaatgtgtcgatattgtgtctctacccgaatgtcaccaaatttagatttttgacgaatagttgcaacagccacagtagtagcattgatggctgctggagtcatagcatccattccatcaggagtgacacgaaagaattctgttgcgcgacctttgctaatgtcagctctgaatacaccccaaaaatctccaaccttgcggtggaaaaatatgacattatcacttccccaactcggccacccaccattccttataaccattttgcgacccaagggcgggtcagtcttcatcacaaaaatatcagtctttagatcttcgatttcgccatcccagcccccataattctggaatgatgccactgctatctgctttccggatggtgatactgctggacttaaatcagcaactcctatatataattcatttataagtataagatgattaactagtttcatttgatatctatgtataatatgttcgtgaaaaaaaaa

SEQ ID NO: 225488 - DNA, 2047 bp, Cannabis indica
aatatttatatttcttatttttaattacattatttttattttattccaactaaaaattatatttttctcaattaaacttatatttttcattattagtactctaatttttttctttactaaaatatgtggctagctccgctactggtcgaggcaggatggatctaactcgaagaaccgagtcaaagccatatatatacctaaaaattaattcgatcggccagagcggggccaccctatccggtgagagctccacccttgtttattcaaggtttttttttttttgacaaccctaattaaaaccaactcttattttttttaggaataacaatatatatttaataataaaaatatatttaaggtacataataaaataataataattagtgaatgcatgtgtcgacgtacatatgtgaatatgtcacgtgaatatgaatgaggtcatgagtcttacaatttacataggatatgagatcctatcctatgtacaattattatttattaattattaagaatattcatgagttgcaagttggagaggcaactatacaaaagtatttacgtaaagtatatatcatattatatatatatcacatcagatggggacttatttatataggataaataaagggatatatatatataatatattgtgtgtaattttgtgtgagaatattaattattttttccacatttgttgtaatatgaatagagtacaaatgtttcactgtagaatgatcacgttcaaatctatcagaagattttgttgtgattccatccataactttattaccaaaacactctcttaaatctcatctcattataatatacatatatatatatatatatatatttttataaaaaacaaaaccatatagtacattaatttatccatatagctagcctgctccaccaccataaatattaattttcaaagatttaaaattatttctttggtaataacatgatgataagattttttttttaaaaaaatgacccttaaaatgaaaagatgatatcattcataaatattttttaaaataattatatatatttattgattacatgaggtatgaaattcaaaggttcgttcatgctaattaataatatattgttctaataaattgaattattataactagttttgattgtacatgtatcttgtgtatatgattttttttatttattattattattttagaaaaaggcacaaatccatctcttaattaataatccattttttttttatttagattctctataaattagtaaatttgctttaaaatataaaaaaaaaattatggagtaaaaaaaaataaaccaactcctgaaaatataataagctagtttttttttttttttctttttgacaaatttaaagctgagtttttaattaaaaataaataatactaatttttttttaaaatcatacttaagacgtcgataaaagaaaatagtataaattattaattaatttgttatttggttttccaaacacaaagacttatttttccaaattattattaattattacctcaattagtgaataattaaagaaagtgagaaagacctaaatgtgtgtaagatcacgtgatatctagtactttgtttctacattaatcaaatgttttaaatgtaaaagcaataataattttggaaacccctacaattaataaatcaatattatttcaattattcaaaaaaaaaaatatttataaatatataaaggagtggcatgccttcactccaatattttgattttccacaaattttttatttatttattttggtaaaaaaagtctgatcataagtctatatcatttacccaaataaggaaataatatcacatggctagatttttaaaatttcaccaaattcatgtcaaattaaaattcgtatcttacttttttattttccttttcataatatataaaaaatatatctattttttttttttgagtactaatttctgcagctttttaagtaggccaaaccaaactttgttcaagcttaaatatccttctttctttgtcataatttcacaaaaaaa

SEQ ID NO: 225489 - DNA, 4200 bp, Cannabis indica
attgatattgaataaaatggattacattgaaatggagttttatttagggtataaaacccaacaacaccctcaaagtctcctccaagattctggagtttagaagtaagctgcagaaactcaagaaaggcaactcgaatatcaatgattaccttcttaaagttaaacaacatgttgatctgcttgcatctgtaggtgaagttctctccgattgtgaccatattgcagcaattttcaagggattgccaagtgagtacgacactttcatcatctccaccaacacttgaattgaaggatactcggttggtgaaattgaagctcttcttctggcctctgaatctcgaattgaaaaagaagatcaagaatctgaatctagtgtgcatatggccttcactgatcaagatcctactatggaggccttctttgccaacacatatcgaaatggcagataccctgctcaaactcgaggttagtaaccccctcctggttttccatttccatcttttcctccttactctaattacagaggcaatcctcgaagtcaatatccctcacctcgtggccaatccaacaatatgcaaaccaatacattgggaagaggaagaggaagcagatttcccactccatcaaatcgaattcagtgccaattatgtcacaaattgggacactctgttattgactgcttttacagatttgacaagagttttacatgagtttttccacctacaaacacctgtcaaacacaagaaaatgttgctcaaactagtcaagcttcagatgataactggtatccagactctggagcaacaacacactgcactccaaatggtcagaacctgatgacaccagcagattgtgagggaccagatcagctatatgttggcaatggcactggccttcctgtttctcaaatgggtaactcatttatactcttagatacatgctcaaaacctctaactttaaatcattcgcttcatgtacctgaaatcaccaaaaacctccttagtgtgtctaagtttgcagctgacaataatgtctattttgtgttttaccctgatttctattttgtgaaggaccaggtgagcaatacaactctgctgactgggagacatcacaatggcctatatacttttgattcgagtcgaattcaattatctgcctctccaacaccctgtagcagttctaattccacacccctgcactatacaaacacagccaccaccacacaatctcagcatgttaatttcagtctatgtgtcaaatgtaaagctcctactaatgagtatgagctgtggcataatcgtttaggacatccctctgaacagattgtcaaaaatgtactctcaaaatgtaacatttctaatgtgaataaaactccaaattcagtttgttcatcttgttgtttaggaaaaatccataaatttccctttccaaagtcatctgactcttgctatagtgcacctttacagcttgtccattatgatttatggggtccatctttcactacatctcacaatgattataagtactatatacatttcattgatgcatactcaagattcacatggttgtacttacttaaaactaaatctgatgctattaaggcatttaacatttttaaaactgaggtagagcttcaattaggaaccaaaattaaggtctttcaatcggattggggaggggaatataggtcatgcacacagtctcttcaagaggctggtattattcacagaaaaccatgtcccacaacccatgaacaaaatggaattgctgaaagaaaacacaggcatatagtggaaaatggcctaactctcttagctcaagccaacctacctttaaaatattgggatgaggcttttaggacagctgtctacctatacagcaggcttctagcacctgttctgtctctcaaatcaccaattgaagtcttgtttaacattacacctgattactcttctcttaaagtttttggttgtacatgttttcccaatattcgaccatacaactagcacaagcttgagtatcaatcttctccttgcactttcattggctatagcttgaaccataaaggttacaaatgtcttgacccatctggtaggctatacatctctagagatgttatctttgatgaatccacatttccacatcagcatttaaattccaccacttcccaatctcacaaacaagagtctggcatctctagcaaaatccctatttctcagtgtcgttataatgttgatctattatttcccactaatgctactactgatcctccttctttctcaactacatctgcatctggtgacaatgttttggttgagagagatggagatcaaaattttcagggcaccagcacaatagctatctcaaggaatttggttccaacaatgcatgctgcttctcctgaaccagatagccattctcaatcatctgtagctattgctcctactcctgacactcactctgcaccagctcctgttcctactgctgctgcatctaataatgctcctacagctataatagctcatatcaattcccattctatgcaaacaagagctaaaagtggcatcaagaagcctaaggtctatttgactactcaagttccaaccactttgaagcaggctttacaaaacttacagtggaataatgcaatggctgaagagattctagctctcaagaaaaatagaacctatactctaatcaggttaccacctggaagaactgccattggatgcaagtgggtctatagaatcaaagagaatcctgatgggagtgtatcaaatctcaaagctagacttgttgctaaaggttttcaccaacaacctggttttgactttacagaaacatttagccctgttgttaagcctgtaaccatcagggttgttctcactctagctctttccaaaggctggaaaatcaagcaactagatgtcaacaatgcctttttaaatggggatttacaggaagaagtttatatgcttcaaccacctggttttgagagtcctgaatctcctgaattggtttgcaaacttcacaaagctctttatggcctcaaacaagctcctcgagcttggtttgacaagttgcatcactgccttctgtcactaggatttgtttcatcaaagtctgaccatagtctctttataagatacacccttgtccatgacagttattcttatctatgttgatgatattatcatcacaggcagtgaccccaagcttatctcatactacactgttgccttaaatgccaaattctctctaaaagacctgggggatcttcattattttcttggaatcgaggtaacttcatcctccactggattgcatctctctcaggccaagtacataaaagatctgctgcataaggcagatatggatgctgcaaaaccttccaacacacctacggtcagcaacctcaaattatctgcatatggaagtcccccagtagacaatcctcagcaatatcgatctgtagttggagctctacagtatcttgtaatcacacgacctgagatttcttttagtgtaaataaggtatgtcagttcatggcaaatcccttacagtctcactgacaagcagtaaaatgaatcctaagataccttagtggcacaatctattatggtcttcatcttcacaaaccaaagatccttgaactaacagcattttgtgatgctgactgggccactgaccctaatgacaggtgtttaacatctgggtttgctatattttttggctcaaatcctattgcctggcagtgcaagaagcagaacactgtatcaaggagtagcactgaagctgaattcagaagcctcgcccaaacagttactgaactcacttggttacactctctctttatagaactgcatattcagcttccccaacctcctgttgtctggtgtgacaacttaagcacaattcttcttacaacaaatccagtgttgcatgctcgaactaaacacatcgagctagacccttattttgtccgagagaaaattctacattagcaagttcaagtcaagcatgttccagcctttgatcaacttgctgatggcctaaccaaaccaatttctagccaagtcttctcttatttcagacacaaactcagcattggtagtcctaccaattctaagtttgagggggcgtgtaaggacagttatgacagttaggcgtaacagccattctgttgtgtctgttaagtt

SEQ ID NO: 225490 - DNA, 3403 bp, Cannabis indica
aatattaatttatttcaatatttttatttttaataatatataataaataagtaaatatattttagtataaataaatttattacagtattttaatcaaacttatcatacagctttttcttaaagttgagttgtactaattttaaattttagctgtaatttttctataaatttttcaatatgctgagttctaacagattactaaacatttttgtagtacaattttttcaggttgaagatttaaagtttttcaaaagttatgccaaaatacccctaaaagaataggtaattacaaatttatagacttttatacaatatgtgtaataccctactaaattagacgtgttatcgtgatttaatactaattaattgtgcaatatgttgctaatcaatgagtttgttggaaaacgtattaaaactttaaataattaacctttaaaatttaaataaataaattttacaaaaactgggatcccgtctttcaaaaagttacaattgtattacaaaacattagttacaaaagttgtcgtctagcaactaatcaaaatatagcctattgtcccgaagatcgaacactccaagtctaactgccccaatatgtacaatattaatctgctcgcactcactgccgcttagtcttgcccttacctacacatgtaagaataactgtgagtcgataaactcagtaagaaaagtataatcataacataaaattaaaccagattataactaggctcccatacacccaatcataaccctatcatgcgtcccacgcgtattgagtctagaatgttcgtatgacagtatcattgaccataatatcaactgatactcgatactttagttgtaccgatgtgatagcatcaattagtactttgccaaacatataatcgtcaatattcagtgcaactctatgtacactaatactgctactactaatacgttatctaacatgcatgctaaatgtgtaatcatatatgcatatcattatattaatcttaccttaattttgaattcaagtgtgtcggccaaccatgagtggaaattgctgctcgatgatttacaggcccctaagtcacaacattcataaaattgataagtgacacgctaaattatttttcggggacttaaaataaaaactagaagttttcatattgatggatagtgtggcaatatcctaaaatatcgttaaaacacgacaaactagggctccaaaactactagaactggtaaataagattcataaaatggataaccggtttctaggattctacctaagggaacggttaaccagttctacagggctacctgaaccggttaaccggtttcctgtaaaaaaactctaaaaacttcattaacaactcaattttatctcgaattgtatcaaactctctagaccacctaattaagtcacaaagaacataatccaagcaataaaatagatataagctcttgaaatcaaatctaccattaaagaataaagtttgagctcaaaagctcaaaccttgtctaatcttaaccacaagcaaccaaaacagctaaaaactactcttacaacatatttctaacaccaaaaaatagaaacaaacctaaacaattcatacatcaaccctaactcagatttttgcatgaaaattaaccttaaaacttgaaattcaaaggaacaaagaagggggaagcttacctcaccacacacttgagttacaacaactcaaaccctcaagaattggtctgatttgaggagaaattgctggttcttcttgtcaaacacaccaaagagggagagaaagaggtttgcttgattttgtaatttttttttttatttttaagacaaagataaataatctaactaatatttagcttaaaaaatcaattagggatatactataaattccactaactaaaattaataattaactaaggaaatgaccaaaaacccttagcttagccattaaataaataacctatttaggagtaaaattgtcttaaactataaccctgatgataacccaaaattaaatgtctaactaaattgtcttgctatttctaaggtactaaaccataacaaagtgactctataggtcatacgtcgcattccactgttaccaggcataaaatatgaaaatcataaaattttacatacatcatgattaatacacctagaattcaatatatttccataatttcataaatagtaatcaaaagtctaattctaaacttaaacccaaattatctactaaatcttatattaaagctaagcggtcattacaatatgtataaaaatatagaattttttaaaaatgttattttatcaaaaacaaagtcaaacaaaaaattaaaaaatgcgaaccaattaactctaattattcttccccatattttttatatttattttaaactttcccaatttgaaaaaaaaaatgtttttacaaattatttgttggaacttattttactaggatctagatttactaacatgtatgtttgattatattctataatctaacatcctaaacatgaatttcttaaaacaatgaaataaacacatataaagttctagaaaactttaaattgatagcagtagaatattatggctccttctgttcagatctctaacctttgtttgtttctgtcacatagtattgtcaagttccaaacctgaatctccttaagtgatgaaattcttcacaatcttctacactacgattgagtattgacttgaattgtgtgggcaagatactcttcactatagcgtttgaaattctagaagggaatagaagaggaattcgaaatcaatagagaggctcttaacttttcagttatctgacagaataatctgatgatgcatatcaaaataggagcctatcattatccatttatagaatttaatctagggttaggattcaaactacatataattaaaaaagataacataatagccaaataaaccattaagtggtcgaccatacaagtggactccagtagttttaattttgtttatctcacagcttatttttttctttcacaaatgtcatattttaattttaatcctataaatataaaatctatataattaataataataattaattataaaataaaatttctatttaatttatttattaattagaccttataaaatatcttaattaataaataaaccctaaatcttctctttcttctcaattaagtccatcttagagaaaatttataaataagacatagtctaatttaaattctaattggttaattaaaatcaattaactgagcctacaaactaatattatctcaactagtgcggagaccatgagcttatataatcaagctcccaatagcaattctgaatttaccagtaaatctttaacttattaattcctcatactccactatagatttagaattgtac

SEQ ID NO: 225491 - DNA, 5600 bp, Cannabis indica
gaactactattataatttttttgttttttttgttttcttagttgttaatattatatttataagaactatttaatttttattatgttattagtgctatgttaatcaagaaatttacatttgatattaattattaatttttattttatttgtgattatagttattttttataaattaaaaatcaatatatcaaataatataatttttgtttaatttaaaaacttttaggaacgacattgtcgcccctaaaagtcaaaaacaactattatgacaacaccttttagggacaactttatgagtattaatgtcgcccctaaaaataaacataaaaacttcgtgtactacatttagggacgacattgtcgcctctaatttcaggtaaccattttttcgctcctactagcatttttagttgcgaattattaaagacgactttttaggggcgaaaagtcattaaagtcgccctaataattatatttgttgtagtgaaatgaacttgtgattatggatgatcataatcttataaatttggtctttcttaatttatccaaagctaatattaaatgtatttaccccattagtgggtctagcttcataagaaaatcctaacaatctaaactctagcctgtaaataaaaaattatatctccatacaaagggttggaaaattattattcaaacactaagagttaaattagggttctaaagcttgagcaagaacattatctttgtgtaatacgtcaaaaaatttcagctaatataatattaactcgtggactaaaagtagtatgcttactactaagagtagtatgcaaatttatgtcgtccgtagaaagacctaagtgtagattctgatatttagatccaatactaggccagttcatatttaactcttttttaagctaaactatcagctggatgtcttaataaacagtcatttaccctcccatttgcatgccatgataattttttactatgtttggcacttctaaacaaacaaatgaatcgaggaataggcggtatataccaaaaaatcttagtaggcactccttccgtaacattaataccatttttttcttttgccatcgtcactctccataagtaggacatgtatatgcatatgaaaaactattctggtataatatgcaattattaggacatgcatgtattttttgataatccatacctaatgagcacatttattattttttttttggacttatagaatttttgttgtaatttcattatctatgggcaataaatctcaaaaaattcaatgaatatgtcatacttcgatcactccattcgtgtgttgcctttaaattgtataacattagaagcgctgataattttgtaagacttttacaaccacggtaaatcggtttctcaacatcactaaagagtgtctaaacttttttggttcttcttggtttccaaattttgcatcatcaatcattttatctaatggatcatagttcactttaaaagtcttagcaaaggatatgcaatggttatggcactcgcagccgggctcatgaaggagatgagtcctccatggttcgacctttgtctcaaggtggtatacaccatgagtgacttcttagatagagcagatggttttatcaaacttgaagaagttgtcacccgagcaaagggctcaaagggtggcaggaagaagtcgccaaacaccgaagcccctgctactgaggcgtagggcaatgggaagaagggaggttcgaacaaaggaacgagagccaacaacggtgtcaagcaagataactcccccagaggaaatgaagaaacctaagaccggggacaagcccttaagagattatgagcctcgcttcaccacctactctattctcttggctccaagagaggagatatatatagccacatagttaacagtgtcgtattgcaaacctcttcctttcaaggaatttgggagtaagggcatgaacaaatgttgtcactagcccaacaattacgatcatgatactgatgagtgtaatcagttgcgggatgatatagaatttctcatcagatagaaacatgctactcttcagcagtatgtatgacattaagctccaactagggcaatgcacctctccaatctgcactagttttaggtagattagagatcgtgattggaggccctcacatagctggaaactcaaggaaggccttagaaaggtatacaatatcactttgggatgaaccaagagccaaagtcatgtgaactaatcacatttggagaattagactcttattatgtcatctatcctcataatgatcctctagttgttggggttcaaatagctaatatgatggtggccatggtaatgattgacgacaaagcatcatcaaacatcctgttcaagcgagccctactcaggacgggtctgacctttgaagacctaaaaccatgcgaatagctcatgtttggtttcaacgtagtcaacactcctccatgtggcaagatcaaactgccacttactgttggcactaaccgaagcagaccaccatcatcaccacgttcatagtagtggacgtgaagtctccattcaacgtgatgctcagaaggcatgtcctttatgatctttgagccatatccactactacaaaatccttaatttgcgtcggtcatggcgtttaactaaaatggttgaccgatgcaataaataagcagtgattttaggcttcaaatgataactgaagctaaaattaatacaattagcgtcacttagctaattcgaagccaaaagaagaaccgaggaaaaaaagggaatagactagaaattatcttttccttttgcttcggtttaaaagtgatgctaatctaatttgcatcagttggaaactgagggtaaaaacttagccactcttatccactgaagcaaaatattttaattttttttaactcccaattttgactgaaatccctataatttcatcttcatcaaaatcaatttgaaccctagcacaacatagccgcctttgaacccctgccctcttcgaccctctcccccgccagcagcagcaaccctcttcaaccctttcccctgccagcaacaaccctcttcgaccctctccattgctagcagcagcaggctagcgatgcaccaaacaaccatgagcagttgcccgaccacccagtctacctccccttcgccctcttctttgagaaatcacagctcaaaccaccaccagagctagcagcctgatgacccaaccatgacatgcctcaactttcttaccacctgcgcacgcatcactcacaggtaaggtctttcatatatttttacaaagattttttttcttcccttaattttttatttctctccatttctgtttggttctatgattgcgttttgttctaaaaaatagtttagaagaagaggataagttaatggtttggaaatataataatactgatttgattcatctatttttacagtgattgttttctctgcccttaatttttatatattactggtgtttgcatattagcttgatttttgtgttgtaaatggtgtttttttagcatattattgtgtttgaccaccttatcgtatgatatttattttaatttcgtacacacaagataatctacaggcattaattaatttcatgaacttattatcatgtatatattaccatttggtatttttgagttcttcccttgtttccataattatttttcgcaaaatttgtatttgtaaacaagttatcctgtgattgattgttattttgatgacataagaactttaaatttcaatcataaaagatattgtacagaaatatgtatacatatattaagaacatagattattagaactacaaatcatgctttaattttatgcatcagttcaagatagagagaaaaattataaaaattgatgtatatttccaattttaacattgttaaatcttacattttattgtatttgttttagattaatggatgaaattatcataccgtccacatacaacataatactctcttttttcaaaatatatctattctatataaagtgtgactatataacagaatttttgatttatgagaaattcatgagtgactttttatttatattaaaaataaaatggtttattattaaaaataaaatactttatgagaaatgcatgggtcactttttatttatatataataaaataaataaaataaatcccattacatcaaaaaaaaataatacgattgggtttttggtgttgtacatctataattaggttttctaaatatacttatgttatttagttgaattttattaaatttactactatttatatattatatatatattgctaaaaaaatttctagaattttttgtttatgagaaattattgggtgactttattttttatttttatttaaatcactattataattttaaatttcaatgattatcactacattgaatattattaattttaaaattatgatattaaaaaaagtaaaaactaaaaactaaaataaaattaacatacgtgactggtcacgtaacatctatcaattgtatcttcttttccatttttcgatttttggttcaaaattctaattgtcggttggccactaattttcaaattagaaagttgaaatggacatatcaattctatgcacaatatactaatttaaaatgaccaataaattggaattggttactttttaacactggaaaatatagtttgatcatgctctattagctatcctctgacttgcagcaataatagtgtgtcatttttcttgatccttttctattttctttgggagtagatagtaggaggtcaaaactcaaaataaaagctactagttgtttctatattatgtgtatatctttacacttaccaaactactcttctatattatctttgtttaaatttatagcaaatagttatgttttatatcactaatacttatatgattttttttttttaaaaaaaaaaaattattaatggaaataattatagttcggattaattaaataaattttgtcatgtacaaataaatacttaacataaatatggtatatttttttgcctctatgtttgttttagattaatagatattgtcaatacttttattcaactattataattatatgatatattatatataaagaataacattcttcggtaatagttagaaaagttttatgtaattaacttattaaggagaaactaaaaacttttgttaaatgaaactatcgttcttcttttttcatttgattttttaattataagtttttaattggaagatttccattcatttgttaaaaaaattattttcagtgacaactaggttccttattatataatgatttgtgtctaatgagttgatagtttcttggttagaagagtttcatcatttgagtttgttaattttatatgattttcttttctaatttctgctgtaaaataatatttgatttcacagttcacatactaaggaaaacaatatatacccttataacatgcacaaataaaattgaatctaactcaatgggtgcaatttttaactataaaggcagagagcgtttttactcatataactgcttatgattaaatactagtttatcctattc

SEQ ID NO: 225492 - DNA, 3538 bp, Cannabis indica
atacacgtataaaataaaaaagtctatcgtacaagaaactatttgaactcaattttcagcgtgttaacttttttttaaatctctttaaattttacaaaatttcttaaataactacgatgactataaaaaagaataggctaaaaaattcttcaaatgagtgcatctatagatctatagtgcattatagaagtatcttatgtctattattaatttaataatttttatttttatttatttttattttttattttttatttttttgagggttcatttgtagtacggatttcttcttcttcttcttcaacacttcagatctcactctctgcaaataaaaatccaatctttcttctttcttcttcttcttcgccctaattttccaaaattcaactctgaaaaaagccctaactttcctcactctctactctctctccccaatacccatttccctctccacaatcccaatctcaagattcaatctttttcccctctcttgatccatttcaatggcttctcctggcaatccaaatccccaatctcaatctcaaccccaacaacagaccttcgatatgcaatctttctttaaacccacaacaacaacaacaacaacaacaaacccaaattctcaaaaccctaataataattcttcttcttcaacaacccatttcccaattccaccaccatcttcatacccaccaccttcttcttcctcctccgccgccaatttctcttacccacctcaaacgtcgccgtttcaccaccatcaatttcagtaccaccatccccaactccatcaccatcatcttcctcctcctcaacaccaacaaatcccatactctcttgaacaacaagctcatcaaattcatcagcagagatctctctcttaccctactcctcctcttcaaccatctccttctcctcctcctcccaattcaggtgcacgaatcatggctctcctcagtgcttctcctcctcctcctcctccttcttccaactcttcttcttcttcttcgccaatcattgaattgccgcctatgattccaatgggaattaacccaactgggcctattcgaatgcccagcagtaagcttccgaagggtagacatttgaatggggatcatgttgtttatgatgtggatgttaggcttcaaggtgaagctcaaccacagcttgaagttagtccaattactaagtatggttcggatcctcaactcgttttgggtagacaaattgcggttaacaaatcatatatttgttatggattgaagcaagggaatattcgtactcttaatattcacactgcaataagatctttgtttcgtggtcacactcaggtttggattcaatcaactaattctcaacaatgttgctaaagaacttaactttgttatacattgattcaactgttcttattttgatttatcatagtataggagtggccttaaaaattagtgcttttgtacttgaaagggtagcttaagtggttagacatgtggtttgtttgtttgataggtacttacatagtaaaagctctagttttcttgtttatggttaggcgggttggtagcctagtttcgcgaatacgttcattgaataaagctaaatttaaagtttttgatgttgttagttagtttagtagaaatactgctgtgatcatatagattaacaatggtttgttttcggtaggtacttacctggtaaacggtatagttttcttgtttattttgatttatcattagtagtagtatagtggccttaaaaaattagtgcttttgtacttgaggggtggcttaagtggttagacatgtgagttgtttctgtagatttcttgtttatgggcaggcggttaagagcctagtttggcgaataggttcattgatggttactgaataaactaaatataaaattatttgatgttgttagttggtttgaaattatgtactaaatttaaacttagatacataggtgtgtgctaaagaacttagtttgttttagcttttgttggaacttaggtacaaggactctatctatggttatagattgattgaactgttcttaaaaaataatacttttgtactcttgtggtcagacatgcggtttgttttcgataggtacttacttagcaaaggcttgcctagttttgagaataggttcattgatgtttactgaataaactaaatttaatgttatttgattttgttggttggtttagtataaataccgctatggttatatagcttaagccttaagtggtcaaacatgtggtttgttctcgataggtacttacatagttttcttgtttaattaggtgggtagcctagttttgttgttcattggttattcgggcagcctagttttgctgtttatggttaggcgggtagctagtttcggtatggttatatagttgaacttggcttcttgttcttttcttgcttaatgtttcgccttgttcattatccagaccatgggattacagtaaagggagaaacaaatatggattcttattgtctttttttgttaatctatgtaacgtcttcttcttctgcagagggtcacagacatggctttttttgctgaggatgtccaccttcttgctaggtatccctctttctataatcatgagtcatttttcttttcggctatgttttctggtcattaatgttcttctctgcagtgtgagtgtggaaggacggctgtgtgtatggaaaatatcggaaggtccaggaggtgaagaaggtaaacaaccagagatcacagggaagattgtcatcgctgttcaaataactggcgagggggaagcttcacatcccagaatttgctggcactgccacaaacaagtaatgcttacctgataaccaattgcctcttttgttttttttaatgcttgcggttatcattgtctgaatgtctaacagattgtaataatctaaatactcgtatgcaggaaatgttggtagttgggtttggaaaacgtgttctgagatttgatactacaaaagttgggaaaggcaaagtcttttcggctgaagaacctattaagtgtccagtagagaagttggttgatggtgtccagtttgttggtaagcatgatggagaaataacagatttgtcaatgtgccaatggatggccactcgtttggtttctgcttcagtggatggaacggttcgtactctcattcttttccttttcttctctctctattctctaattattcttcactcgggggttgtggtttctgtcaaatctgtctttcttggacaatcaataactttgatttgtaactaatttatgatcaaatttattgaaaggtgtgttttgattaaagtttactcgaaataaatgcagataaagatttgggaagatagaaaagcgcaaccgcttgcggtcttgagaccccacgatggccacccggttaattcagctactttcttaacagctccccacaggccagaacacattatacttatcacagctgtatgcttctgaagtttttcggttgaataatattctaattgtacttgtgcaatgcatcttatcaga

SEQ ID NO: 225493 - DNA, 2573 bp, Cannabis indica
tattttttttaaaaaaaaaaccagtgagtaagtgaggaaattaggttggaaatattaacacttgaatgaaagtatagaatcaacaagattaaaactctaatgcataactatataaaagattacacataaaaataaaaaaaataataaataagagataaaaggagaattacaactacaaaactttaaacaacaggtaaatatttacaaggtgaaaagcaaccaaaaagaaagtacaaagtgatgtgagagcaatctcaacactaaaaactacaagtgatgattttgggaatcaccaaactcaaacaagatcttacacctttgttcaaaaatttatttccccaaccacaagcacatagggaagtgaaaaaatgtaaatagtattctaaatttatccaacttaaaatatttctaataatgtactctcttgatataaattagtgtcacaaaatgaactcataggtgtctatttatagtggtggagtcacatatgaaatcaaacacccagatggttattaccagtcagtttaaggctttaaatgagattctaaacattgactacaagaaatataagcaatagggacggagacattactggcgggataaattttgccagtattaattgagttattaccgaagggataatttcttcggtattaatcgaattattaccgtcgtagcaccacattctccaataataagaaatttattaaaataaaatataaaagatagttattagggatggagaataaattattagtggtggaaggacccagcggtattaatgagaagaattaacttgcggaaaaaatttcacctaacaattcaaaacttttaagggcagattattgccttaaaaattagccgataataatcttctatatatatatatactaaaagaaccaactttttttgttccaactctaatctctaatatctcccacccttagtattttttagaaaccctttgagcttctctaccaccttcatcccctccacctttctttgcaattagaccctctccaccctcccaaaccctgttttcttggtcatattcgaagtcatacaccaccattgcacgaggagaacaaagaagaaaatctaaggacattggtctgttgagtttcgagtttcagcccatcgcttttttatttctttgttcattgttcttattgttgatggtgagaactcatcaaaaaattaagtggatagaaactctaagtgtgtatgtcaagaaaagtttaaaaaaaaaagatgaaatcaaaatgaaacttaagtaaacttgtaggacaacaataatgttaagtgagtctcttgtattatagattcaaaagcatttgttatagagaatttccaagtcctctcaaagttgaggaagggagtatttataggtgagttctattagctccaaattacatgatgatcctctagtggtcctcaagtgtcatgataaggaagttgcaagttaaaggttacaggttgtaattgcaggaggtgttctcggaggtaggagtaatggttacagcgtagtccttttcggggcaccagagcttggtggcaagatgcccctgctactcgttgtctcccctactcaggtgttgcaggcgcctcatggtcgtactcgtgtgcattgtccttttggcccttatcttcacaacctgctaaatgttggttaccttgctaagagatatgatgatttgatacaatgccctgatggggtttgccaggccaagtaccatgcatgcattcatcaagagttcaagccatgcaagtggtctgttgcatgcgagtggctcgaggcatgaaattggcctgttgcatgcgagtggctcgaggcatgcaagtggcctgtcacatgcgagtggcttgaggcttgcggatggcctggtgcatgtgagtggcctaacgtatgcaagtagcctggtgcatgcgagtggcctcatgcatgcgagtgacttgtcgtatgcgagtgtcctggtgcatgtgagtggcctagtacatgtgattggcatagatatagtttgagttaattatgtctaaattatatataaaaaaaatttatattgttgtctacttgatttctaattgaatattttttattaatcaattttgattttttaaaaattattatttttgtgtaattttaaatttttcttagtttatgtttttcacacttttttatatttattgcaaagaatttgtaaatattgttttatatgtcaattagtggttcttgtaggatgttattgtgttatttataaattttaattttgtgaatgcaatgtgttaatatttaataaatttattttgaagtttgattcttgttaagttgtttttgtgttgctagctagttatttttgcataattgttgtattgagaaaaaacaaccctacacgtccaagctcacttcgttcaaattgccacatggtagccgcagagcccttgttgcattatgacgctatagttttggacgggtctttactttaccctccccactagcatgtgagtctcactcccttgtcttatccacaagtgtatctcactctctttttttgcatttagaaataaaatcttaa

SEQ ID NO: 225494 - DNA, 2141 bp, Cannabis indica
aaatgtaaaaaaaacattctttgaacataaaaatgtaaatatttggtgccttatgtaattattccttatatttttcaatttggataacttgagagatctcaagtatacttgtaaaattatgttcaagttggtgtccatttgttttgacaatttacaattttgtaatttatcgtctacaaaaataaaatgttatttagctgaaatatgatgatacaaaatataaaattcactaaaattaaaatctcaaatgttatctaatacaaaaatttattaatgttaaaaaaaatgagaagaattttctatttcaattagctagccctaacaacattgataaaattaagtgccttactaaagtacttatagagcattgctatgaggtatttatggtgtctagcactatgatgaagtatcgttctataattggttagcgattttctatagtatttattaaagtaaaacaagtaagacccaacattaaattacactaataataatattacatctcgcaaaggtactaagtaccataagcaccctttaacatttttcttaagtgatatcttcacatctttaagtgggccataaaaatttactatcaaaattcgatgagtgttttatagacaacagcaggatgtaacacactcttgaaacatccttgggatgagatttgcaagtgcattgttgattgggtgcacgaacacccacccaatcccctctttgtagatttggagaccagtagtattgtcattttggtatagtaaagtgagaatgatgtgtctgtatgagcagacaagcccattgctttggttgggtctggatatggggataagttgaggaataccttttttttgtatcaattaatcaaaaataccctcatattatctttcatttaaatctacccacttttatgagtggattgcctaatataccactggcctacacttaagtgtagcacatgatttatattaatctaaggagtataatagagatatcatttataaaagtgggtatattttaaagaatataaaaaatgaaggcaaaaatgaaaacaaataaaataaagtgggtatacaatgtaatttccacctggatatgttgggtatgagttcaactgaagtgggccattactccacccagttttgggcttaatatgttttgtatcttctggggttaagcccaatggcccaaacatcaggcccattatattttcaattactttgttcatcttatctttgcatttttcaatcacattgctgcaaattatgtacaaaaaagaaaagaataaccatagtgagagataatagataaaaaaaaacccatagtgagagataagatatccaagttaaaattaaaacattgctattaggtacattaaagtatccaacaccatatcggtgtgataagttgtaagtggttatcaatttctcttattatttattaaataaatatgtaggacccaatattaaattacatcaataacagtatgacacctcttatggtacttagtactccttaacatttcttaaaattaaatattcttccatggtttgttaaattttatataaaattggtttgattgaacacaatatagcatgtatttaattttaacaataaataccatacaaaaatatttcatgaatatattaaattaaatatttcagaattgattttcctaatccacattcttatacaaactaaaacttataatgaacattctcaacttatatatctccagcattgttctaagatattttattttaaattaaaatatagcatccaatattaaattagacaaataataatacttaccgaaagttatgtcgttgattatgatcgtaggattaaagtttgctagcaatattaaattacacaaataacaatacgtaccaaaagttatggcattgattatgatcgtggatttgtggggccagagcttgcgagcatgttccacgagcagactcaaagatagtgaacccctcagaccacactctctttggatcaaaagacgacattcacgaagtcccgtacctagtagagctcttatgcaatcgacgactcaaagcttttgatgggacgatagagaaaaacaacccacgactgtggatgtcagtatcatgagtaatgtagatggaatgtcatggttg

SEQ ID NO: 225495 - DNA, 2608 bp, Cannabis indica
tactttgtgaacacccctaaaaaccagcttcacctcatctgaattcatcaataaattacaataaattaagtagcgtttagttggaagaaataaaaatgtaagaataggaatagaaatgtgaatagaaataagaatagaataaaattaaaaatacattaaaaaaattaataaaaaaccatcaatttttttctcatgttacattggaatagtcttttcttccacttcggaatagtcatcccaccaaaacagtgaaaggcattctattagaataatattccaatactataaaatgcaaccaaacaaataaatgtaatgaaaattgtttcctttccatttcattacctctaaccaaacaccacctaattatatacatgaaataacattccaaagcatttgagcctcctggccccaactttttgctcaatgcaattacttcactcgaacaagatcttgtaatctaatgacattctatgataacacgtccaaaccaaattactgaaatagcagtggaattcttccacgcttcttctcaaagtgcaggaaaaaagtactgaaatactaacttttaaaagaggatatcttgtgacaaaaataagaaccaaaataatctgtaagaaagttcatatacttctcaacaaaattctttcattacctcactgaatcaaccattctacaatcatgtttctttcgtctacatctgtgatgagctttttgatctgcaaatgtgttctcccccacaatctccattatagaatcactttctgctacagagaaaaagtaagacatcaacagaagaagaatgaaatgcaataacactaatgccaccttctaatctcattctcatgtcatgggtctataaaggaagaaatcaaatgatattttaacatggtgtgtaggacacaatgctccaactaattttacattcacttttcataactattgtagcagaaacctatatacaaggaaatgacacaaccagcaaaatgttaggtaaccaactagttgagtcttagaacaaactacaaaacatcccaccaccacaaccaggataaagaacagacaagagtgaagctttgaaatgatatagaagatacacaatgcgatcaccaatgaaaatatgtaactttccaaggacccttatactagtttgtacaaaaccagaaattttcactacaataaaagtatcaattagttctatagtctaagaccataatttaagcataagctaagaaaagactaagagccatagacaacagaaatttttgtattgaacacaaagttgttgtacctccaaattggttgccccaaaataacaatcttgtatcgtcttcttcctcgtcaacctcatcaccatacccaaactctgcatctcccctataacccggttcgcttccgtacccagattcaaccccttgggaatcaaaacccccaattggaccaaacccagaaaccagattctccttctctccattcccaccgtctctgtcccgtctcggattccgggcctcactcacatcagaagaccagttcgcctcaccgtgcacaaaaagctcgccgctagaatccgtagcaaccaccaccgggaaatccgaacacgttccgtacgcggccgaggccccaacagagcagcaccggcgggttccgctccgatcgctgcttcgaccggaaacagacctcgacccacgcctgcgccgcttcctagcgatcaatcggtagcttcctctggcggaaacgggcctatcgtcgtcgatcaagctcagtctagacatgtcgatagctgggtcgatagagaaggaagtggcgcggtcggagaggcagggacgcttggtgtaggcagcattggaggagcagtagggtctggggttggcggtgggaagtaggggttcgtggggtagggttttggtgggtgtggtgtgtggaagatgaaagggtctccagctatggagttgaaaagcacatgaatctatagagtgacgagaatctagaggcttgttgggagacatggatagggatagataggactggataatcggcgaggaaagagacaaggttgtagctttattagtttagcttagctcgaaccttggaactcaatcatcggattctccattttttctttgattttaatatttttcagcaagaaattgtttgtggaataaacaacctatgacaaaaaattctactcttggcccacaccaccaacgtttccatttttacaactctattcaaatctcctgaaaaactttattattgatagcattgttattacttaggtcaattatgattttttgccttttaacatatattaaatatactctctcaatttttatggtggttaaatttttttttaaaagaaagtctcacataaattgaaagtttagagattttaataaatgttaaagtttgagagtaatgatttagtagatattaaagtctaaagaatatgattttttttctaaatgtagcataatggtattttacaatctattaatagcttaatagcttaaaagtcttgggttcgaactcatgacctctccttttttcccatccctccctcaccactaagctagccttaatggctaaataacatgatttagtacatatataa

SEQ ID NO: 225496 - DNA, 5408 bp, Cannabis indica
aaaaaaaaaattatttgaagtaaaaaataaaaaaactccattattttatatgcgtgtaaaaaaatggtacactttttttattggctcaaaatcgaatttctacatatataatcatttgcaaattaagattatcttaattaaaccacaaagcaatatagatggcatatttaaacataaaattctaattagtcggcctttgaaatttactctcttctaattaagaaaaacaatattattcttcaaaaaaaaaaaaaaaaaggaaaacaatattacttgactattataaaccgcctatatattgttttattctaactgaacactagttagaccaatattacttgttaaattaatgtgatttgatttttgtttcttttattctcttgattagttagttcatgttactgcactaattatcatttctgttcttgattattttcgaggtgatttaaatgccacaagtggtattagagtatcgggattcaaggatcaagatttagggtttgatgatcaagactcgatcaagatgagttcaacaaaattcaaaatcgacaagtttactggtgagaataattttagtcaatggaggctcaaaatgtgtgctctattggtgcactacggcatattagaagctattgatcaactagaaggtctcgaagacatcaatgatgataagaaggttaaagagattcagaagaaggctcatagtaccatcctcttgagtcttagagatgaagttctccaagagatttctggtgagaccattgcaattggattgtggaaaaaactgtcctcaatctatttgaaaaagactttagctaacaagctaaatctgaagaaaaagttgtacaccttaagaatggaagaatctggtgaactcagtaagcacattgtgagttcaacaagatcattcttgaagaagaagatcaaggaattgtcctatatattaagttcactaccaagatcttatgaacattccgttgacattatgttgtatgggaatgagactttgcaattcgaagttaaagctggattgaattccaaagagactcagaagaagtcttatgataagagtggatcaaatggggaaggcttattggcttgaggtaagtctaataaaaatagagggtacagagaaacagttcaagtggaaatcaacaaaggaatcgcaataacaatgaaaatggttttaataattcaaattcaaagcaggaaagttttgcaattaatgtaagaaggaaggtcatctcaaggatgaatgttacacttttagggataagaacaaagacaagaatgtgaaaggcagcaagagtgaggctagtctgactactgatggttatgattatgcacatgtgcttgttgctacagaaacatagtcaagaaaagattggattttatactctgggtgtacctttcatatgtgtccagacaaaactttattcagctctcttgaagaaaaaaatagtgaaaatgtacttcttggagacaacaatgcctgtttcttaaagagtactggtactatcatcatcaaaatacatgacaatgttcaaagaacattaactaatgtcaggtatgttcctgatatgaagagaaatttaacttctattgattcttttgctgctaaaggttgtacagtcaaaattgatgagaattgtgtcaaggttttaaaaggatctctaacggtaattaagggagaatacagacatggtttgtactattttgttggagaaagtgttacgggtgttcccacaccaaccacctgttctgagaatgaaactaataggaaaaaattgactgatcaaatcagactttggcatattaatggtttgggcatgtgattgagagaagactcagtgaacttgagaagcaagggattctaaaaggtaaactatctaaaatttgcagaatgaaatttccaactggtgtgcacacatcaaaacaacctttggattatacctactctgacctatgggggccattaagagtaaagacacttggtggagcaagctacttcttgagtattattgatgattactcaagatagaattggatcttcttgctcaaaagcaaggatgaagcctttgagacctttgtaaagtggaagaaactaattgaaaatcaaattaggatggagatcaagaaactcagaacagacaatcgtcttgagtactgttctgggatgttcaaagaatattgtgtcaaagaaggaatatcaaggcatcatatagctctaaagactcctcaacaaaatgaccttgtagagaatgaatagaaccctcataaaaagggttagacccatcctaactagagttggtctcgaaagatagtttttgggagaagttgtcaagatatcatgctacttagtgaataggtttacctccatgtgttggtttgtaattagttttattcaaattactatttacccttctatttttttttatcttttagtaccattaattcactagtggaagtataatttagattccatctaaatttgtgcacaacttttcatttctagaattaatacttaaagggaaccagcattcaacccgttaggaaagtgaggattccataattgtagatcatgtttttagccattcacattattagattcccaaaatagaagttgtaagaatcatcttctccgaaaaattttaacgagtgaatcaaagaaaccaataacataaatatgagttcataattactcaagatttaggtcgatctactattgattatcgtgttgatatggattaggtctttctagtaaatgacatgttagataaagatgacttcattcatatcggtccttatcatatacaatctctattatatacaacaccttcactttgatgtcatactatatccgtaacctgaactgagattactttcactgaagaataggcatcagtgtactgtattaggaaccgttgattaaagatcccataactttaatatggtgctgactattttattcatggctaagcgatcttagttctttctatacaagtcacaacctcatatacgaataaggaattttttgatatatatatattataaattattcaattataaatattaataatttaacatttatgaatatatcaaaatattcaattttttttattaataatcagaaaatgtctttgtaagattttcagggcataaatcttaacagaagaggttagatgaatctacatctattaaggcttttgcatctcaaggtgaacttgagacttaccaacttgccagatatagagaaaggagagatatacacccaccaaatagattaagattttcttaacttgtagacttcacacggtttgcattatctgttataaattagattgacaatgtagagccgaaattctataaggaggccataaatagcagagatggtatgaagttgcttctagcaattcaggataaaatgtcatcatcgatcaagaaaaaaacttggatcatagtcaagagaccatctggataaaagcttgtagattgcaagtggataatgaaagtgaaggaagatattccaagggttgagaatatataagattcaaaccaagactagctttcctcaatgaaagggagtagattacaatgacattttttcactggtggtcaaacaagcctctataagagctacaatagccaaagctggtaagtgtgagtatgaaattcaataaatggatgttaaaacacttgtcctacatggaaacttgaagagaatatttatatgaggcaacctgaaggttttgaaagtggtgatccaaataaattttgcttattgtagaatctctctacgacctaaaacatgcacgtagacaatgaaacatcaagtttgatgaattcatgacaagaatcatacaaaaatagctttgatccttgtgtctactcaaaaggtaagttatttctcttattgtatgtagatgacatatttttggttgggaaaaaggtgactgaaatagaggttataaagggtcttttgagcagtggatttgaaataaaagatctgggtgatactaagaagatactaggtatagaaatcacaaggcagaggcctgagaagatctgtctatcacagaagacttatttagaaaagattttgagaaaatttaacacgagtagtgccaaactagtcatcattcctttggttgctcactctaaattttcaaaagatcagtcatctcaaacaaaagatgaacgaagggtcatgcaagtttagtgggaagtttaatgtatgtcatggtttgtacaaagttaaatctgacacatgccatgagcatcataagaaggtttatatctgaccttggaggacaacactaggaagctctaaaatggataatgagatgagttaaatgaacccttgatattagtttagcttactatgctagctgcaatccaaaaggagaacttgcagggtatgtggacagtgactatgctggatgcatcaacactaagagatcacttgcaggttatgttttcacagctcaaggtggatgcataaattggaaatcagccctacaaaaggtagtatctttgtcttcaattgatgcagagtctatgacagcaactggatcaatcaaagaagccatatgggtgaaaggcctagcgaagaaacgtggcttcaatttagaaagtattacggtgtactgtgataatcaaagtgccctacatttgatgaaaaatcttatatttcatgagaagtcaaaacacattggcatcaagatacatttcattcgagacatcattggtggaaatgaagtgcaagtaagcaaagtgaacactaaggacaatccagctgacatgttcacgaaaggagttcctattagcagccttagatattgcctaaagctactaagtattgacaccaacatctaatgcccttaggggctctttgaatagtctattcattactggtttcactaacttcaacaaaaggtggatttggtcatgttagttaaagttagttaaatctagctagtattcagttacaaccagtaatttttttaaagctttaatcttgacaattaagttagttaggacaatattgtctctctaacactcttggatattgcttttaaataccaacctcttctatagtcaaagataaccttttttagaacatcttcttcatcctcttcaaaattctctctgtatataaattaagctgtagaactcgatcttctcgtgagttcatagttgttagtcattattactgttgtatggtgtgtcttagtcattagttgtcactttctatttttgtcattgtcagttagttaacaaaccattaactaattttttgtggtaatctcgagtgtagactaatgttttgtatactgtggtatgttctataaatacctcaattcatttctgttaatcattgtactaaacactattattctcattcaata

SEQ ID NO: 225497 - DNA, 1541 bp, Cannabis indica
tacaatactctataaattattattatcctaatatatttcactagtttacactagtacacattttcaaggcactgtctttttaaaaatatatttaattataatgtattatattatgaaaacaatgtgtacgtaatagttataaattaatgagattcacaatagaaataaattaataaagaaaaaaataagttaattatctattaattagaacaaacgatttgtcatttttaagtaactttaacataaagattctatgaaccaaaaatgaaagaagatacaaagtaaccttggatcctagttattaattaaatcattacaatattgctttttttcttaataaattttcatattcattgaccaaattagaattcaataaaggcaaattgttttataattaatatgaagaaaattttatacatgtcacatgtcatatgtcacacacttgtattttatttgttttacttatatgattattgcattgacctacctttttatattaaataatggttatgatggtgggtagagttttaattttattttaatgaaataatcattactatgtatacatataataaaattaagggttaatattattttagctattgtgttttataaaagttataaatttgatttttttttttttgtaataaaatcatcatctttattaattccaatttatagtgattatatgattaaaatctagagtaacatcactactcttgataacacgatcaacaattaaataagatgctcgagctaagaagtgagcaacactatttgcagaacgtctaataaaattgacataaatatcgatctctcaaatcatttaacatcatcttacaatcagaaataatacttccaaagtatgaaaccataagaagagaactaggtaacgcttgcaccattgtaagactatcagtttcaataacaacctccttccactcctttgccttaatccacttccactcagcataaatttgactttttattgtattaggtcttatatttttcaaaatagtataaaataaactctgaatttaattttttgttatttttttaatacaaccaatctgaaatagatttttaacacaaacaaatgtaaaaagtgtaataattttttataatatctctaagtgaagttattatgaaattttaatttgacaaaaattaagttcattatctattttgtattattttgaaatatactagatttaaattgtcatttaataaaatagagagtacaattggtaatttttacaaaatggtatttatattttaggagtatacatcaatcttttttattaactctttcaaattaagtaggtctatttttgttttagatgaaagtctgtcatggatttgaaaaatactattttttttaatggtaaatatttcattgaaaacattatttagtaaaactcattgcatgcatatattataaattaatttggacataaaagttaattataaaatattatttgacacatatgatatttgtcattaatcgtaacttgtaactttttcgtatttttcaataaata

SEQ ID NO: 225498 - DNA, 12354 bp, Cannabis indica
aaccagaacaaatggctcctgcccctaccatatcagacaacaacatcaacacacctgctacaaatgaagttcctcttcgaagaactactaggcagaccaaacctcctgcatacttgagggattacgaatgcaactccattttacaagaccaatcctctacacctcatccactcagtaagtttattaactatgaaaaattatctgctactcatcgagcttttattcttgctgtcacagctctttttgaacctcggaattacaaacaagccagccagcacaaggtgtggaaccaagcaatgcaaactgagttatatgctttattgaagaaaaaaatatggacttatgtcaagcttccaccaaacaagagagttataggatgtcgatgggtttacaagataaaatgtaacagtgatgggagtgttgaaaggtgcaaagcaagattagttgcacaaggtttttctcaacaagaaggtctcgacttctttgatactttctcagcagtagccaagatggttacatttaagcttgccatatctacaatccaaaactggcacaccttacaaattgacataaacaacgcattcctaaacggtgacctaaacgaagaagtttatatggtcattccaccaggtttaactccccgaaacacagatggtaccgcctctaatctcgtatgcaagctgcataaattgatttacggtttaaaacaatcatcacgataatggtataccaagctttcagacgctcttatcatggaaggcttccagcaatctcaagccggttatactttattcactaaagggacaagaaatagcttcatttctctattggtttatgtcgacgacatcatcatagcaggccccaacaatgctctattgcaccaactacaagcttcacttcacaaccaattcaaattaaaggccctggggccagtaaagtattttcttggcttcgaaatcgcacgatcatctaaggaattttcttatctcagagaaaatatactttacagcttctcactgatactggttttacaggtaacaaacctgctaaaactcccatggatccaaggacaaaacttaatggcagtgaaggcacacctctagatgatccctctgcctatcgacaacttgttggtcgtttattatacctcacattgtctaggcccgatatcacctatgctataaacgccctaagccaattcatgtcagcccctcatactcctcacatgcaggctgttcaccacttacttcggtacctcgagaggtgccctggacaaggcttactttacaactctacttcatccttacaccttcggggattctcagactcggtgggcttcttgtcctacaacacgtcgatcaacatccgatttttgcttcttcataggcgactgtttgatatcctggaaaaccaagaaacaaaccacaatttctcgcagttctgttgaagcagagtacagagcactcgctgctgctagcaatgaagttacatgggtccaatacttgcttaacgacttacaaattcctcaaaaggcccctgcattcatctattgtgataatcagtccgccattcacatcgccaataatcccacttttcatgaacgcaccaaacacatcgaattagactgccatttcatacgcgaaaagataaaagcctctgcaattagactcattcctgtaaacactactctccaacttgcagatgctttcactaaacctcttccatccacaattctttcttctcatatccgcaagatgtctgtctatgacatatacaatccatcttgaggggagaatattagaattataacagaatcagcctactgacatcagctactgacagattgttagttataatttttttaccgttagttcaattagttaattctgttacattagctatcttttagctgtttcgtctaaaatcggttacttccctgtatatatattggtgttcttcattaattgtaaacaagtagattgtaacttcttcatttagtaaataaagcttttcattttctctctatttcgtgttacctatcatccaaccagatatgtgccattggtagagttagagaatagacagcttcgacaacgattggttgaatctaaccgtcgaaatgctgagttggaacgtgaagtcactgctgtcagggctacacaaggaacaattcctcaaaactaagtatatttggtttataatttatatatcctagcttccatgttttcaatcagttggatttataaattaatatgaatattcatattgtatatacaatgtgcacataaaacacatgtagaacattttaattcaatacaataaaattacggaatatatgcttatgcaaagcaaatttatatactattccatatgcgatatgcctatcaaaagaaaaccaaccgaataaataaacattcagctaaatattaaagttcacataaaaattggtctgactacaaattttgaagcgtactcttgtgaaaatgacaagagattttcacattactctgactttgttcaagaaactttcagtctcccgcgcaaatcacgtcagtgtgtcgatatagtaactaggcaaaggaccaaaacaatagaaaaattcagtgtgagataattcttctaatatataagtttctctttttctatgcaattggaataaagtaaaagataatgtaagtaaataatgttcaattatattacctttagttagttggtctgctctgttgtctgtgttcttggctcccaaggctcagataagaattttttatatgttgtagctctttgatcacatcttctactttcaatcttccatttggtgaatctgttgaacatgcaagtccaatctccaagactaaagtcaagcacttgaacagatttgggctctcaaaactaatattaatttctccttctgtgtaaatttcattagttcctttgttgttgtagttttgtcttgtcactgtggtttctacagcttctccacttagaagagcagagtccactacttgatcaactctttctggcaatgccatcttaacaaagttatggagattcagatcatccttgaatgattcatcagttgggctccttcctgttccccttgctttgatggctcaccgcccatggcatactctgcaactcataaaagcaatagattagaagtttttgtttttttaaacatgaaagataatgtatagagattatatatttgtgtatttccaacattggcaaatgtcaaaaaggataataaatcaatgaggtaattcatatgtcatacactaaatagataacaatacaacaaactttgtgtacattttaagttagtttgactctccaatactaatatcaactcactcatctatcttttcgcaaaaataaaactatgtaaacttcagttgttacctggagggacataaccaatggtgcctttcattccaattgtgctggtttgagtttcagacacttgattggtgttaaggatcagcttagctaatccaaaatcactaacatgagccaccatctcgttgtcaaggagaacattgcttggcttcaaatcacaatgaatgattggatggtcacaatgatcatgaagataacatattgcagaggctacatcactagctatagataatctctgaataaacttcaaaccacttgattggttttctccatgtaaccatttatctaggctcccgtttctcatatactcaaacactaatgctttgaaatcatcaccattgaaatcaatgcttgagcaacatgttaaaatcttaacaagatttcggtgtcgaatatttctcaacgcgttgcattcagcaatgaaactcttggaagctcctttttggtttagattgagaacctttacagcaactacattttcttcttgatcaagtatgcctttgaacacagagccaaagctgcctgttccgatcaacatgctttgagagaatccattggtggcctggtgtaaactcttgtatgaaacctttgagagaaagctgattgatgagagttcagactttgatgatgatgatccctttattgatttccttctccaaaacaaagatgatgaagatacaaataaaagaataaatgcaatcagacaaacaattatgattatcaatttgtgatctttcatctttccttgtttggattcaatggtgttaagggtactgttgagagttagttaggcagttatgagtttgttattgttgttgttggctgttagctcttttctgttattgattagttgttttagttagtttagcttctctctgtatatatatagattgtatctctcttgcatcaatgagatttttctttgcttctccattctttctccaatcctttctctctttcttcttctttggttcctctgttctttggttctgttctaatggctaggagatctaacatggtatcagagcaatggcctccgctcaatgcaaacatggctacggttggagctgctggtgtatccaacaatggcgcaaccttcactaatactcaagcttctcagaacagagcttctcacagtcaagaacctgtgtatttcaaccatagcatctcgattcgcctcaatgaccacaatttcttgctgtggaaacagcaagttcttgctgccattagaggaaatcgtctcttgaagttcataaaggaaccaccaccaccggagttcgctactgatgacgatcgtgctcaaaacagagtcagccaaaccttcatcgactgggaagtgcaggatcagctgctggtttcgtggcttctatcgtcgatgactgaaagcctacttacaaggatggtaggttgcaactcagcacttcagatctggaaaacgttggagaaacatttcactttacaggtatcttcgaaaatcttggagtttcgtacaaagctacagaacctcaagaaaggaacactgagcctcaacgattacctgttgaaagtgaaacaacacgtcgatcttctcgcctctgtgggagaaacactaagtgatcgtgatcatgtcgcagccatctttaaaggtcttccgagcgagtatgatactttcgtgatctctactaatactcgagttgaacagtatactgtaggagagatcgaagccttgcttttggcttctgaatccagaattgaaagatcggggaaggaagctgatctgagtgctaatctcatcactgatgagcaagattcgatgatcgaagctaatattgcttggaaacgattcaaacaacaatttggacggggtaattttcagtccaatggagctggtcaatttggaaattataacaggaatctcaatcgtggaggtgaatcaggttttgtttcgaatacgaactttggtggcagaggtaattttttccagaatcgagggggcaggtctggaatgaatatgaacagcaaaattcaatgtcaattgtgcttgcgatttggacatacagctctcgactgtttttatcgctttgataagtccttttcaggttctcaatctggtgctaattcaggaagtaatggtcctcagcaaacgcaaatacctcaggccaatattgctacaaacagcagcttggatgatacaaattggtatcctgactcgggggcaactaatcactgtactccccaagttcagaacattgcaaactgttttgactatggtggacaggaccaaatgtatgtaggagatggtacaggtttgtcaattaagcatattggtcaatcctattttattcctcagcatacttctcactctcttgttttaaataacctccttcatgtgcctgaaatcacaaaaaatctgattagtgttgctaaattttctaaggataacaatgtttattttgaatttcatggtgatgtttgctatgttaaggaggaagtgagtcataccactttgctgatggggagacacaagaatggcctatatacttttgatcaatcccaaataggtcctatctactccactcctgcccaagctaaagtcaccaatcattgtcagcctgttcattcccaaaccagtagcagtgacaatcatcaatccaagtccaagtgtacattcatagccaccttgaataacacatctgtcactatgtctaattgttttaaatgtaatgtcaatgttcaaaacaattttactttgtggcataatagacttggacatccatccgagaaggttgttcaaactgttcttaagtcttgtaatgtccctgctcttaataaagattctcaattttctgtttgttcagcttgttgtcttggaaagattcacaaatttccattccccaaagcatccactactgttatatctgagccacttcagttagttgtctcggatttgtggggtccttctcacacaacttcctttaatgggtataaatattacatacattttgtggatgcctattcaagatttacttggttgtatctcttgaagaataaatcggatgctttgaaaactttccaacactttaaagctgaagctgagttacaattaggcaagtccattaaaactttgcaaacagattggggggagaatataggtcatttacatcatatcttgctgacaatggtatccatcatagacatccttgtcccacaactcaccaacaaaatggtttagctgagagaaaacataggcacattgttgaaaatggccttgctcttcttgctcaagcttcattgcctttaaaattttgggatgaggcttttagggctgctgtctacatccataatagacttcctactcccttattgcacaacaaatcaccattggaaaccttgtttcacactaagcctgattacacaaattttagaacctttgggtgcaagtgctatcctaatatcagaccttacaacaagcataagcttgagtttaggtctgccccctgtacatttatgggttatagccttaaccataaaggttacaaatgtttagattcaaagggcaggttgtatatttctagagatgtggtttttgatgaattttccttcccatatgaactcaaattcagtcaagatactaatactaaaaccacagaaatctcttctcttgtttctgcactcatacctgtctgccctcactcgaaacctgtctataccagtgctgatttgcttccaccaggcttaaacacaagtgtccataacccaggttttcctactaatattgaccatactgctgtagttgacaacactgcacctgatcctattattcatgcaaatactgctaacaattgtttcccaggtgatattgcagatacatcattgagttccactggtgcagcaactggtaataatgttgcagaggtttctgcacctgtatttgcttcaccagatgcagcagaggtttctgcaacatctcctggtgaacctgctgctgtgacacatgaattatcttctcatggaactggttttgccacaccagatacagctacatcactgctctctccacctcaaagagcatctgttttaccagacacaagacctgctcctgctttttcttcaccagcagttttacctttactgtctggttgtttgaatgcccctggtaaaaacaatgctcacagaatgataacacgatctaagttgggagttttcaaacccaaagcactcctggctttgagagagccatcatcactaaaagaggcccttcaacaagagcattggaacaatgctatgagtgatgaaattctagctcttgcaagaaacaaaacttgggttctagtaaagctacctgaagggagacaagccatagggtgcaaatgggtctacaaaagaaaggaaaatcctgatggtagtgttctcaagcacaaagctaggttggttgcaaaggggtttcatcaacaagcaggctttgacttcactgaaacattcagccctgtggttaagccagttaccataagggttgtattaactcttgctctttccaaaggttggtctgtgagacaactcgatgtcaacaatgcatttctgaatggtgatttacaagaggaagtttatatgactcaaccaccaggttttgagattcctggccaagagcatttagtgtgcaaactgaacaaggctctatatggacttaaacaagcacctagaacttggtttgataagttacaacacagtctagcttctcttggtttcatctcttcaaagtctgatcactcactgtttatccatcagtcttccaaatcaacaacacttgtgctcgtgtatgttgatgacatcttagtaactgggagtgatgaggcttttgtgaccaatctgattgctacactaaacactcaattttcccttaaagatcttggtcctcttagatactttttgggaattgaggtgaattacacagagaatggaattcatctttgtcaaaccaagtatgcccgcgacttgttagtcaaagctcagatgtttggatctaaggcttctcctactccgatgaccagtggcttgcgcttatcagctcacgagggggagcctcttgatgatgttcagatgtatagatccattgtaggtgcttacagtacctgacaattacacgaccggagctatctttcagtgtaaacaaagtatgccagtttatgcaaaatcccttgtccactcattggcaagctgtaaaaaggattcttaggtatgttagtggtacaatgagtcatggacttcattttaccaagccagaatcctatgatctcacagctttctgtgatgctgactgggcttcagatccagatgacaggaaatcgacttcgggttatgctatatttcttggcactaatctaatagcttggaagagtaaaaagcaacagaccgtttccaggtctagtacagaggcagagtataggagtgttgctaatgttacagctgaactcacttggcttcactacttgttttctgagcttaacattcaacttcctcagccccctacggtttggtgtgacaatcttagcactataatgctcacacagaatccagttctacatgctaggacaaagcatatagaacttgacctatattttgttagagagaaggtgctgaacaaaatgctaaatgtgaaacatgttgctgccattgatcaacttgcagatgggttaaccaaagccatttctagccaacgattctcaactttcagaagcaaactcaaaattgaagatctttcaattatgagtttgaggggagatgttaagggtactgttgagagttagttaggcagttatgagtttgttattgttgttgttggctgttagctcttttctgttattgattagttgttttagttagtttagcttctctctgtatatatatagattgtatctctcttgcatcaatgagatttttctttgcttctccattctttctccaatcctttctctctttcttcttctttggttcctctgttctttggttctgttctaatggctaggagatctaacaaatggctttttgacatcttggaagttgtaacttcggtacaccaccacaaagcctggcatttccaacaattgatattgcagtagtattttcaaagatgcctttgtctggtacctctccctcaaggtcattgaaagaaagattcaaataattcaagaatttaagattatttaaatccataggaatgtttcctgtcaagttgtttcgagaaagatctaagtactctagacctctaaggaaagtcaaagaagaaggaagaagtccttgaaagaagttcccttgcagggaaagtaattggagactgctacaatctccaattgtatctggaatttcacttgtcatattgttttcagagaggtccaaagactctagacccctgacctttcccacttctgctggtatgctaccattgagtgagttttttgaaaagtctagtacaagaagtgaaggaaaaccaaaagttctttgggaatagttccacttagactattttgtgaaagtccaagttgctgcagtttttggcagtatacaatgttaggtgttatgcttccatctaaattgttaatttctaaattaagaatgaagagttgagtgaggtttcctaaggatgacggtatctttcctgataatgcattgttattcaacaataatagttgcaagaaccttagcttccctaaagaacttggaatgacaccttccaaaagattaaactccatggttaagctgattaagttgactaagttttttaatgttggaggaataattccagatatttgattctgtccaagataaagataagttatttgagttgacaaattagatacagattttggcaaaggacctccgaagttgttatctgccaaagacaaaaaatacatttgactacaatttattaaagatgcaataaagtccaagctattaggtaagtagtttcctagatgatttagctctaaattgagtctcctaagatgtggaagattgatccccaaactagctggaacttttcccacaaaatgattttcagaaatatcaaggatctcaaggttagaagcatttgaaaatgatttcgggattgtcccagagaactcattaccaccaatatgaaattctttgagattgggaagttgaaggccttttttgggtggaatagtgccttcaaattggttatcagtaattgagaaaatggttaaagatgatatgttgtaaagtgagagaggaatcataccagacatgttattaggccctattgaaaagagtttcaacctttccaactttccaaactcttgtggaacggtacctactagagtgttttgccctacataaaactgttctagtgatgaaatatttgccagggaaggtggaatttctcctgtgaggttgtccctctgaagattaatcagtgaaagcttagtcaaagagccaagttctgtgggaatgacccctgtgagtctgttatttccaagatttaactcccttagttcaaagcagtaactgaggttcaatactgataattcaccttttaacatgttgaaactgagagccaaattttgtaatcgagataaatgacaaacttggtgtgggatttcaccaaagaagttattgttcattaggttgaaggacctcaaaaatgtgaggtttctaatgtaaggtgatatagtacctctcaagttatagtcttgtaaattcaagctcgttattctttgatgtttgtgaccgcatttgactccattccagctgcagaagtgagtggaatcattccaggatctcaacactgcataagggtcatcggagactgattctttgaatttgagcagagcaaatctatcggtttcgttccctaatgcattagtattcatagcatggcatgacatcatcaaatgcaggaacgaaaaagcatgccaaaaagcagaagtaatggggttattaagtttcatggctaatatttgtactggaataggatatgctcaaggtacgtatgagttagatatgaaaatggagattggttattaagccttaatataactatatcatttacatttttcttctctaataagtcttcatgagcacatttgattgacttgagactggatggagcacaggaaagaattgaagtaataaattcagtgggtacaaaatttctttgataaaatagacagctaactaatgaaggcccaccatgcaaatgaagtgtaaaaacgtatcacttattaagtggaagaatttcaaatgaaaacgtataatttgggaaattatagcaaatgatccctaaactatttattatttatattgttttttgttgacaaataaaaaaattattaattttataaaaaatttaatatatgtggacagtgtgtgatatttaagttttgagatgtgagtttttttgcatgcttttgaaattttatatttaaacaaataaatgaataaataataaatatttttagctaactaactaacctgtctccatgggaagtgttttagggcagcaaaggcgatggtgacaacggggttgagatgggccccagagatatggccggtagagaagataattatcatgacggtgagaccggtagccacagccaccacagttagagtctcggcatcgtttgtgttagggttcaaaatagctatggctgtcgctgcgaatatcaacattagagttcctacgaactctgctccaatctgtaattaattaaaatacattattttaatttttggttaaaagtaatatttttttttctctaacatatattataaaatcttatatatatgtgtatatttacctttcttgctattgaaactacaggagggcctttccttgaagtagagtttggtttgttgagtgatccttcttccatggcagaccattgatcattattatcaccacacaagttgcttagcatggattttttggtacctccatgagttggagtaacaggtatagttgtt

SEQ ID NO: 225499 - DNA, 2382 bp, Cannabis indica
ccaacaaaaataaataaaataactcaacccgtaaacgactaattggttttgaagtcgataaaaatagactagtttcactttcaccactaaaccataattccttcattggtaacagttcctcaatcgatttaatgtgttattcttgtctaaacatgagatgagagtagtataggttggttgccaaattcactctctcgtaaactactttttttaaaaaaaaatatatatatttttttcttttatcaaatcgttgcggtaaatattatatttggcagtgcacgttgtaatatcatatgagacttcacgtgtcctatctaagagatatctcaaaacattttttccttagttttttggctatttatgaataggcgtgaagcagttgttgatttgaaattgaatactgcatatttgtttacacagcatcatgttgttagtagaaatagtggcagatttacttaggaagttaacattagtaattggcgcaccatttttttattttccacttccaacttcggtaaaattctgtttatcattttgttcactatttatctttgtggtggcaatgggcagcattagaatttgaatattatcatgaatgattactccaaacaataaaaaaggccccggctagtgtatttttatcaaaccacatgctagagattcatatccaataattggggtgtaaatcagagccccctaaatttttcttctcctattttcatgttttattttttaaaaaaagaataatataaattcatattggagccatttataagggttgtacattatattagtataagtttttattaaaataaattagagttagtttttcttttggcacatgtttaacatcttccaagttccaacttatcgtccaagtggaaatgaattgttggaaccatttatcacactactggtaagaagaagatgatgattcagaataatattcttgtaaacaacaaagcagtggaatatgaaggtcatgtaccccaacttttcccattccatatatatacatcatcctaccatagagcagcatatcactacaaacaaagccccagacacaaaggtaaggagaaatatagcacacacagcttcaattcatagccaggtcacagaaaaagaaagaagatgcatacggtgttctcatctattctagggaatttgatggccaaaactgattttacaaggagggccgagggcattattcatgaatgttattataccaaatgtggttgccttcaatactagtagaattacaaagagaatctattccctctaaaactcttaccaattctacttgactttatctaataacaagtattgcattggtttattgggtaatttagacactgacccgaaaaaaaatagtaaattgaacttgatcaaaactgtgtctttcaaataataatggtgaacatcaaatgactaataaatatatttggctaaactgattttccatagtcttaagtcttaattttaggtctgtaactcattctgaaatggtcaccaaagaataaagctgattcaaacaaaacccctacttgtataggttgtgagcagcaaaaatcaagtgaacatatcattacaaatcaattaaactaaattaaagtagcagtagaagtaaatgtttaaaagcaacaagagcaatcaaaagggcaaagccgggtacctcccgcatcagctttgttaagacctaattcctcttcagtgtacacagcaatcccatcctgagttttctttctgggacgagaatccgattcccaaaacccacgtgatttatcatcctcctccttcctcctcggtctcttcttctccttcatcttagctcctccggcgtccttgcccttgacgggcttttgggtcttttcatgatcgatcttcttccgctttttggcggcgaaaatttcgtcaatttcggatgtgggcttcttggaggaaggtttattttccaatagctttacatcattctctggagaagaagttgttttggatttgctcttctttcccatggagtatgtgaagaagaaggaaaaattgcagtccttaatttgatcgattgaggagaaagagagagagagtatggagatagaaggctagggctgaggtagtgaacccagtcgttcgttaatagtaatttaccccaatattattaaggcttaattatgtaatcgctcatttaattatgtatttttggtatcctacggtttgaatgaactcatttgtaaactaagggtaaatagtaaattaaaactggcaaccggatagcttttaagtatttttttgtgcactgtttgaataaaataagttaaaattagtaaaataaggggtcatttggttgaagaaactcaaaagtgttttatatagggataattgcggcaa

SEQ ID NO: 225500 - DNA, 2313 bp, Cannabis indica
aaaaaaaaaaaaagtgtttaaactagctaataaagaattgtaataatgaaaaagttgtcttcaaaattttatttcacatataaaatatgtatacctagatactgaatacatcttttttatttaataaaaaaacctacttgatcaacttattgcatgcactaattaaagttttgatgctaacggattccataaaaatgagataaatcttcttctattctattatattctatatctgataaaatgaggctgggttagaagtgtaaagatacttttttcttttcatctaacaatgaataattttattgaaataaaaaattataatatcatacaaactttaagaaatataaaaccaaataaaagaatgaatttcattataccatattaatttttcatctacccgaagaacatgtcgagctaattcatgtacagtcccattagtttttcaatatacatggattaggatatttcagaaaaattgaatttcaaactagctaaatcttttaataaggaatcaagctcattgaggaagaaagatcgttttgaaaatgtatttacaaccattaaataatcggactcaacaaaatgaacaaaaaacctataataaaagtccaatctaaatctacaagtagagttacacactttacctaattaactgagaaacaacccattaatggtttagaagtataaagatactattgattctatttatattcatatactagaaagagatagaacagatcatagaacgtggactagtacatattattcccaattaattaattgaaattaaagattttcatgcatggtcattcatttattatataactcaaacttgataaaaaatttaagaaagtgaactttttagttttcatttattttttttttaattaagattagtgatgatttcacatggtaaaggagctggagagcctcttcctataatgattgagattgggtaacaaagtttaaaagctacacatgtataaaagggtcatcttattaaatatttcaaggaaaagttgtaaaatatatagaggagtgttactgtcaacctcctactataattttttaattaatttttgtgctcgaaaatatatgttgaaatatttttttttcaatttttttgtggcggtgtttgttattcttacaataccatacttgtaaagttttaaaaaatttcaaatagtttacaatatcgaaaatatgtttgaagtttttaaacacgcgcgtagtaaattgaaacatcaaaaatcctgttttcggtactctaaattatttgaaattttttcaaaaatttacagagataataatataattgtaatgaataccgctataataaaattttgaaaaaaaaaaaaaaaatctaggcatgcagggacagaccccccactaataaaaatattgtcttttaataaattaaatgtaaatttttcaacttaataattataaactaaaataatagaaaagtctcacaaaattaaataatattataatataaatataaatgtttttttaatgataaagtaaaaattttgaatcagtcactaccgtcatgtcatgtgatacatatgtgaaaaatgttggaccacatggttgggtttggtggtggtgggcaaacaaaaaatggcgtgaagcctagacgccgcctgctctttcatcctaaatagtaaatcctaatcatatttcatatgatggcttaaaaaacttcttttatgagtggctgtctagtagtgttatggccatgggtttcatttatggatattggagttaaggccatatgtcatttttggcaaagttttttgtttttttcttcttaaattattaataataataataataaaagaggaggcttttgatggggttcaaacttctatgcattctagttccataatcatcagtttcatttggctgatattatatatatggcctttttttagacgtgttgacaaaagtcacaataaataaataaataaaaagttacatttttaacgttattccataatatgagtttgtgttaagggacgggggtatccaacatcccaatatacggaacaagtttgcaaatttgtagggaacttaatttcaagtcaaatttaggtaaaagtattatttttggtaagagaattgttaaaaagttaaaaaaaaaattattaaaaagtattatttgtgtttaatattctttttagtgttatattataattagtgttattaaatatgtggtctcacatagggatggataccctgatccaatctaactttttttttactctgatctattttaatatatatttattctatataaagtgtgcatat

SEQ ID NO: 225501 - DNA, 3311 bp, Cannabis indica
tcaaagtgatggcctttgtaatattcatatgaagaaggtaaagagtctttactaaagaccttctaggaaaaactgctaggaataagcaaggaataagaagaaaaccaaaaaagagtatcacacaaaagaatgaatgaaagcattactcaacttagtagcttagtcctttatttataggtacagagaaaatacaaacccaagaattaaatagaatcataacaatttaaacagtaagctaagacacctaacaaccttaactactaactgttaaagctttatgtaacagaatctaaaatgtggttgacatctcccctcaaacgaaaaggtgtctctgacatcttaaatttggacctaagatacataaatctctctgtgaataaggactttgtaagcacatctgcaatttgatctattgctggcacatatcgaacatatagttgcttggataatatgtacgttccttaacaaagtgtaggtcaatctcaacgtgtttcgatcgagcgtgaaatataggatttgtcgcaatggcagcagcattttgattgtccacccataggacaggacatgatgaaatggttatttgaagttcagacattaaccacttgatttctgcagcaacattagttagtgatttgaactcactttcagtgctggacctagccaccacattttgttttttgtagaccaagagaccaagttcccaccaagaaacatggcatagcctttagtgctctttctgtcatccacacaagatgcccaatcaacattagagtaacctttcagagctaaagaaccaactagtgcaatatgaagaccatgtgagattgtgccttttagataccacattagttttttgcaagcctcccagtgagaagtggtttgggcgtggatgaactggctgagcttattaattatgaaagctacatctaatctagtcaaagttaattattggagatcccccaatgtgcttctgtacagtgtttcatctttaaagggttcaccttccttaaaagataaatttatgtttgcacttgaggggttgaaacttggtttagctccctccatgttaagtttgacaagcaaatttgtgatgtactttgtttgagacaagtacatcctagaagaattttgaaagatttccacacctaagaagtagtgcataggacctaggtctttaacagagaatgacttatttaagtcaagaatgagtctgcttatgagatttgtgttagggcctgtaatgagaaaatcatcacactacaagaaatgtcacttttaccagcacagttcgctaccgcgctggtaaaagtaacttttaccaacacatttcgcaaattgcgctggcaaagaggtcaaagttttaccagcgtatatttgtagtgactaaaatctaacttttaccagcgcatttaagcactgggaaaagtcatttttgccagcgcttttaattttatgctggcaaaagttctaatacaaacattgatgtgccaacccccttttgccaacacataataagtaaattctattttaccagcgcaataccaacttttgccagcacatcaaagtgacatttcttgtagtgtcaacatagaccaacaatatgattagagttggtcttgtgccttaagtaaacaatgagttgtcagattttgaagtaatgaatccccattgtaactgagtatcctttaaatttcgatcccaggctcttagagcttgtttaagatcatatagagctttgtgtaattgacaaacatgagtaggtttagattcatccataaagccctatggttgtgtcatatagacattctcatctaatgtcctattaagaaaggtattacatacatctaattgcttgaccacccatttgaaagacacagcaatagtaagtatgattctcacagtagcaggattgacaactggtgagaaagtctcctcatagtcaatactaagtaggcaccctttagctaccagcctagattttaatctctctatttatgaatccatttgtttcaatgatagccatttctaaggaggatgacactaatgtccaagtgcctacctttttaagagtagtgaactcttgttgcattgatttaagccatttaggatgtttaagagcagttgctgcagttctaggctcagaaggaaggagtgttgttgtcaagggatatcttgtggccaaatgagcatatcgcttcacaattccattaagaggccttattctcatggcatgaatcctggtggtagtgttggtacctatactttttggggcaacagtaggtgtaatgggaggttgtggagggggtatagggagttgttgattttgaggttgagtagatattgaagggtttatgataggttgaggtgtaggatcatgttcagtgttggtttgacttgtcaatgaactagaggtgtgttgtttgtcggaactggaacattgggtttaggtgagtgtggttgttggtcatgtggtgggggaggttgatttatgacaggggatggagaaggaacatgttcaggttgttgtctatatgttcagtacgttgtttggtgagagtggttgtttatttagggttcaggttgtgattgagtggatatattcttgtttattggcatttccacgatccaatgcacgaccataggaacaagaattcccatttcttgattgttggaatgcaaaattagcttgcagcttcaaggaaagatctgtaatagaattgtgatgctcgagacgtgttttgtgtgagagaagaagagcttgcacttcttcaaatgataacagatcactacaggatgtgattcttaagacaactgagtcaaactctggacccaaaccattgagaagttgcaagactatatcttgattggtaactggtgaaccaacaattgataatgcattaacgatcgcttgagttttattaacatatagtcagagatcgaggggttggatttttgaagatgagaaaattggcctttcagctgaaggagtcaagcttttgtttggctggaaaacctctgttcaagtgcatgtgtaataccctgataagccttatggtgaataattagagttttatatatattatgggctaattaagtaatgagtgggattatgatcttactaatctattgcagcataaattttaattttattataaggagataaataagcataatttattaattacagagatttatatagtgtatgtgaatataatatgagttgtttgtgaaataataatattttaaggttcggcgaccttcaaggctcgatcgggggccaaaaatatcataataagtttaagggttatttt

SEQ ID NO: 225502 - DNA, 2494 bp, Cannabis indica
agttgttttattccattaggtgatctacctatttatacacatacaagagtacaaataattaaaaaactaagagaaagggaaactaagaaaaaaggaatagttgattacattaatggtaataaataaaaatttggacatccacataattaatactatttataacagtattttaattttatgtattttaatattttgtatattaaaaattttattataaattttttttattattaagagatttttcatcccgttcctgccctcattaggggatttctcgccccatccccgattagaattaaaatccttaatagagatagggatgggagaagcaatcccgccaattctctctctgtgtgaatccctagttaagcaaaataaaaaattaaaaaaaaaaaaaaaaactcaaaagattaataaacaaaaacaaatcaaatgtgtgatgccaataaaacaaatcatattaaaatatttaaaaaacgtgtcaagtaaaaaaaaatgcgccattttgtggaaaagtggcatagtgtatatctagtcccaactcatttttttttttcctaattttgaatgtatagaaaaactcattttaggatatcatataatacaacatttcatatgcttttttataattaagaataaataaaatgcagcctcaccaaaataactttgcaaattattgtacttgtaaattttctgaatctcaaattatttcttatatacattagaaattaaccaataactaaaaacaatattattattaggtacgtcatagatagttaccagttttctatatcatttattaaattaaaatgtaacgcaaaccatgtatttctcaattaaaaagcaaaacaaactctcttatttggatgtataaataaagtaacaaatgaacatgattaataatgtcaaacccacaaatagtagtgacagctgtaactaatataagaagcttcataataactctaaacaaacaccattgagaaagtactcatatcatccctataatatctctaaacagactcaacttcagtaaaaatatgttcaattcaaactaatacaaaagctaaagttagacttagaagatagactaaaagataaacaaagatagactttatgagaaactgaagataatatcatcactaagaactaaactctattgtttctaataatggagactttgagcgaggcttgttccctagacacaaactcgaaaatgcatgcatctccagtgtttacagagttagcctccagaaaggcagcccatcctttggaaaaaaagaagccacactcacaatttagaagtttcacatcccatttcctgctcccaactttaagagatatgatctgagtctttgatccaagatgactcttaatgaaactatttggtagacgctgcaaaaacagtaagaagaattaggctaattaggatattttaccaaatcatgcttcctaaatttaactatttcattcaatattactatttcagtgattctttatgtactaaatcatactccccagactttaatatctactaaatcatgactctctaattttgacatgtactaaatcatgcgctcgaacttcattcatgttagactttttttattaaaattggacaaaaatccttaaatccaacaattttaatagttcaagggacatttttcacgactttaaaaattcagagagcatgagttggtatatgtcaaaattcgggagtaaaaatcttaattagccgaaaaattactatggttttagttatcccaaaactcagaaagtcaatatgtaagctaaatctactaatagactcaccaaattataagaacgaccggttttatccattcttataattcttttgaaaaaaggatactttgaatagaattggctagcctctttgtaagctttagtatctgtgtacttattatatggtccttcatgcctcctcctctttccctgcttcatcttcttcagtgtgtcatctttagtttctgcactaatcataaactttgctacataaaaaaaacagaagcaataaatttttaggattttttcatttatagtgtaagatcaaatttaattcacaaatatatatattattgtacaattgtaaacttctctcaaaaactcattatatttgctatgtagaattcaaatttcaaagaaagaacattttataaacccaaagttagggatcataacatgaaaagggtttcgaacatttaattacatttacagtttatgtgaaaaaaatttattattgtattctagtagcaaaaataatttaaaaatataaataatttaacttaaaacaaaaaaataacctgaaaacaatataaactcaaaatagaaacaactaatgggtgactattcaatggttacatttttattgtaatggttacatttttcagattattaataggtagacattctttttttagaattataattaattattttttaaaataattaattaaatatttaacaagacctcttttag

SEQ ID NO: 225503 - DNA, 2494 bp, Cannabis indica
aaaaaaaaaaaaaaaaaaacaatgtatgtgatgtacttctacttatttcgacattcaagagacttttagtttatttttttcatagtcgtatacattataattatttaagacatcctataaaatttcaaaaaatcgaaaatatttaacacgccgaaaataaaattcaaacggttacactccactcttttatttagagaggtgtattgtgatgattttagttaattaatataatattaatgtaaaatgtttttttagtataaattttagtgttgtagttaaagttgtaatacttgttgacactaaatttgatgatagtgtaacactaaatttaatgagaagagatactcttaatgttgatcaatcactaagtgatcgcattcttttaagtctactggcatctttaatgttggagagctacccctctgtggtagccttcttttggtttcaatgaagttcccaactttgccaaaaaaaaaaaagaaaaaaacttcagcagcaatgtaactttattgtggggctagttaaatcaaaatagtgttgtatagaggatgtgtaagatatgttgcacaaccactcaaaaatgatctaaacataccggaacaacaacgggtaaggtagagaccaatgaatctcagcactagataaataataggaacaaaagaaagaaaaaaacaggtctatgttacaaacataaatgccaacatggccatacaattcatcaaatatctctaaaacttgaagaagaaaaagtaaaacttcttaaacattcaatgtgttaagctgtgcaactgacgctggagatggttgtaccattaaatcagtgtcatctaattcctgtgactgaataggtatatcctacaatgaataaaccatgagatttgagttcagtgaaaactatgaataagaatcaatcaagttgtttgagttcaatacctgtgtttgtataagctggtgcggttgctgatcttgagccaatgtgtaagcttgtggttgagacattctgtagtatggttctttcagatcaagtttgcaagatgaggtttgaattactcctccttgatcggcaccggggccccacattttggctgttgagttagagcatagattgtcagtaaaccacaacactcggtgaaagcaaagcaaacaacagagaaggtagctttggttatgaagaaaaaactacctgacaacgtcaaatataatgtgtaactttgagcattatgggcaaccattcggagttgtccggtaatttcttgtccagccatgacataaagaggctgagaaagaacacaacgtaattggtaccagtgtgttgttggtgcaccgggggctgtggaaagccacctttgaacagtactgcagatcaaacagttcagaatacatgagaaaacagctcatttgcttatacgaatgtgtataaatatatataagagagagagatagatcagataatttacctcccattaaacaagacatcaaaccagcatgcgagtccatgcactctagcacccacagaggctatgaatcgcagtggtatgtcaatttcatacaaatcctcttcctgcaatgatgaattaaatggtatgtatttttattttatttcatttttatgcggatataccaacaaacaacataaacaaaagaataaaatcctaagtcagatgaaaatcttggtaaaaatgagaagcaattcataagtaatactaataccttgactttagtgaagtctatcaaatgagatattgaaggagctactaacaatcttggatcaaaagcatctactacaggctgtacaaaaacccacaaaaaatagaagctttagcaagacagaaataatcatgaagcaaggaaaaacaatgtctagagctaacaagtttgaaaaaaatgctgatcaatgttctccagccttaataacaagcacaagaaagagattcccagaagaagtacaattttatcccggtatttgatcagtctaaggtgcatcacatttgatttagttcatactagggagttaaatttgattatctcacccaaatataagtagatgaacaccaatatttgatttaaagcattaatattttaagaatctaattcaaggatcagcacaactgatgaaaatgaaaccatccaaaaaacgtccaatgcaaactaacagataggaatgaccataaacacaaaccgacaaatttcaagcagggacacggctgaactctattataataaagatgaatatcaagctacaaataatttcaaaactactgcaaaaaataaatataatattaaataaaaatagtaatagtaatttgaacagcacttctctaacagaaaatatatggtaattttcaaacaatgattaatatggacctgtgaaaaatatccttggaatgctgatccatgcaaggctgttaaattcacaccataataattctcttgctgccagaagagtgcctgtataaataagtaagaacatttttgattaaaatttgcatctccc

SEQ ID NO: 225504 - DNA, 3022 bp, Cannabis indica
gaactgaaccaattttagaaaatcctcatatagggtagcaaggcttttccaaggggcccctatatgacggtctctcctaatctggtgtcccaataattatcagcttgtccatacatgctttttatcactttatgccataatgattcagtttccagtgggaatctccacaaccatttcataaaaaatgcttattgcgtttttccaaataacttattcctagtcacccttagatacgagatttacatactatatcccaagctaccaagtgtcttgatctagacaaatcaactccttcccaaaacaagtcctccattagcttttctaaagtgagaataactgcgttatgtgctttaaactaggacagaatatgtgtgggaagcgaagacatcagtgattgtataagagtcaatatgccttctctaaataggtatgcactcgtccatccatcaaggcctacttgcaattttttccaacacatgctcctagaaagatgtcctccttcggttttcctccttggggtttcctaaacacttccattaattctttcttcacaactacctcccagtttggttggtaatagccattgtacatctatctggaccaagggctttctcccagaaagatgtcctcctcggggtttccttcttgggttttcctaaacacttcatctggaccaagggctttctcccagaaagatgtcctcctgggttttcctaaacacttccattaattctttcttcacaactaccacccgtggacttgttgccttcccacaaataatccctcaacatcttttccaatgctttgatcaaaacttttggcgctttgaatagtgataaaaaatagatcgggagtgaagatagaacagattgaataagcgtcaatttgcctcctttggataagtaacatttctacccatctaacctcttagcgcacttatctaaaattggttcccaaaaactctagtttcttggtgatccgcccaaaggcatcccaagatatttcatcggccagcttcctacctcacaccctatcatagaagcgtattgtaacaccctcctctcattcatgcaaatccccttggcttttactcaaattcactttcaacccagaaatatcaaaaaagacctccactaacctcaccatttttaataacgagtcctcatcataaacaaatattagggtatcatctgcaaattggaggtggctaacttgtattttttcttttcccaccagaagcccagaaaagttacctgattcagctgctttctccatcattctcccaaggacatctactaccaaggtaaacaggaaaggagataatgggtctccttgtctaaggccccaagaaccgtgaaatttttccctcggccttccattaatgaatattgagaaggatgtcgaagagacgcaccctttaatccatttcctacaagtaactccaaagcctttgttacgcataactgaatctaaaaagtcccactcaactcgatcgtaggctttcttaaagtcaagtttaaataccattccactcttgcctctgcttctgtagtcttctactgactcatttgctatgagaatggagtccagtatttgtctcccttcgacaaaagctgattgagtttccatgatagtccctccagcactcctcttagcaatgatcttgtaaacagttgttatgaggctaatcggtctatagtctctcactttgcaactattaagcttttttcgaatcaagcatataaatgtctcgtttatacttcctcgaatagttccttatctttcaaaagctttgaatacttccatcaaatcttccataatgatgccccattgagaatggagcagagccatgccccggagccttgttaccttcacaactgaataatgtatccttaattttatcttcttcaaaaagtctttctagatgccttgctgaattctctgtgattgcttgccaattgataccttctattctcatgacccttctctgtgtacaagtttgagaagaaggcgatgatctctttcaatatgtcttcctcgttttcaatgatcgatccatcttctctttcgatccttgagattgtgttcttagcttttctcgcattcaacaagttttgaaagaatcttgagtttgagttgccttccttagcccatttacacttaggttttagccaaacacttctttcttcttcaatagtgagtctttgccactcattcttaacattcttcctttcctccgctagagaagaattccactcattggatgcttcccactggtccagaaccagcagtctcctctccaaaacattcttgaccaactgattgttgtcataagttaccttgctccattctttgatgttttcttttactttctttagtttactcatgaactttgtccctgcctaacttactcattctgctccaaaatttttaaaaaacatcttgtgttccaaccaaagattatcaaaacgaaatgggctgggtccccatttcggcaggttagagtcaagaaccacatgactatgatttgaaacaattcttactaacatttcttgtctcatagacgggaatacctcacaccaattgttggtaaaaagaaatctgtccagtctacaacaaataggcttttctctataattcgatcatgtgaagctgccattgttcagttttgggtctaataatttcaactctcgaactaattggtcaaacatctttgattcaaaaaaaaaaaaaaaaattggtcaaacatcttcatgctcttggtccaagaattactatgaatcaccacattaaaaacattaaaatctcctcctaagcaccatgaatctccacagattgaacttaaccctgccagttcatcccaaaattctgaccttaatttataagagcatggaccatacacccttgaaaactaccaccgtctacgaccttcatcctctattaaaaccgagatagagaattttcccaccatgggcaccttgatacttttctagtatcccacacaagcagcgtccctcctgaa

SEQ ID NO: 225505 - DNA, 2665 bp, Cannabis indica
ataaaacattattacaaaattatataaaaatattgaagctataaaagacacataactttagtaattgtatcattaactataaaaataaaatgtaaaaaaaatgagtacaaatttgagtatgtataaaaaaataggttgaccagaataaagtatgacacaaatctaagcataacacgaattttagcatgacattatggtatagcacgacacgattagtattttttatgacgcaacaccacaaatttatattttttttatagcacaagacaatttatatatttttttattatgacaggacactacataatctatatttatagcaaaacatgcaatttaaccttggaaagatgattaaaaaagaattcaccttgaaaagaaaaaaaatatttatttatttttggcaacagaaaataaatgttttttttttaaaaaaaaaaaagaaataaattaatgtttatttgattggtaatttaagagagacagtaataaagtagggttcgtaataattgagctctgccttttccctaaaatgggttcttcgacgaaatgggcaaccaccatttccaccatttcttcttccttgtatttccttctcattattctccaaattccactcttcaggtactaatatctccccctttcttctctctttttcttgatgcttacagattaataatgctaaaactttgaattaactcaactttgaaacccccaaaaaaaaaacacgaaacaaatgtggagttcctttctatttatgtttggcttctaataagattcgtaatgtataagtttgttattattatatttgatttattgtgtttttctttacttttcaatcattagcactgttcattatccattaatttattcattattcttccctgagaaaatatattagtacaaattgaatctgggtattgaaaatttgtcactagtatatattacattcacttatctattaatgtgaattgtttttacatttgatatttactgattaataataatgctgaaactctgaatcaaatcaaatttgaaacgaaagaaaacacactaaacaaatgctactttctatttatgtttggtttctaagaattttaaatgtaaaatgcatttatatcttgaatatagtttattattattattattattattattattattattatttatttatttgatcgtgcttttttcaatcattagcactgctcattatccattagttaattcatttattcttccctgagaaaatttattagtacaaattcaatctgggtattgagaatttgtcaccaatatacaaaatatagacttatttacacttgttattaatgtattattctccttggagaacagggttccttgtagaactggaatatgcagagggccattagaggtgacagcctcacacttaattgctaccgaattgttcccttcagttgcagtgaagactgtactgtaccctggggctattgctcatgctttctttaacaacaaagctataccaacttatcatcacttcaagaagtcatttacttttgtctcttttaagtcagccccagtaacttttgatgatctacaacgacttgaggtcagtgcttgatctatgcgtttgaatcatctgttctgatgtcaattttcatcacatttcataaatggtaatggtataaattatatgaggaaatgttgaagggtttaaactatgctgcatgaaaatgcaagatagactctgatagattaggaattatgctgcatgaaaatgtactacaactagtaatgttataaacatggtctaagttgaaaattgcaatttcttactttggctctatcatcatcatcaggtccttgcaggaagctatttgtcagtggctggagcatttgcatgtctcataaaaccagggagaatgagcttctttgggacactgttggtcatgtggggtctggctagagaaatgtttctgagaaaatcaaccaacatttattctgggaaagctgtccttattcatcctgcaatgttcattgctctggtttttgcctttttgtcaataaaaagggatataaggaagatctttcgtagtagcaaaagccgatccgttatgaaagcaaaacttgtataaaacttgaggcagtaaaaacttgtatgaggaatcacactagttttagtttggattaatgatatataaatgttaataactgatctctatgtgactctgactaaagaaatatattggagacaatgttcttatgttttgtgttcattttgctactcccctccacagaagcatcatccatgtgtatgtgtttgtgtatgtatatgatcccactttgtggcgaagtatgagggtgtgtggggtcatgaacccaagtttttttttttctttttgctcctcaaaatggctaatcacatgtgggccataaattgctacagacaacatttattttgggagtggtctaaacttcaaggtaagtctgttataatacacaccttgaaaaagattgtttgggtagattttttatttatttaggacatgataatttttattgctaaaaataaaatttaaatattttattgtatacttattttttttattatatatatatacatatagtaagtaaatatttaaattttaattttagtataataaattattcagaattttttttaaaa

SEQ ID NO: 225506 - DNA, 2726 bp, Cannabis indica
accttgaagagaactttaagaagatgtaagaagtgttagcatgtaatattattctttgtggtgtgacaagagagagtgaaaaagctatgtgaagaaatattatattgtttaaaattatgaacatgcaaacaacttgagaaaaagttaaatatcttatatagagctaattataagagcaatttcacaaaagatatgtcatcacttaataaatgattttgtttggactttcataaagggtttgaaaagtcacattgtaattagaattagatgtaggcttaacttgataattataagataactatttgatctttctttacttttagagttagtaatatgagtcacaataccatacgatgatgacaatttcaaaatgtcacgaaataaataagtttgaattatatgtttaataattgtgtcattgtgtcacgttcagatttcccttaattgtgttgtgtcaatcatagtgacacaatacaaatgaacttttgtaggtttcatatattcttttagtgaaaattcatgtatatcttgataatcatgatatcatgcgtattgtatttatgtttgagtttttgacacgtttaatgtgtttgtgtttatcttaatcgtgttatgtcacaaatgtgttgatacgaacacaacacaataacacaaattgcaaaccaaccttacttgcgttacctaattaagttgttatttcttgttttgtaatttagtattaattagttggccaaacttttgcttgaccaaattaatcattattgcccttccttccctacttattaatgtagagtttgacaatttaggcacattttcaatgcctcttgtgaaatttttgcccatacaaataataattatcttatggtattatttcaactaaatgggtagcattaggatatgacatgtgtgtggatattttttgaaatatttataattgagtactatttaactgattatattgaaaaatttaagcaataattgggtaaccattttatactaatttgtaagaatttaagatatattattataaagaacataaagtatcaaatgataaataataggaatattataaacaaaacttgctttgagtaacaaaatcttgaaatgaatttgaaatgaaaaattttgcgaactcatatttgtttttttattgaaaaaaaactttatattgttaatagataggatggattaatattgaaggaaataataaataagtaactccattcaagccatatattgaatgctaattattgttatttaattcatgatgagcatttattcatttataaatagagatatagatatgaatatatgtaccaattaattatatgcagatgtactttaattatcgaattctacgctatataatttaatttaataattattataaaatatcattaatcatacaccaccttccaaactaattttaagggtaaacaaggtaggcccacacctaaggacccccaccctatcgaagccccaaaaaataaaaataaatttatttttatgttacttaatataataaatatttagtacaataattattgcattagatgataacaaattaacaacgcaatagcaagcttgtttcttcaaccattagccttttggcacaatacaccaacaagtttcaaaccactaacctctaccattaaatcagagaacacaactaatgcttaaagaggataaatattcttatcacttataatagatcattggttaaaacattacttattagaggaaaacattctaagaattaggttgtgatacttttttagatcatttttttggacctttgattctcctttacaattttttcgactactctttttgaaaggagccccataattttatgttgttttgggctcctattttctcaagcactgccctaaccacacctctatatgtatactatataagaggagagaaatgaccctaatcgagggatgatcatttggccctagatctacccgaaggcacaaactcgagaactcaaagcttttgttataggaagaaattctaactattttaggaagtaattgaaatgatggtttcacacttgatctaacatcatgttgttgcatgcattatagtaaatagtataataaattgatcccccaatagactaatttagtatctttatttcatttcaagtcataactttatttttgtcatagtaaaatctttatttcggcagtgagctgattgataatattttggccataactctttcaatattactcataattagatgattcaagatgttttggaaagatagaggagagatttataacttttattcacaatatttttcttcaaattgaacacgttatagtcaaaatttaacttgaagcttcagacttgattttcgatcacaaacggagcgtattgagcattcaaaatttagaatttttttaccatattcatctcatttaatatgtttcttctcattttcaattcacattatgaattttaccatttaagtctgaaacaaatagaaaacaagcgtaattatgtacaaaatgaatataatcaattgaaaacacacctctaaaacactttataaaatacacctaaactagcctatcactccacctcaatctggacattctcatttgatacatgttcactgtctttagaaaagctcttggttctcatggccatttcatcttccttgaaaacaatctctacaaatcatgcacttcttgaatccaggttctaagcac

SEQ ID NO: 225507 - DNA, 2680 bp, Cannabis indica
acaatataaaaaagatataaaatctaattttctctataataaatcgctaactaattacaaaatattacatatcaatatgattaaacaccttaagctttaaaataacaatactcttataaatatgggcataatattaacacctatcaagtttattaagtcttatttaattgtatccatgattggtttaagacttaaattggtcatttttctagccaaaaggaataatatgagcaatatatcatgatatactaaaaaagttaagaattagtaacaaaaatgtaataaattgtgactagatgtgtttttataataagtcacttgatagtaataacttataactaaattttgtaatgacacttatatatagttaaaatattaatgtgttgtgaacttttttgtacttatatataagtaatcaaattaaaatagtgctaaataattagttaccaaaattagtgtgacttgttgattaatatatactatagtgatcattagaagatttagcatgtgtctcacaaatcttattaattatatgttaaatattttgaagtgtatcttatatagtatagtaggatctactactatatatatatttagatgatgatggtatattactaaatctagacaaagattaataatttagatatgattttattttttcttcttctatcctcttttttctgaaaaccaaatcaagaacagaatacatatattctcttatcaaaatttcaacacataaattaggtgtttatgtgttgggagtagggagtgacagagaggcaaattttggaagaattctcacaaagatatatttatttattttgatagattttaataacaaataatatatatatttatttatttatttaagatgaattttggaaggaccacagccagattttcttctgaattttaaatacccaacaaagtgtatgcctctctggtacaatatccagcaaagtgtatatatatgtgttagttgttgcaaccaaattattcacttcaaataaatatgagattattattatgtgttggatttatgagatctaattattaggtgtttcagatctttctaattatgtgtctgggattttacagatttgtttactatttaaaaaattgtatatgctttttttttcttcttcttgggatgagcataagactttttatgctggttttaaagtcacaaatttataaaatatagaaaaaatagtataagataggtaattgcttaccctaagaaataattggttacctttaattgtttttttttttttcatattttttgaatttgtctgataatatatatatttcaaatatattcctatgcatccattgaaatttgaaaatgggctttttgttttttagaaacttataaaaatattagaatttggattaatttttacaaaaatattgtcacacgaaaatctttttaaaaatactgtagttttataaaacaacagtggaacacaaaataaaacaactaaaaaaaaaacagtggaacaactaaaaacaaccattaaacaacagtgaaaacttaattatacagtatttttgaaaaaaattccaccctaaagtataaaaataaaaaagttaaaaatttcactatatagtgtaattatctttttttttttagaacaaatgaaatggagtttaaattgacgatcaagtccatttgtgaaaataaatttatttttaatatatttagaagaaattacactacgattttaaaagttatttatttaaatatgatacttttaagtttgatcaatttatatagtatttttttgtttttaagtatttctatgatatttgatatgctatatatatatatatgtaaattaggtttcaaagcccatatttaatgtttttatttatttttaggtagtttatttgatgaagaaaccaaattcttgatgaaggatctttggtgattgattttgatcacatgagaaactaaggaatttgaatcgcaggatagataaaaaaatcttgtgtggctggaaagagtagtttgatttttgtattttttcgagcacctctgttttactgtaatagagttgcttcaaaactggatttataagttttttttattaaattttacttttatataatcaacaccagtttcttaatgaataaaccaatttcttgatgaagaaatcagtttcttggtgatttttccggcgacaatgctaattctgacgacttttccagtactagcagcaactctgacgattttttcgacaccagtagctgctccgacgacttttctgacaccgacagcaaactcctgcaactttttcgtcaccagtggcaactctggcgatcactgtagtttcatttgttttattttttaaaaaaaaattatgagggaaattttaatattttttatggtaatataaatgacatattccatgtatgttaagcatcatattgacaaaggtcggtcctgatatcgaacgggcttttattccgttctttatttaaaaaatatgtaaaatttttaaaaattattaaaaatatatatattttgtaaaggataatattttttattcgactctagtctggatggatcctaagcacgcttagtattcttttactaaatatagttgggatttttacactatatactaaaattttcaattttttttctttttttattgtggagcagaattttttt

SEQ ID NO: 225508 - DNA, 3636 bp, Cannabis indica
aaaaataaaaatttctccgtgtttaacgtatatatttttataatttttttaaaaattttcttctatgatgtaaaagtttcaaaaattaatatgtgaaataatgcgctattaacatgtgtcatgcacttttcttatactttatataaatatataaattggtgatttgtgagttttttatagttacaaatcggcaacaaaatttgtaattaatttccctgtaatgttacattttaaaaaaattattgaatctgttcacatcttcgtttatttgacacaatttatttaatgaacattatgttatttttgatagatttgcaatcacacatattatacatgttattattatttttaaaagcattatattatttataacttatatgacagtaactgcattatataatatcgtgaaagaaaacaaatttggtacttatctatgtaccaaaaatagtaaaagtactaatgtaaagtagtatgtgattaaaatggatcaattactattctccacctttaaagaaactattttatttattctgagattcagacgagtgtattccttctctttgctaaactaaaaggtcatgcaatggtttgtaatgatttcgctgtcatcaaagaggtccaaaagtattgccgtctcatatatactccaagcactagtaggatgattaataacaattaatgccatattgtcattcttgtcttaaattagacataaaagtgaaaattttgtgtctgtatatgattaaagggagagcaaagctacttataataagcaatggaaattcacaacaaaaatcaaactagttctccttaattattatacattgaccaaattatgtgtgtgaaaaaacccttagcttaaaaaattctaaatatatcaaggttctccacaacaaaatattgaaggaaaacgtgctacagtgagaatgctgaataattataagagtcaacaattagtgttatgatcataataaaagcaaagttaaaaacttataacatatttagctataatatgatcttcaattaacctttattattaaggctaattgtgtagcataattggcagaagcacctcaagccccacagcctgcgccacatccggcagcacagccaccgccatagagctcggtatctccttgagaggtcttttctttagacacaccgtctgcgcaggagaagattatagttgagagaatacacagagtgaccaaaaaacctaataaaaagattagaaaagcaccacttccagtgcctacacctccatccacattggctacctccctccataatctcaccatctatgagttatatgtaggtgttgttttcactttcgattcctctaaatgggaagtgagccagcagtttccattgacggacacttatatataaattttttatgataaaagtcaatgttccaacatataatatttgcccaagggtccaataatttagtggggggtctttcttgtcctctctttcctcctttaaagactttgtaacatgattctccttgcctacaatagagttggcaggcaaaaaccatcagagtgttgacatgagattagtggtcaacatttcacttaccatagaaaaactgtattcacggttctattgcactacaaaaaatttacattaagtaagaacaattttttagggtaaaaaaattaaattgtgacaaattaaaaactttatttatagttatatttgtaattaaaagtactacatttatataaaaaagtgtatttttagtcaaatcaaaacttatgactaaaaaatatttgcatgtgactaaaacttctatagctaaatgtattagtcacaacaattatatttggttaagactaaatatgttttttagttacaatatttatttgtggctaaaactaaattagtaacaactagtatttaatgaataatacattttagctacaagtaaatttttattgtgaatgaaaattatattgccactaaaactaaaagattgtgacaggtaactttttttttgtatttgtttcgtgtaacttttagtcacaatattttgatttaaaagtttttttttggtagtgttgggatttttctctctttacatctttatcccactctatttcttgtcatgaaaaatgttgatggtggaagctgcatgagattaagctgtcactttggagagtgacagccaaataggaaatatatgtaatcgatgtatggagtgtaaagtcagagcacactttagtagaatgaaacatgatttgggtaccccttttcttaataattcataataattaatttggtttacgatgcacattgggggaggctggaactagtccaaactctttcaaaaattatgcatggtgtcccattaaggatttaaaatgcaattattggtctaagggagattcctcttcttaacatgatccgccttatatctaaccacgacaataacaaaataggcgatagtatataggattttatatctaaatatataattatatatatatatatatatttatatataatagttcgatttgaacttggattgtggatgccaatttagaaaagaatagtattcctagtaagaatacaccatactgggttttgattctattatttaaaagtgcttattttcttttttcttttatatttagtattatttcaccggtggtgtgggattcaatcaattttgcaaagggacattactaatatctaattaggcttcttgctcctttctatgagctactcacattttttatagaacatatcaacacataacaatcactcattaaaataagaatttagaattgagagatctaagctcaatacctcgtatatagtatatatatatatatatatatatatacttggaaagtggataaagaatattgcattttccctattctatttatgaaaaatgtgcttgtggaaaacgccgtttgagatagtatagatatgtatgtaccaactcttgaatcccctttttacatttggttaaatatgctactaaagccgaattatatgaagaagaaaactcaataattcaccactcatgttttgttcttatgacctccacgtgaccacaatcttagtggagcattatttattattatttcccattatacaatttcttgttagctcaaatctcctattaatggattatattctgacatcgacgaggatggactttattgcatgtgttgtttatttcaatttcttcagttttgtatgttatattatttgataataaattatatgttggttaaaatgtgattttatatattatattatgtgaataataagtgtattgtaaataaattacattatatatgtatttaatttatttttttataattttgtaatgtaaacttagagagatattataatttgttatctatggtaactcttctttggttgatcacacaaatgagtagtaggaatttaaatctttgtttatatggttgttaggaataatggagttaaaccagctcaagtggtcataggagagtgcgtggtgttgaaggtcctgggttcgagtctcaggttatacatgattgtaatatataaacgcttaaattaaaaaaaaaataggaataatggagttattacatgaagtgtaataagggagttattacacgaataagttgt

SEQ ID NO: 225509 - DNA, 2780 bp, Cannabis indica
acacacgaaagaagccacggggaagatggtgggtcagaatacactagacccgagatgtggttaagcgagcaagagatacactcaaaactaaaccccgatttccaagccaaaataatacctcccgcatgattaatagacggaacacaaatatgaaagtaaaagtgtaaagcctttaaggtacgtaccagaggattagcatccactttgagctcggaaaggaaaacaaaatccggagagcgagtctgaatcagggacttcagttcccgaactgtagaggtctgccctaaccctctacagttccaagcaagtcctctcatggctcctgtggaggagattcaacattctcctccacagggttgtgggaataagcagacccactcgaaacagattcatcaatcacaaaggaaccaaccagcgggttcttcaagataccggaacagctcggggagctagagctgtcctccgaaggatcatcaatctctaactccaggtcattctcatttttcttagtgtcccagggaaaatcacgaacaacatcagggtacttacgaggaactttatggggccgagaacatagagaggcagacgcttcaaatttccgtttcttgaacggagttgtacgctcattgacttccgaggaagccgggaccccaatgtcccctcctatgttccgaatctcatacaagtcaagcttcccaaaatgtttaaggtcatgcaataagccttcttgagcattaaaaaattgagttaaggcttgatcctcatttataagctcatgggccccgagaggaggagtaggaagataagacttagtttccacttgttttccttggtcattagaaatagttgccggcccaagagggattaatgaacttcccatagcacacgggcccaccaaaccatcttggataaattgccagctttcggcccacccagagaaccattaccatcaataaaaggaagcccattactcacattattaaaagccggcccattacccaaagacccattaattacatcctgctcacccacttctttatgcggcccaatagcacacggcccaggatcattaacggtcaataaatcctcaagagaagcattgggagtcacaccagccgtactctctgaattcaaattagctgaagataaaatgggtaaagccccagagttctttcccttacccatttgaacagacatacctccatagccagaaatggaagttttcttctccacgcctgaaggacgttgcttcggatgccacaccgcgtgctgggacttcccaaggttagccgaagttcgagccgtccctatcacaaccccgcgcggacgtcgagaagaggtagaaggaggtctcagccctccagattcaaagtcgcctgaagacgccggcaacagtaacacagtcccaccatcgttcctgccagccgaggagattgagtttcgcgagataccagatgaagggccagagaacacagtgagataggaggattgaatggatagccaagggccaaacattgggaaagggatcccgtcgacattcgcaaccgtcaccggcgacgaaagggtacagcctctgcgctggtgccccaaacgccacagaaataacaaaaaaataccaatcttttcatatttcatctgcacccatttcttcaccccagaagctacatcaaagaagcaacccgaaaacagggtttatcgatctcaatatcaacctgaaccttgagaaatttgttccaagacgccggcctgtcttcctccaaatcaacttggacgaccttgccagccaacccccctagcaggctaccattagccttggaaaaatattcgtggggaagattgtgaatttgtaaccaaacacgcagggagttgaagtcaatcggacctttactagacggagtccaggcttgaaggagaagggtgtacccacggacacaccatggtccattatcgagggcccaattcctatgatcaggggactcaaaaccaaacttaaagacattggaagtctttacttcatccacaatagccacaacagacactggtattttccagtatttgaccacaaaatcagttacatttacttcctcaaccaccatgggagcaacaactttcccaaataaacagcatgatgccagtgccttaagagaactatcagagggagttaggttgacagaggtttcaaggcaagaaaagcatttgcctttatgaggggaggatggagtaatgattgacgccataaatatctaataaaggagaccaacaaaaacttttgacactgaagacaaactcaccaactcgaatcttaccaaccacacaaaccaccaaaccgagaaaaacacactcaaaaacagagaaaaaacacactcaaaaacagaaaaataacacactcaaaacagggtaaaaaaacactaacccaaagaaaaaggcacaacacaaggcatttagcacagaagaggcatgacagaaagacactaagggaaatgaagagagtagatgaaaccagggatctaaggagacacaaagtggacaagatacacacacactatggatacacgaaatgaaaaggatacacacacactagagagacaatagaagaccatctctctcttttccttccttcccccacttaagataaataaacttaaaactaggatatttatggttaggatattatcatttaaaaaatttatagtatcctctaatttttttgaaatttaggttgttaaaccttaaatattttttactaaaaaaaaaaaaaaaaaaaaaaaaaaaaaaaaagt

SEQ ID NO: 225510 - DNA, 4096 bp, Cannabis indica
ctggacgtgggttagtattttacttcagcatttttttgttgactgatcattgccaattagctttattttaaaattcattctatcatttgtgcagaaatgagcttaagtgggaaggtgctggtcgtgggaactggggaacacccacagatgaaattgctccgtaagtttttaatctcttggaatgttggactcttaattagagaggtagtactactttatgcttaattactatctgtgcatttatttctcttctcaaaacagggaggctgaggagcttgttgctgaaactgaaactaagaagaatgttgatgttgagaagccattgagagaggaggaatctcctcatgccaacaaggatagtcctgtagctaagccagaagagaaggagcctgaggacaaggttgctttcattattctttttttattcgtattcaattatgttttatgcttcaagagaggttatcgagtaagtattcttaattctttattttttactacttcatgttaattttgaggaggtttgaaagataagatcaaacaatcaatttaatgttgggaaagatgtttttgcctgtaaggctttgaatcgtactaaactacaatatgttaggttgattaatgcttacacaatcctaattagagtgttgtttgagtaatgatccttttgtttttgttgatgaaaacctaagtaatgaacttatttgtgcattgatttatgttttggtattatatattattttattacttgaaaaggtaagcctttattgtttatatcagaccatgatttcatattgtatatcttgtcaggaaatgaatttggaggagtatgagaaggtactcgaggagaagagaaaggccctggttactttgaagacagaggaaaggaaggttgatgctaaagagtttgaatcgatgtagcagatctcatgtaaaaaggagaatcatgacatctttatcaaattggtatgactttgctgttctatttttattaactaaatgcctcatatagccaacttaaattgtatttgtatttagtgggtatttatatttcagggatctgagaaggataagcacaaagaagcagctaaaaaagaagagaaagctaagaaggtttcttcagtctcgtcctatttattgggttttttattttaaaaatatgcaagtgcaaatgcagggtagttctatttcattttttctcttgttacaaacataacatacaattggattattatttggatgcagtcttttaccataaatgagttcccgaagcctgctgaaggtgagaggttctattctggaggccatggacgtggtcgtggctgtggttcaagaggtggatatggcggtggatacactcctagcaacatggcagccccatccattgaagatcccggacagttcccatcccttggcggtaaatgagattctgctagtttctcccatcagctctaagtttcaaggtgccaatagccaaaacgtagggtattatttttagttattttattgattttagtaatatatacaagtaatgttaaagcaattttttttaagtaatgttaaataagggtaatgattgggattatgaattgcatactatcaataagacatatatgaaaacaaaacaagtttattaatttctctgctagtcaagtaataattttgccttttttttttaaatagtcattttgtcttttatggtatggtaattttaagtagtgcatatttatctaagaaatcagttagtgaattagttgtaggtttatagctttgaaactggttttactttaataaaactgtcacagcttttggtgagaactgatgtaatacctctggcttgttgaaaatttaggacaaggatattatcaaactttctgtgactcttaaattatagtatggagtaagctaccactaagttatgcgaaggttatggaattgagttccaacaaaaaggaaagaaaagaaggttatgggattgattagtagagtagggaatctatattttaataggtcaaaataacaaatttctatttgtagaggtactaaatttgtgttctcatccctcgataaacatgttgattttgatataactatcacagatgtactcttctgtttctctccaggggcattattatgcatttgatcttcctcgtggagtacatgaaatacttgagttattgcaaggcaataagtaatgtagtgctaatttttgtcaacatctgttgcttgctttctagtcatctattctctttccttccactgattcttttttttagtaatttttactctagtttggaggtttttgtatactcagcagtttatctgtgctataggtagctccatatgaacttcatatcttaacttattttttttcaattatcctcaccacctgccaggctagacaagtccatgagctcaaatttttattgtaatgcttgttagggtgccaaaagggtgtgtaatgcttgttataacttataattgcgctcgtcattcatagagctatgctatcatctagtcatattaaattagatttgatcgataagttttttttagctcaaccttcctttgtttccttagagaaccactctcataattaattgctttagaccatcctttattgtaaataatatatggtttggtagaaatttgataatgtaggtaggaaaaattgcatgaaaatttgtaatttttctttacctacatttatgtttcattttataaccgacgtaataggtgaaaaaaaaagtattttagcaatttatgtgtcatttttgaactaacattataagttttttgtgacggtttagaaatgccacaaacaattttgtgtcatttctagactgacgcagaagataaaataagtgtgtatattttgcgtcattttttcaatgtagataattgttttttgcgtcatttcaaaaataacgctaataaaaaactatttgagattatggcatacacgtcggttttataaactgacgtaaattctttaaatgacacttaaaaactgacgaaaatagtatttttttttgtagtagtgagctttttggcattatcagatctaaatccctttatggtggtattaaattgattttgaacaagttaaaggatgtctagaatggttattttggcttaaataaatgtatccaagtgtacctagaataatcatccactatagtaacaaaatacttatatccttcacgtgtcaaggtatggaaaggctcccaaatgtctatatggacaagctcaaaacaatgttttgaaaaattgtgattagaaacaaaagaaagttttcttagcttggcataatgataagtatagcaatgaaaatcagaacaaggagtgtttttgaaatgtaatcttttattgataagaaaatttttgatacttgaggggtgacccaatctataatgccacaagttgtctacatttattttttaattagaaaaagacataacagaaggagaaaaatcaaattttaaaatcaaatttccatggctttcacccatcccaatcctttggttcttcttggtgtcctgaatgacacaaaaaccaccaagaaaagggaatgaacattgtgcaaagggaatgaacattgtgcaaaggaccgtaaagttgtgacagaaagtaagctatacttgaaattaggcacataaagaacatttgtccacaaaatatgaggtgaaatagaaatagatccaatgcaatatatgtttctagtagtcccatcaggtagaataacatcagaaaatgataaatttgacttaatatcatgaaatatttcaagatggggacacacgtggcgtataatcttagtatcaatgacctactattaaataagattgttcttaccagaaaattagatacccctggctgattttgtggggtggatgagttgtcattgtggaatttttgagctaagaaagctatgagttgttggcactggtttggtgacagattaggaaaaggatcttgggttcctctagagttatcctcggcaacatcgtcattagttccagagagatttgcagcagccttcccctgtgagtaggggtgtttataaaatagccgatccaatccaatccgcacgatccaa

SEQ ID NO: 225511 - DNA, 2535 bp, Cannabis indica
ttttttttttgaaaaaaagggtattatggtcattccccgacccaatagcaactggcgttgatccccctgacacgcgatccaaaccaaataattaaggcaaaatcggtccgagctaagtttgaacgaatcctgaccgcttatatcgtcttcaatctaacggttgtaattcacgatccgcgcagtttgatattattggccattttgaaagggttgcccactatatatagctaaaaccgtatgaaaactctcacctcattcttaccgtgtcttcgacttgctcgcgctttttcgtactctctcaatacgctctcgctcgggtaaagttttcttctttctgtagatctgtgtgaggataatcaatggcgggtagaggcaaaactttgggatctggagccgcaaagaaggcaacctctcgtagtagtaaggccggtttgcagttccccgtcggacgtatcgctcgatttttgaaagccggcaagtacgctgagcgagttggcgctggtgctccagtgtacctagctgcggtacttgaataccttgccgctgaggtatcccttttttcctcttttatctttcatttggtctttacttcgtgcaatctgttaattaatatcctccttcattcaagaatctagggttagggttctcaaattgggcattaattttggtaatttttcttttctttttctttttttagtcaatcttcataatggaaatattcaatctttaaagtacattaaccattcgactgattttggtactctaatttgaaataatttttagtattcctttacgaggaaaaagtaattctagtataatctttttcagtgcaatagtttggttagctagttaatgttgggtttcattgtctgtattattcaggttttggaattggctggtaatgcagcaagagacaacaagaagacgagaatcgttcctcgccatattcaactcgctgttagaaatgacgaagagctaagcaagcttcttggagatgtgacaatcgccaatggtggtgttatgcccaacattcacaaccttcttctccctaagaagaccggagcttcgtcgaaggcttcaggtgctgatgatgattcttaaatgtctgggaagaagacccgtaaaaagaaaagagaagaaaagaatgagcttcttggtcttctagtgttccactatatcaattgtgaagatgacttagcactctttttcatcatgttctttagggtcagttggtaggctcttctgtgtgtggaattttaattaagtagttagttttatagggcttattcagttagtgattgtgaatatgattctcttccaatgttagttcacaatatattttttttccttcttttgacctattgtaactttctgtttccattgtaagcatttgagctaatgtggttctagattttacttaatgagaatgctgattacgtttgaggactatctgctctatgattttgtggttcttggaagtgaatatcatttggttatgtttgtctgagcatttgggatttcatggttaaggttgagccttaagtaaattgaacagagcagcagtctttttctgggtatgaaaattgaagagaaatttatttgtaattaagttcgtggcattgattaatcagattctagtcgtttaaatgtcatattttagtgttatactgaatgtgtaatgatatgcacaaattttaataatggaatgtcaaatttgtgcctatcaggtggtaaattgagatttcaagcttctaaactattattagactttttcccttttcacgaaaaacttgcagaattgactgtaatttctatgttcagatctgaccctaagttgtacggtgaaatatttcaaaatttgtactcccgctgaaagctagtatcccattgtgtttgggaaatttgattattaatgcataaattaatattaaaatagaaaatttatttacacccaaaagatattctattttaataatttttaagctaattagtaatttttctcaccgaattttgacatgtacatatcttctgaattttttggccgttaaaaattcctcagaactattaagattgttagatttaaggatttttgtctaatttttgtaaaaaaattctaacatggatggaagttcaggggacatgatttagtaaatgatcacctaataggcacaaatttgacaaattatattcgtaaaagacaaattatagtaaatgatctcaaatcataggagtatgttagtatatgtgctcatttcaaaaaaaatatagcaaatgaccctaaatcataagaatatgttagtaaatgtctctattacaaaacttgtagaaaaatgacctttttaaactatttattatttatatggataaatggcggcaaaacttccaatactttcgttttggtttcactaaaccctcataacccaaatttctgcgggtaaacccccaaaaccactattctgttagcaatttaccatttccgtccaaatttagctgttgagtgccatgttggcttgtccacgtggacacaatatacac

SEQ ID NO: 225512 - DNA, 3087 bp, Cannabis indica
gagagcatgaggccgatgtccatgctaataaaggcaaccccaaagaagccaaccatgaaaatagtaaaatcaaacttgtcgactttgaagagatgaatagcctcgtcgtagttgatgaggccaatcatggcagacatgataatggcagatagagcaaccagtggtgtgtggctgaacagaggagccaagaatagcagcgtcatagccataaacactgacatgattacgttcgacattgctgtttttgccccagcgttgtaattcaccgccgtcttcgaaaatggcccttcaattttataatgtaaacactcattaattaattaactaattaatgttaacatatacaactttattataaagtaatgtgtaccggtagtcaaatagcatgaagtgaaagaaccaatgatgttcatgaagccaaaggcaatcatttccttattcccatcaacttgtaaattattcatgatagcaaagctcctaccaatagctattccttcctgtattaaacagaattaattttaaaaatataaaagtacttaattattgacaacccaatattatttatttaacaattattagtagaaatgtagtgtatataccgccaaagcaacgaagcccgttacaatcccagctttgagaactgctggtaaatatttggggtcaaagttcaaataatgaaatgtaagtggatttatgcctttcttcagatcacccacctaaaaccaatgataaagttgaattaataattgtcagaagtggaaatttagtattatttttttttgttcttaaaaataatcttaattgtagtaatgaacatttgtgatcaagacaatttttggcataataaatcaaaagtatgtgttataaatagtacatgcatatggataatttttattttttttcgcaaagtgcatattgataaattaaacataaatattgattattaaataaatagtacatattgataaattatgattaaatgctattatttaatttaaaaaatatatatttgtactagaaaataccttttaattactttttttttgaaaaaatattgcaaaacaaaattgccaaccataaaataaagattttggtcattgtactaaagaaaaatttgccaaccataaataatatatttctgtaggtattatttgtaatgttagtaagtaataaaaattatattaaaaaaaaaaatcaaataacatcaataatcagtaatagcaaaaaaagacgtgtgataattattactttgttaaaagctaattaattacaaagtatggtctcataatttaagagagtgttataatttcttggtgctttgagtttgagtccacacaagtgttgttattaagaagagtgggtaaatttttacttcaaagtttggtagcacatcaacttattagctagagaggacaaattgacaattattattattagttaggattaggaataaattcattgtttgagagttagtaataagagtttaacgtttaattagctaaaaaaatgtgttttggtttgggatatacaacaactaccaccgatttgttgcttagtaaattatatggatgtgttaagtaaaaattttatcttttgaagttttttaaacataaaaaactgaaatatatattttttatatttcaaaaaataaaatatgttaaggaaaatacgtgtagcaaattttaattttattaagtgagcgaatagcaaagagaatatatatatataatagtgtatggtttttttatttatttattttgaagtcagtatgattaaaaattaaaaataacttaattttgtttctataataattttcaaaatttttatttttattttaaaaactaaaataaaaaagtactttcaaactttttttttccaaatattttcactgaaagaataaaaaattattaccaaaacacactttaattattttaattattatttctcaaaaagattcaatattatataagaatcgtgtagatctcgtaagtctcatatatcttagagaaaatcttataaaataaatttgaatatttggtatataatataaaaggataatcttatttttggtagtataaacgtaatacgacaccacttacagtttgtatgccatgctctgctccatggatcaaataagcaaatacgcagccaactatgacaaccaccataggagacatcgcagatacccaaaacagatgtggccttttctgcttctgaaaatcgcgtcgtatatatgtaaatattatataaatgtaaataagagaaacatttatttgtataattaatattatatatatgtaagcttacaatatatctggtaaattgaaggaaaataaggaagattgtgcccactaacgcactctcccatttccactgcaaaaagaagattgactttaattaattcaattgccaattactttacttaagtttcttttttaataataatttgctagttaattataaggtagttgcaaatctcattttatttttggaaaggagattcaaacttattatatacccatctgtccactttctagaaaatttatgatacattttttttttcaatcttccaatttatcatgaggagtaggtaatatggtcatatcattctctagcactaagtgatgcagtgtctatatttcaagtcttctagaattttaacagtacttttgctttatataatttataaataatgatttacacatttccaatttttcacacacaaattaaataataaaaaatattatgtagtcatattttaaaatatattgattgagattaattttatatcatagtgtaatttgagttaattttttaagaatatatctattattacttattataatattttatatgccatcatcataattatgccttgtacaaatataatgattattactttccataataatgttttaagtcactaaccgaaattatatatttgtaactatatatatatcatctatagtcacaatataatgattattttttgtaatgacattactatataagcttggaagtttggatatatatagtgagtgaatataagaaatgacaaaaccaaattattaaaacctcatgtctatt

SEQ ID NO: 225513 - DNA, 2224 bp, Cannabis indica
aactaaggtggtttccctaaataagtttaagcttttgttaagcttattagggattaacacatgttcgtaaaatccttagaatatctaagtctagcaactaccagtgcatatggagattcaggtagaaattattggaaaaaatctccatatacactatagatcaacataacaatttattacaacttgcatggaaaataaaaggaaaattgcaacaggtggccttcgaccttaacaaactctccctgaactaagattagttgcaaagttagttaaactgttgcaactaacttcaacttactctctcagctcactacaaatataaataatagtacactaaacaagaataaaagaccaaatcaaagtattaaggaagagaattacagagctaagtcttggagccctagggttagggctaggaggtccatttctaggaggttacatacacaaagaaagaagagagttaaaaaagagagagataaacatatagaggaaatacatgtaaaagattaaggattaccaatcaattacctgtgatttggattcaattgttgtattgtgttgatccttgaagatccaataggtgaaatgaaccatgcttaggcgagctcaaaagtggaaacacccaacatctttggggaattacctctataaatctagtattttcttttcttatttttctttatcagttttattgctataagtgtgtatgtgtgtgtggtttaatctttgatcaagggagagctattgggttcaatttaaggttgatatagactttaagtttttaaaaaagaaactcgaagctctattagggttttgattgtgttgtacgtgtgtgaaagattcaagctataagatcaatttaagaaactaattccttacaaaagaaattgatgaagacacactcaacaaaccaattttcattattaataagattatttgatttgtaagctaggtagacacatgtattattacatccaacatgaacttatacaaataagaaagacaactgattactcaaaaacataaaatacaacccacacatagaataacacaacaatatttaaatacatcaaagtaaagttgagaattaggaaccactagggttatcacatccttatctggttcccaaagatcatcactagccagtttggttttcttgcaatcacaatttttctaatgagcaacccaattaagaattcgcacccatatcccactgccaccactttccagccgaattgaaatagaattacttgactcgtcttcttcagatgatggaggtggtggttccaatggcttggagtgatttccacaatttggcaatggaataccacataatcccaagtttccttcgtaacaactgctatcaaatgtgataaggtgagactgtggtataggtccaaccagtttgttgtgcaaaacattgaagtactaaagaaaagataatttatccaattcgcttgggatccctcctgaaagggcattttgtgaaggatctaacgattcaagattgattagactactcaatgatgatggaatgccacctttgaatcggttgttggacaaatcaagataaatgagcccttttaagtttccaatggcttgaggaatgtctccatcaaatttattgctggagaaattgatgagtaaaagaatttttcccattcttgaataccatatgccaacgcctttgattgttgttgtaagctcgaaaaaaattgatacccaagcgtaccataacttgttgtgatgctaaaagttagtgacctcatataatcaaagtcttcgtcaatatttcaatggtaattttccagtgaagttattgttagatatcaattacacgcaacttagggaaatgaaggagtgttctaggctcctctatatctgttgtgatattttgcacacgtaagtgcacatatcgttacaagtagtaaactcaccgagagtgaggtcgatcccacaaggattgtagttaagttctttaaaattaaacttctacttctatttggttaaataaaaattaagaaaagattaaaattagaaaataaaaatagtgcaagaataagcaattaaattgaataggaaattatcggttaataagagctagagtttcgacttcaattgtttctattgattatgacttaacatgattatctccctctgcatttgcttgactgaaatcaactccagttcaccttttatacaggctttcagggactaaaaatat

SEQ ID NO: 225514 - DNA, 3449 bp, Cannabis indica
gttactttcagtaagaaaaaaaacaatgaaccaaacataaacgagtagtgcaagagataagataaaaatcatacataccttatctcttcttttcctcttacaataggatgtgaagccctctgttataaactgagaaaaatgatctctctcccgctcctaaataaatattagaatcacaatcactaaatcatcagtaaaaggctcaaatactcataagtgctgaaaattagtcaaggagccaaagaaagattacaacaagaagtcatcttcaggttttagtagcaacaagaacaccacattacaaacaggaccttcaaagatcccccaagtgaattgcattaaatagttcaataaaagtccccaaagtgaaaataactcaatttttttcctaaagtgcattgaatgccatgactcataccgtaatattaaaggctttcgaccacatccatatcatgacttggtagtaaataacacactgaataattttatgtagcaaataggataacataaaacagttatatgtggattcacacatgacatagcatgacttaccatgtaatcaatgcacatttgtcttgccaaatcatatgcttcagaatctccataaacttgatctgcaatagcacgaaatagacaatttccatcctcaagcattcgtttgacttctaaaccttttgcacgtctgacatcaatttcaaattgtcgttctcgttcctgaaaagatggacatatgacaactttacattactgttcaaaccaatcataagctatgatataacagcatcaaattcaagagataagtctttgcgagattaaaaattttacttacaaagaggcacattacgaaccataatgcctaaaggaaataaacatccataaacctaatcaattataaaagcaagaacttacaatatcatcataagaagataagttgcaaggattttgttcatcagcgctattgtacccctcgccttcaacatgagacctaggagaagaaggccgtgatccagtcggtgaagttctagttgaaacaacaggccaggcaactcttctagagggtccaatccttgttgcattagaacatcctgagatgaacctccttgcattagagtttgacgcagacggtttcgggggtgggacaggaggtgggggtggctgcgaagtcatcccaatgacattctgcagagaatccccactcacatcttcaatctcagtttcccctctctccgaaattctcaatccactcaaatttgtcattagttccccttgatccccaacatcatcaccaccaccacttctaactttctcaccatcaacaatttcatcagttaaattctcattctgctcgatattagagctcagatcatcacttttcccaaccttaccattgctaatctcaacaaactcatccacaaccacatgttcctgcagttcctctccaatttcttcatccttcacaacagaaacaccctcagaatgattaactggaggctcagcacgagccgaagctgcagtagcacgactcgggttcgaagaagaagacgaggcagcactagaggaacctcgctgaatcaaaatccgagtcataccgaaatagattaacctaatgaccaatctctctttctcctaattctctctccctaccgaaaccctcacaacttagagacccagaaccttactcatcacaggtttatcccttgctctagccttaggcactgtcacaccaatccctcggctcaaagatttcttccttcctgataccttcttcttctcgcaaaacgatctctgcattcccctaacaattctcatgagacccagacctccaaattttaagcaataaaagcttctaaggtactaaaattttacccgataatcgcaaacaagaaagaaaaagagagaaaatttatattcctttgaattcccaatctgcaagaaacaccttacatttctaagaaaatcaaacctaaaaaagaaaccaaaaatgaattcgaaacaacacaaaattcaaccaaaaaaagtcgcattaaatcgaacgaaaaacacactatcataggatcaattaccaaatatttccataaataaagaacaaaattaactaggaaaatgcaatcaatttcaaaatcaagaaagtaattcaagaagaaatgaaaacttacggaatgaagaaaaatccgttggctatattcgggagatatgaaatcggaagggttttggtttgagtgagaggattttgtagggtttacagagaaaggaatcgaagattgaagatttggggaagaagagaagagacgatgctttgctttgtgctttgcttcttttattttttatttttatttatttataatgattattatttaatggatattttgttctaccatttttcattccattactaccatctattatcaccaagtcacgtgagaaacacgtgtatctttcccaatgatgactatgaaaagagaaatgctaatggtcacaatatttttttaaaaattattttattaaattatataagtttcgatacttaattataccatgacattgagcagggtagtaaagttttttaacaattttttaagaaaataacttttaaagaatttcattaatcaatcgaggggcgttacttatagaggatattaggcatccccaatagcaatgcttctaggaaaattatatggggcaacgctttatgacatcgcaacttataattggttagtgattctctataatttttattaaattaaaataagtgaaaccgatattgaattacaccaataataatattacactttataaggtgctagacaacatgagaccccttagcatttctcttttctattttttttcttataaataattacaaacacatttcgtattttgggcacatttgcagcatgtgtttttgaccacaaaaattgactaaaatattataatataaagtttacagcatcacacctttttacatgaaagaaattacactacatacatcttttaaattaatacttttaaatcaaaattaattatatttattttttttttcaattattctactacttatacttctattattttacgataatttatattcttctctaattaaaattttcccttaatttttctagaaatttatacatttatctccaaaaacacaatatgaaattgtgtcttaattatatgagaagcccaagcgcacataatgactatttgatcatcagcggtatcagaagccttaaagctcgttcaacggagaggaggaattcataggctgttggcttcattgccacctgcgcaagcttcactcattgctcggataaacaatcacaattacttcactcaaaggtacgctctttcatctattttttacagtttttttttttttttttgtttttcttctctgcatttgtgtgatcaatgttaaagtaattgaatcaacctgtgttttgttctga

SEQ ID NO: 225515 - DNA, 2967 bp, Cannabis indica
ctggactcataaatttaaaaaaaaaaaataaaaaaaaaaaaaaaaaaaaaaagaaaccttaaaatcaataagaaaatgcaaaaaaatgaattgagaaagacagctagaaaaaattgacggtaaatatcaaatgtcaatactcaataatgaaaggtagcattactaacaccattacaccttagtgccaatgaaactatacaattgactaacaaatggaaagagtcatctcaagtattgaagcaactgctagctatcgtcaatttctagaagttaggataagtgattatcaaaataaggaagatctagatataaagcttggaaatactttgcctgtgctattagattctagaatctcgattacatgtaatgtctatgcctaatgtcagcacaagagaactaaatttaaacatgtaattcatgttagtgttctgctatagatcaacttactggttgttagcaacagtagagtcaacatgctccaacaaaaaaccatatagcttcttcctcaatccttcaatcctttcgtcttttgaaattcctttcgtaactatgtcatccaaccagtggtaacccttttgagctgtcccaaaagagatgccacttcagtgccaccttcctctcttttcatcccaaaaccaatgcttaatgaatcctccaagtacttcaagaaccattctctagaagcgaatagaagtttttgagctagacttgctgcctcaattaatttgctcccacctttatacagctcatccctttcagtaatcgatttccttgtggctgatggcaaccgccttgacgcagactgagacaccttagtagttaaatctgatgtaagagttgtatgatttcgactttgtctggtagtaggtgaacaactcccaaaattcacttcttgagcattctcaaggacaacataatgggacttctcactctttagaatttcatcctcctcctgctttctgaacagatcaaatgtggacagattagtttctacagcagctttaacccatgatgtggcattattactagcagaaaaataaatgcttggatctgcaccagaaagccttgaattgactatgtaatcaatatcatttgctgaactctgcattttctgattaaggtccaaaaaatttttgacgagtgatcctgcagatgattttttagaagacaagcagagttctgcaaaaatcctgaaatgaaaacaataactatgatctttaattatttggatgtatgagtgagacaaaaacatatttcacattcacatgctgcaaatagtaaatgtgtatcatcactttcatcaccaaactaacaaccaacagtatctcagaaaacctgatcccaaagggaaaagagaaaaggcattgacatacacaaataacagaatagaaacataatatgacaaataactagcaaaaatccttttttttcaacaaagattttcttattctttagaggagactaccttttcaaatatgttaggattccagaacaattaaatatgaactaaatagtttaacacagattagtccttttaagggcaagttctgcataaagtgttgtaacaatagtaacagatagcaattataacaaccgcataagcagaactcactctcaaaataggaggattcccaagtggttataaaccaccaactatgcctataaaagtggaatcttaatagtacaatatctctttagagttgatgccacagcagcacaaagttcacaccttttgtgaccctctaggtgacttcacccaagtcaccacttccagtatcgtcccactaggggatgttaaatctgatataattgttacaacaactttggtatagcacactgttaggatcccacattgactatgtatgggattggttggtggtttttaactacttaggcaccctcccctctagaagtggaaacgggtaggatgttggtaggagtctaggagagtatgcttattctaggaccctatcaaaaaaatgttgtacccatcgaataaaactgtcatccttactcctctcttatgatagctttttggaagtaagttttaccgaagtgggtgtaataaatgatattaaatcatgatgcaccctcaggtggaaccgtggaatcgacattgtagagtaggggtgacctatgaaaggggtgacgtgtagagaagcccaaagtgggagtaggctgttgtggacattgaagaagtatgggattggttggtggtttataactacttgggcaccctcctctcttaagctagtttttaggagtgagttctacccaagtggttgtaacacttacccacaaaagactagctgtggagaagaggttactgaattggttacaaacaagctccaaaactcatacttagttgatgcaggatcaaataacatatcatgcttattcttgttatagttgcttctttttgtaccctgtctccatggatcatatccccaaatcatgattcaaacctcatacctcatgcaaacgcaccatggagcttcacccctcaacctaatcctgtgcctcactacaggaagcaatttgaacaagaatggagaaaggaagaccaagcaactagaatacacaatacaatgaataatcaactacagatttgtgctgctgctattggacaaatgcagcaataaaacagtaaaataaaagtaacctaacttacccaagctacttgaataataagtatacacttcctccataaaaacaagtgctcataaacagtaaaatttaagtttgttttgatttaaatattaagaaaaactaaaacgattaaaaagcttctctcttaaagcatgacttaaatgatactacaccactccacacaaagagaaggtccaaattcaatttccttctctcccaatgtcaataaggaaaggtgaaatcttatgtttgatttttaacatcatctagttctagtcataacaagaacaaagaaaataagagaaaatctacaaacat

SEQ ID NO: 225516 - DNA, 2343 bp, Cannabis indica
atctcttactgtacgtttttaaaaactcaatccttgcttttcaagaaatcagaattcaaaaacttcctttccgttttacaaaatttaaaatattcacaggtaaacaaaacgagctcgaagtacttttttcttttttttttttggcgaaaacggatttggttgggaagaaaggccacgtggcggcgtatagtgggtacctgagagagtgagacgacgtcgtagtgtagaggaaacgaagggtttggatttggaatatatggaaaaatggatcgttaaggattcgtctgttttggaaattaattaaattaaaatatgaaaagaattagataaaactgttagaggccgccgtgattggttgctacacagtcatgactcatctaccaactccttttttttaaaaaaaaataaataaatattgaataataataataataatgaaacagtaagagcaccatgtgttgatgatgttgatattggcatctgcctaactggaaataattattaaaaaaaaataataatagtaaaagaagattattgtggacgtagcgtaaaattaagaaaataaatgattatttgaaagacttttttaagtttaatacattattttatagttatatattctacaagtgcggataattctatttatgaaaatgaaatgtaacatttttttttcaaaggataactaactacattttgtaattggattgtaaaattgattatatttacaaaattagatttcaatagtgagagaagtgatgatctgggaggaatgtatgtcaattctagaagcagttaatagtttaaggtgcatattcaaaaggataaagtgatgaggagtgatgagcattacaaatccaagttggttggctccccaatatgatggacagcttgcaacattgatatttcggtctatgaattctgatgtgtacagaattaaggttgcaaatattttctctatcaacattcacatggtatgttgccacagatccctcgttaggagtagggtgggcctcagcttagcccctccaaacaaggcctgcgcctcgggcttccacggcccaaagaatttcaaaaaaattccttcccatacatatctttattcttttttaatattttacaaaagagaaatattaggggggatgtcaagcacaataggatggggctcttgttatggattcatgcatgttagaatatggtatgttatcgattctatctcaaaattaaattggtaataaaaggagtaccacatgcatcttatgtatagtatttagtttctacatattattaatgtaggactctctaacattccccataggatgatggctcttttcttgctcacaaattttgcaatcctcgatcacaagtggcccttttagctcacagtggctctttttggctcactatccctgaatcataagcacctcttttagctcatctttttagatttggattggttactcgttagagttttagtttggctctgataccatgttaaatataaataataaataaacaatataaaaaataatcactcgcagcatgtcacatcgacatagtgttggataccttagactatgtttgttaagaataatagagaataatgaggatggagggttggtgaaggatgtagaataagagagagggagtggagagtagcaatccttttgaattgtttggtagaagggatgaagtgatggaagaataaagagtatttatttatgtaattattgtattgtcctacatatgtgatgaccaagtgtgtgactttagcaaagtttagacattgtctaaacttgctcaacatcacaactttacagtgatagacctcctttggaggtacactgggacatcatgcatatgattctatgacttatgtgaaaaaggtggataattgtggtgtttttaacataagtctaataagtgccaagtgtcactcttgggttggtcatttttaaatgacagttatgttagttagttttggggggaatcgttttgtcccaaagctatatatatcttccctttgccataattccatgaggctaaatttttagaaaaacacaacagatttgagagagagtgagacagagtgattgggagggtcaggaactagtctcctttacaattgatcttcctagtgtagatcaaacactttgtactcataattggttgattgtttcccggggatgtaagcacagattactctaatttgtgttcgaatttcgttaaagaaaggtaccattttagtttctgctccattaccattgattgttcagtttatagtttatgcttgtttaaatgttcattgctagttttgagcttgcattttcagttctggttttatgt

SEQ ID NO: 225517 - DNA, 1767 bp, Cannabis indica
ttaagccaagcaagcacaaacctttgctctatccagatttcccaagtgcacatggcaaagccccattttaatcgtcaaattcaaaggcagctcttttcccaaactgcagacttcccgagcatgttcaatgtgatgaagagctttgttatgatcattggtctccattaatgtggaagccagcaaatcaattacacttaaatcagccttagtacgatgacatttaagatagtcctctagtatgtcgatggaatgttcaagctggccacaccttctgtacaactgaaagagaaaccaagtgacatcaatttgattaaaaaaatcataagaaggaacaatgacaaggcaatgacctaactatgaactttgaaagcaactcgtaccggattgtggcaacttacaaaaagaaaaaccgttctactaataatagctaaaacttttgcaacttttggtgcaatatgattagggtagatatttatggaaaaaaaagaagaagacgatgatataattttatctaaaataaaacaatgttgaggataataacttgtgcaatctctgtagtttcatttcttccctatatatgtattatattaagaaaaaaaatctaaaataaaaagcagagtttcaacttccatagaatttacagaattctctgtgttagaaagatctaaggtagcctttgcttttgttatgtgatggcatcttgtacttttagttttaatttcttacaaaatataaagacaataaagttaagaacataattatataactaaaagccatgagatgtgaaggaaagatttttaggagattaaataactatataccaagacaacaaataattattaaagctctatagttctacataaataaacaaatttaatttgacacaaagacaagtttatatagcatattacccttttcaatttaagaaagaacctgttaaccctacttcaatgaagtcaaatcttaaaaaaaaaaaaagcatggcatctaagtggataaaagaaaaacaaaagggatgaggtaaaaaacctttgcacttgttttcaatgcttcgatattttcaggagagagttgatgtatctgatcataagattcagcagcccttttatagtctttaagttcaagatagagtgatgcacgatgcagtcttaattgaatgtctttagggtctgctgtaattgctttagaaagacaataatttgcttgatcaatatctcctctttctctgaaattgataacaaagttttgttcagataatttgtcaacttataatctttttaatggaattataaacagaaaaaaacacattagctagagagaggaaaaaatattacaaaagaacaatgatcctagaacaaaaacttaaatatggagcttaaataattaattcaaacaaatttttaaccccctctgtaagtggacacgtctttccttcctctcatatcaaatgcaacatggtaaagagtaaatctattctttaatttcctagctagatcatctatctatacattcctatatcctctcttccacaccaaaataatagacacaatatctttcatatatttcttaggaagacactgaagagctaaaaatgtaagcataaaagaccttacccggacttagccctaatctcgagagctaaaatgtaagcataaaagaccttgtagttgtggaaggtgcagcgggagaaagtgtggtaagctgggacttcaagttcagaaggaatttattggagagggaaataccaagccttatagggatgttaca

SEQ ID NO: 225518 - DNA, 1759 bp, Cannabis indica
ttttagttttttttttttttttttttttaaaaaaaaaagtaataatgtatctaaaatttagtggttattaaacacgagtacaagcatttaaatagactaattttaattcataaaatattataaagcacaaatgttaggctagtttgttttcaacaacctaaatagtctaaagtcagatgtactaaaccaactcaagtttaatttagcccaacttaatatatataatatgcaagggacaaaaaccaatttgatttcttgaatgagaaactattgaaaacttaatttaaaataggcaaaagccacaaagaggcatgtatatacacgggaaggcaacccctgaaacattggtgcattcaaaagttcactctcttatattaattaaggagtttgatatatttgggacatttttaaggaaagaaattgtgagtgtgttactatatagtgtctaatctttactagcttttccagtcaaacagaaacgtggcttcacgtaaagtttatttagtagttttcctttttcaaatggaattgtaccaaattcattgaaaccaatcaactttttttgaaagaactatactgggttttcgtttattggtcttttctgtaaacataacttcttttctttattaatgtatattaattttctgtgtatgtaaatagataattattccagagtcaattaattggtcatggtctgtcaagtaagtgtttttacgtcttgggacacgtattcgttatatacctcgtgaaaacacacccttcaatcttcatcaaatcaaatagtgtgtaccttttcaaaaacaaaaatcaaataacgtgtgttctttcaaaaaaaaaaaaacaaaaaataaatcaaataacatatttgataaaattgacaaaattaattatgaatgtatttttttttttagttgaattttcaaaatagttatttcttagtttggtgtgaaaatattattctaaatcagtttattttatacatgttaataaattaaatatatgtttcctttaaaaggatactttttcttcacttttgtataaatggaaattatttgtatttattttattttcttggtctcattttgtaaaacttgcatagatattatatgtattgtttccttgtttatttatgaaaatagggtttaaaatctttctaggttcaataaatttgtttgaacagaatgactggctgtttaaaaaaaattctagtttttctttttaggacgattttttatttattaagtgattggtttctgattttttttttcatgacctaagggttttggttatatctcttagtgtagtattttccaaataagttttagagagagttttgattgtgtgaagaacttgagtccaacaagttcttagtgttttattaaagtgtatttctatattattttctttgtgataattgtacagcttcaacacatttcgacatcgttcattaagtttcgggagaagtcttgctcgtgagtcacttttcgggagaaagagtgtaagtgttatgatttgaaggaacttcaaggttgattatttcagaaatttgattaagagtttagattacaacagttgcagcaaattcaagatggaatctttatttgtatatgctaggttatttttttggcaatattagttgtcaaaatattatttatttattatgaattaaatgttggttttcttgttgttaatttttgtggcttttgattactctttatgaaattgtcctacaagagataaaattctctttatgaaaaag

SEQ ID NO: 225519 - DNA, 1339 bp, Cannabis indica
agaaaacaaagtaaagagatttacaattttggctcacaaactcactctatttcattcttttctttatgggcaggaatcttttgaacagaaacaagcagccctttttgtagctctagataagctatttgcgttgcacaatgccttgttgcttgagtctaggctaatcaaggctttcttcatttattcaatttcaatgtttgttctctacttgttcactagtactaaacaaacatacacagtaagacaccggctttatcttggtaagaactttcattttatttcattctttttgcataaaggttttgttcaactattttttatattttttttattattatttataggtctttgcattacattcttgattgaatttgcaatacttcgatttacaacaaatggtattgagcagcaaacatggttgatcaatctagtgagaattcttttcctgcttgttgctacggttcagatattacatgctattttcacatacaggtaaatatctaacgtaataattcatttattttggacaaatacagtcaattatactaaaccttgtgttatgacaatgtacagagattatgaaatgctgaactacggaatgctaaaacagctcacagaagaagttcgtagcctacgaaaaaatgcagagctgagttgggaatcagagagtgacattgactggtcaacgtgggttgaccatgaaataccagatgggatagataatattattcaggatccagattatatgattggatttgaagaacgagttggagagagttcccacgaggcttcttcaactggttctaagtataatctccgaagtcgtaggcgtcaatgaatggtttcattcaccaatattttgcagaggcttatttacaaatttattgtgtttctagaacctaatgtaattttcttttctctttcattttgtcataaacctaatgtaaagtttcgttggcaataaaactcgtaaaaaactttgatagacatcatactcattattaacatccttttcataaaataataataaaaaaaaagaatgcgaatgtatttgtaaatttattatttaatgcccgttggtgtactattcaaattatatattgttgcaaattcaaaacaacaacaacaagattcacaatattgcaacacaatcaattaatttaatggaaacaaattatcaaatacacaatgaacttatataattagaaaaaaattcaaaagatataaagacactaaatttattttggtttcgatcctcgagatcaaatataatccctgaccatactctagttgaaaaacatcatagagctttcactgatagttaaaaaaaaaaaaaacg

SEQ ID NO: 225520 - DNA, 5675 bp, Cannabis indica
gcaatttgattgcgacgaattcacaaatttctgtgaccgacacggagtcatcaaaagcttctttgcggttgcaaggccacaaacaaatgggcaggcagaagtcgttaataaaatattaaaggtcactctaaagaaaaaattgttggcctacaagaacaactggcctgaggaactgccacgggtattatgggcctacaagaccaccacaagaaccacaactggacactccccattctcaatagtctacgaatgcgaagccatggtaccagtagaaaccctgataccatcccacagaagagccacgtacgaaccagcaacgtaccaagccttgttgcaggaggcgctggatcagatagacgagctccgggaggaatcttaaatacagatgacagcctatcaagaaaggtggcaaaatacttcaattcaaaagtcaaagataggaagttcgccattagggacctggtcctacgaagggtcttcccagccacccaagagccaggagtgggtttacttgggccatattggaaagtcccatatgaaatagaagatgaaatacgctccgcgacctataagttaaaaagaatggatggatccatagtacctcgagcctagaatgctgaccacctccgcaagtactatcaatagttaggagttcagtaatgttagtttgtattctgtaagataacatgtgtcggacaaatatatgtgatatcccactcaagtttaacctaagtgacctaaaatttttttttatttcacttagggggtactaaggcataacatacatgcaaaaacaggccgaatatgaagaaaataaagtacataaacttatataagttgtccacaacatgaataaataaaggcttagggccaagccataaaagtatccccttacctaaaaaatagaataagtacgaaaataaaattgtcttaaaaaggggagaaaaagtaaaatataaaaagaaaagagaaggatttaattaatcaactcgaggaggaagacgggacccctgcgctcagccagaacaacatccaacttcttgttcttctcccaaaatcgagccaaggaaacctcatgattgggataaaaaggaagacggggttcaaaattattagccttccagcacatgaacaccccgtcatcaaagcgcttctcgcagtgcttacaagtaattggagccagcaaagatccctcgcagccttggcagcctccttacgagtttgatcccagaactcatgaagctctttaagttcaacagtcaaattggttgttgactccaaattggtctggtgcagctcctctaaagatttgagcttcacaatgagttcatggttctcctctttggagtaggggtggcaattcgtgttcgcgtgtcgtattcgtgtcgtgtggagacccatgtataataggtacatgcttgacccgaacatgacccgtttaataatcgtgtcaaaaaatgaaacccgaacacgacctgtttataaatgggttgacacgacacgacccgtgtaacccatttataagcatattttatttaaacatgtcaactaataacacgtttatgaagtattcaacacatttatgacccatttatgacacgttaaagtactaaaataactttaaataggtcattaacggatatcgtgttagccgtgtcaacccaaatacgacccatttattaaacaagttagacaagtcaacctgaacacgacccgaacccatttaagataaacccaaacccactaactcttgtgcgggttttcgagtcgtattatcgtgtctggcccattttgccgaccctactttggattcttgaaggtccctcctggccgaagcaatgatctcgtccctggctttcagcacagcctgatgattccgctccgtaagggcctccttctcttgggcttcgttatgaatggcctccttctcgtcctctgactcccgaagcttcttcattacatcatccatgccaccaaattctgacacagtgaacccttggtcgatcaaagttttggaaagacgatcggcctctgcagtactctaaaagccaacaaaaaaaggagtgagaactgcagaagtaaaaacataaaagaaacttagaagattgttatttactgtagccagggcaacactcatgtcttgaatctggtacactgggttggaagaagcgcacgccgcatacctcttggtggggagttgagttaaatcagcagcaaagtgactcactatttctgaggcgaaaggggccaagtaaggccccaacgaagcgtttaaaccagtccatcaggggatccaagttcaaatcccaaacgtccccggcatattcacctcaaaagggcccatattgggcctccctcaaccacttcttcaaggcatctgcctcggcgtccctcgtggacagttcccccacggcgtagttatgcttggcgatgaagagttgaactctttcttcatcgggatgggtcggagtcaggatgatgcccggaggtgcaggatactcatcaacctcagaaggaatccccgaatcagtgcttgggtcgggggtgtcagccctcttcagtttctttgaatgagtcataacgcctttgcgcttccagtcaagcagaaggacaacttcctattcttcctcttcatcgatcaagaccacctctgggttcccagaggtttcaacgataggccctctggagtcacactcaccctaggctgctcaggtaggtttgactcgggactatgagtttgggtgagggcatccaaaagatcctccatggttttcgctgttcaaaatgagtcaaagtcagaacgatatcaaaaatcatatatgcaagtatagcacagcagaactagtcctaccctgatgatctaattttgtcctagcaaattcacaaattaaaaggctggtgtcatcatcccctaaaacgctatccgagggaaggaatcaacttgaagtcatataggaggagtgatccaagggaataggtacgagaggaccagagcccatctggttgccacccaaaatgtggcttaagtttgagaaataaaaatttttggcgttatcgccccactgggaatggggaatccaaaaactatacaatcttttatcaaactccactggccttaggtcagcatagtcttggacagaagggacaaagtgaatgttcaaaggagacttacaggctccgaaagtgatttcaccggggggccccagagttaggaaccagaaatagaaacttgggctggacttgagttctctctttccatgcctcctcccgagagattcttccaaaagcgtcctgcaccagggcaaatgctagctcctgctccctcttggatctatatttattgtatatgtcctctgcgaacaagataatatcctcccagagcgcctgctcactcctggggtttcgaatgttgaggcagggaaccttagacaaattaaagtcctccacagatttgctctccaagatcaatttagccctcttgcaattggccatcgtgaccagatcccccacgttaaattattccttcttgtaaccagtaaacacttgtgtgtggttcaggaagagttgagtgggagcagtgcggtgcatagggggaaccctgacccaatttgtcagcagatccgggtgctcaaaggctttgaagccgaaagagaagaaaaatctgttgcggtactccttcacattcttttgaaaattgaagggcagtggagtttcattggccgggtgggcctagagtttataaaaaccgtccttaaatttgtctccctttttggggacaaaaagaagttcataaaaatacaaaattttggccggactgggtgggcccagttcttggcaacatagaaaatgtacaagcctgataataggcggtaagcttgcaggattagttggtaaggtgaaaggccgacaaagacaaaaaaatcgatgaagtaatcctgaagtggaagcatggccctggacaataaatgggtctagctccatgccctgaagctgttgtaattgtgattgggcgtcttttcgtccctggggagacgatggtagacccccgagccggagggttcgatcacccaaacagtgatgattttttccaatttgtcggcgcaagttaacgtcgaatgaaattcatcggcttccgagccattagaacgacatgcaaacttcttgtagattaccgggcccttcataacctcgtccaaggtggccaacttctttggccctttcttcgaggactttgctccggcggtagcaggggttgacatggaggggacttggtgaaggttaaggatttattggtcaaatccaaagaaaccgtgcgtgtgaaggtcacggaagacttcactcatctgaaatagaaaatccagcagttagcccccatatcaaaccctaaaatcaaaaaggagaatgggggtcccctaaccgctggaaagaggccccctccgaatgtctgcgaaaaaagggaatccaacgattctcttgggtaaacatcgagtgaaaaacatcctagcaaagaaggaaagaagaaaaaaagggaaggcgaaagtcgcttcggacactcaaaaacaagcactcaggaaatcaccattttttgactttctcaaaaaaggaaaaacggcagtttatatacaacaaaagcagtaaataacataaaatgaataaaaataaggagcacaatttgtcggacgccccacttcgagggcgtcacattaacatcggccataaccgctgtttcaagaaaaacaaatacatcagacaaaaaatacaatcatttatacttgccctaacaagtggaagaagtgtctgaacagaaacttacacaaaggcagtaaggaagaggtcgacgacgcctggtagtaatattttttctggcaacagcggaggaaaagcagaagaaaattagaggtgtctggaattttgttgagtaggtttaatagactagaaatcgcaaggtagtgaaaatgacccagttggaaaaagtgttggcttttatagactagatggggtgcgaggcagcattgatcaggcatcattgtacatcgaggattcacaacgattcgaattccatgatcccacggatgggatgaatgggtgtgaagaggagaaagggcggttgaaacgttttgagtacttttctgacaccgacattaatggaagggtttgtcaaatggacgggaagcaaattgttgcctgcaaaaataaataaaaatcaatgatgacgatcataaatactgcccacgcgcctggggcacgtgccatttcatttattaagaccggagatagctcacaagtcttatttacatgcaactaaataagacttggggggtaaatgttgccccggttcattcccaatatatgtggtcgttgccgtgtatgacatgtggacaaaataaacacgtcacccgaagacaggttaaaagtcgtatggaagaagcaacgagtatgggtcatgtcgttagctcctggacaagtgcaaaaggctcaccttctcctccgggagtcaagctataggaaggcacctccgggcctagagggccctacttgaacagtcactttgcatttaatgcagcatggggaaaacatttaggcacgcccataagaggacgtgtcagacatcgtaagcctaatttaaagaggctagtgacggctccattatgcagaatcacatcaatcaagaaagg

SEQ ID NO: 225521 - DNA, 3865 bp, Cannabis indica
tagatatattttttaagaataaataatacaaaaaaacctaatataattaaatatatattttgtaaaataaaaattattaaaattggtgtgcaaataatttttcttttacaaaaatcctagttcttcaaggtagataatttatctcatttttaaaagagtagggtatccattaataaaagaaaattatacagtagcatagctgcattttataaaccagtatttccaatcccatcctattggagaacattgttccacatgaattaaatataaaagtattgagccatgtataagaacatgggccaattggtttttgagatggaaccctatgattctaaacatggtatcagagccatatccttagcgggctttcgatccacacctatggttagccaaccgcacgaaatccagatagtgcaaagacgcctgagatccgaacaaaaataagtgagcaaatggcagagcttgataaggtgattcaagattggtgagcaaaaatatccaccatcttgaggggatattggagaacattgtcccacatggattaaattaaaagtattgagccatgtataaaaacatgggctactctactcattgccaattgattttgagatgaaacccatgattctcaacgcatcccatcaaatggtattttgttttttttcattcttttttttttaatatcctgttttcaggatttaatttcatgtgttcattgtgatttttattcctactgttattagaagaagagatgtcaatattgttgctaactatgactaagcaaacatactctactctaacaccattggatgaagatatcggttaataagaagaaattcctccaccaatcttttcgtttttataaatgaattgtcttgcatttaaaaaaaatgtcttgatttataacaacaagatcttttctttatatgaaaaaaagtttaatagctctgtatatgctaataatttgtttttttagtcaaatatatatatttttttcttaaactttttttcttttaattaagagaacagttttattatgaataggtaaaaacctcaaatacccaaagggttaataatatatatatatatatatatatatatatttaatattctcatcattacatttcttaaaacttttattagagagggttagttccttccaggtaaggattacattttaacttatgtaattttataaaccatattacccaataaaattagatagacaaaatctagtcctttaaccgtagaaaaattaataagttaaagaataaaaactggtattaatataaccacattttttaattttaaattggtcgattttcattatttatcaaatcttatcatcagtgatgatgcttttctcttttcttatctaaaacttaaaaaaagatctttttattactgaaaaaaacagctttagattttatcataaaaacaccccttcaaaaaagaaaaattgataaaaactaacgaggcacgtgatatactcgaatatttgacttggggaacgttacgtgttaaggggttttatcggctgtaacgaaagatatttatctaaggtttgactgtactccctcaactaaaacagtcagtccatcctacgtgtacaattctgggccacagggatcatgaacgcacgtgacaccatctgggctttgttcagccagacatttttcttattcttctaaattgtagcccacaaccaatgatcctctctaatcctcacctcggcttcccggctccccaatcatatttaattattctttcacttttatttatttattctttttaagaaatacttatccttatttttataataaacatatttaatccttctagaaaaataaatatttaatcccatctgaataatattaatgtattcattttttttcacttcaggaaaataacaataaattactatataaaagaaggaaaatatgtagtatattttgatgtccaagagtttttaagttaattttttttaaagcatctggttgaaattattattttaataaaattattaaaaataaaatttaaacaattacttattatgtatatataatagtcacacaatcatatttagaggagctgtaacccttcctaagacaaaataaataaataacaaacataagtaccagagttttaaattttaagcctcataaatttaatatttatctttagcggcataaatactcaatgtttgtaaaattgaaatttttctctaattttatcgtaaagttttgaatttattaaaagatattcataaataactaacactacacgttgatgtctagagccaatgatacagaatttaagccttatatgtatcctgtttaacataatgacagaatctgtaatgacgaaatagaaaaaaattatagttttataaatgttagatatttatgctactaaaaataaatattaagtttacgcacatacaaatttaaaactttgaatatttatgtcgttatttaccctaatttatatatacttttatataactaaatatgtaaaatgtatatataattatttgttatttgccaacccaaaacaaatttattcatatttcgccctctcatttttaacttcttcttctgtggtcacacgtataataagatgtttaaatttactttttgcattataaattatttagaattttttaaaaatttacaaacggtttcaaataattataatatacacaatcattaaaaaaatagactaaaaatacttacactgaatcatcattttagaaagactattactatgggcaccaatgtgcctaataccagtaggtctcagcgtcttataattgattaacggtttaaataaaataagtaaaatttaatatttaattatactaatagtgatattacaccttataaaagtatttgacactatcaatgtgaatagtgccttaagtatttctcttttttaaaaacatgtattatagactactctataaatactgaaaaatgctaattactgaaggcgtgtcaaacatcagaaagtaatatattagtgttaatgcattttaatattcagttccacataaattaatttaataaataacataaacaaaaattaaaataccaaataaacaaggggatgctcctaaatagggcccatttattatggaggctggaaggagttgtttgggtgcttggtgtcgtgtttcaaccatgaccagccatctcaacaaattatttatgaaaaaaatataagaattatgaatatacaatgatgaggtggctacatcacgtgggctcgtcctacgtgggatactatatgggatgggcgaaatctttttagtggtgaggtggagtagtagagagagaggaggctgtagaccactagttctttgttgaattgtgtggatgaggttgagtgtgaataagatataaggttctatgcattaagaccgttgaggagagagataaagattgcgaataaaataaaatataagagagttgtagtagtaaagtaaagagaaagagattgagaaaaaaaatagtggaaaaggttcatgttttttcggttgttgtggctattatccatactactaaagcgtggaagctaacgacacttgtgggccacaagttcttaagcccataatattcggcccaatttccattctataatttaaattaaaaaaaaaaaagaaattacactatagaatttaaaaggttcttataataaatataacacatttaaatttaaccaatttatagggtattttttttgcttttagatctttttatgatatttgatatgccataaaattagattttcaaattctatatttaatgtttttatttgtttaggaagttttatttgtcactgataccagaaaagttaccggagtttg

SEQ ID NO: 225522 - DNA, 3670 bp, Cannabis indica
cctccaataattatagatttaaaaacaaaaaaaatcctaatttatccaatattattataagattaattttctttctttaaaccaaataacctctaaatctatttatttattttaataatatagttcattaattaaaaaaaaaaaaaacaaaaactaataactaacaatgtgtcggtcgaatacatctaaaatgttatttacataacaaaattattatgcaaaacaattatataaacactaattaagtaccaataacccttatattaaatttgaaacttattttcatttatatatatatattaggttattgttattttcattttatatttagttatatttttaatttttatttttgttatgtatatttttaaaattttataaattaaaaaaaatacttattaattttacttttaaaaataatatttaaaatttaaaaaaaataaatataagaatataagatcatcaaaatcaaacatactcctaatattaaaaataataatattataaataatatattaatatttttttaaaaaaattaatatattaatatatatatttaaattaatataagctcaattaatataaaataaataatattaatatatatatttaaattaatttaaaataaataatattaatatttataaatatttgtaaaactaatgttactaaatttaacgaaatattatacttttaaaatattctgttaaataaaaaaaatcgttaaataatcaattttatacaaatttattagttgagacgatgttgttattaattgttgaaataatgtattattattattattattattattattattattattatatagtttatttatttattttgatctaaaaatccgtaccatcttcaatctccaaatctaagttgacagactccataaccaaagaacacagacaaaaaccaaaactttacctatcaatggcctccaaaaatggcttcttcacatccaccactgcttccacttctctaacatcaatcttccttctcttcactttcctcttcactctctctcttttccttttcttcctcatcggttcatctcaccacatcgattacccatcatcatcatcacctctgatctctcaaaaccattttattccctcggattcgatcaaagtctacgtatcagaactccccagatctctcaactacggcctcttagacaagtactggtccttcgattccgattccaggctaggtagcgatgcagatcgggagattcgatcttctctttcgcacaaaaccctagaaattcttccgtatcctgagaatccactggtcaaacagtacagcgcggagtactggatcttgggtgatctgtcgacacctttggaggaaagaacgacgtcgtttgctaagagggttttcgatgttgaagaagctgatgtcgttttcgtgccgtttttcgctactgtgagcgcggaaatgcagctgggaatggctaaaggagtgtttaggaagaagattgggaatgaggactatgaaaggcaaaggaaagtggtggatttggtgaagaagagtaaagcttggaagaggtccggtggtagagaccatgtctttgttctcactggtatgttgggtattaattttatactatttttttttcgccaattttatttatatatatgcaaaattgagagttaaagtttcaatttttgtttgtgttggatgtgtcttcttccaattaattgtttgtttgtggatattcttttactttgttgctgaaagtatagccataatgatgggtagagacctagagctgaaaggtcagtttattcagcattgttacttgaattttgtggggtttttgattttttaccatgtcctacatagtacacctcgaaattgggatctgggtatgtttctttttcatcattttgtttgtttctcgatatttgaactagggataggctgagattatggttttgttgttccatgaagtttgtggtttgatttcaccttgggcctacatagcagtgtgtcctttcccagctttaattctcttcttttatgtaccagaagaagtcagaacttatctctgtgtctacttactttcccatattttattacaaggaaagttttcactttgcttcagtgtcatatcacctttacaatgttcatgggaataggaaatgaaactattatctcgggatcataaatgggagtttcataattgtaatctcagagtgtttatattcctttggatgtcagaaatatttatactggtttaacctgtattaatagtagttatggtagacaagatttgactggttcactattagtagaaaatggtaattgttcctatttcaactaccatgcatttaatatcttatttgaaaaaaagacagcctttctcataacttgaataacttccagattgctcctattttacttatcaacaaaacaatttctctatctgccaccaaagtaactgaggaaaataaataaatgaaatttcatagttatatagtccttgctgcatattttagcagtttatgatttagtctctggattgtcaggttatgttaaaacttgaagcattctttggcagacccagtagcaatgtggcatgttagagctgagatagcccctgctatcttactggtggtagactttggtggatggtacagacttgactcaaaatcatccggtggtggtggcaactcatcatcagatttgattcagcacactcaagtctcgttactcaaagatgtcatcattccatattcccatttactccctagattacacctctcagaaaacaagaatcgtgatactcttctttattttaaaggggcgaaacataggcatcgggtaagtatccatgtctaaaactatatttcattaatagaatttgttgaagcatcttttttaatagtgccatgtttttgtagctttgtcaactttagaagttggttatacttagcttgagggcctcaacttaccttcttatctattaacctttttattaattatcccaatagttgtcttctaatcgttattcacatcacttagtatcatagtttgtgtaagcagttatgtataaattgaagaaaagaagaaagatcctattaaccttttgcaaaatctagtttgagggacatcttaagtcactatttagcttgtaggcaaatgctaagagtcaccttaagacctcaagtacacaagaggtgatatattgttatcggtgcatttctataactggttccatatatttttatttaattaaataatacgagtaaccgctaaccaattatagagtgccatatcggaatggtgttaggggccttaagatgccaaatagcaatactttatctttgtatacaagagacttgaaatttcaatttctttacaattggctgaatatgatattgtagtagtgcttgacctctccccttaatagcatgtaagagttttttaatgtcaaaagtacaacattgtaagtttttgtccatgttgcttttaagtgtcctatcttcatattatcgttgttaattatatcctgaaattcaattgttttctttctacatatttatatatccgaaggcttatcttgtatttgtatacacacatatattagatctaaatggacgacaaatggttataatattctgtttttcgaaataacagggaggcctggttcggg

SEQ ID NO: 225523 - DNA, 2636 bp, Cannabis indica
tttttgactaatatatatatatatataagtttttttcttagtttatagttaataatcttacggtgaatattactttcataaggactcattattagttttgttgttattttaggaagttttaaagtcattctagtggttacaatagaattgatgatttctctagcttgctagttattcacgttgaagtagtaatactaatgttattcaaggagaagcattagtattattggtagcattggattgatctcacacacttcttttttaattctttgggatttcgattgcttagagtttagattagaagattttgctagttttagtacttttcaatttttctgaaacatcccattcatgtttgccgtatagctattattaaggttgttcatgaattaatctaatcgtgcatccactcatgatgaatgataaattaaattagattaagaattttctattttttattgatatattaaactaattattgttaataatagtgtattctttttatcacatgttttgttttaatgaagtggaattgtaaatttagttacaagttagacaaacttaattagaattaaaaagtgtttttctttttatttgaaaaaaaaaaaaggaaccaagaaaaaataaaataaagaaatggcatcaccactcgccatccaaggtaccaccaaaatattgggtggtgttgggagaagattttgagaattttttttctcctttctctagatgtttcttaccatttccttaaaagcccataccataccatgatgatgttagaattttgccacaaaccaattatttattataattataataattatgggaattattttatataatgtttttttaaatatacggttttgatttctaaagtggttttttcagtaattttaagtgggttactatatgattttttgttgcgatttagattgcagcgctaattgcaatagcagtttctatatagaatttcgtaaaaatacaaaaaaaaaatatattttaaagtataaaaataaaaaacatcttattattattcttccatctccttcttattatacttccaattatacaaataacatatcatttttattataactaattttaaataatgtaatatatacattgtattgtcagctgtatgagaaggcgacttgttgagtgagggtattattactttgtgcgcttttgtcctgaaaataaagcttattggcatcttattccttgtgtgtggccttgtttgaagctttggtttgaacatcacgaggaagaagaaaaagaagtattattctttaacctttggaatctcctcacaagggtctatacctttatccaattctctttttccatgtccaattgttctatatccttatcggtggttctccttccttgccactgcttttccctcctttctttctttctttcttataatttacatatttttcttttcacaatattaagataaggtggaggattcacttcaaaaagtttgccatagctttgttttgttttggggtcaccacgagtggctcatttttcatttagtacaaatataggcagacatagttcaattatacccgttttggttcaagacagaagagaatcttatgttaaataccctttcagctgtgtttagtaggaaaaagatagaagattctcttttaaaaataagttatgtactatgttatctcttcttattattagttaatgcaatccaaaaaggagagaaaaagttcaataaagccaagtagtcagcgagtcaacatgttggcaagtggaatgcattggtacaatgtttgaaatctcacttgtttttttttataaccttaattttttattttgagcaaaactctctctcttggttttttttttgaaaaaaaatatatgtatttatataaccttatattctttattttgagcaaaacactgatttagaaactaaaacttagtttagtattttatttcatgaataaagaaatctatagaaaaattattcagtagtgattttttaaaattacttttcattcatagataaagtatatatgtaaagaattattattttaatttttagaaaataaaactaaagattaagataatttgtaaataattattactttctaataattaacaataagaatatgaattaaaattagtttattaaaataattgtttagaattttcataatgactcaaattttgtaaagtatttacaataccttatgatgtactattttacatatcaaaattttgtaatttatatactcacgtatactcatttataatctcactattatctatattaactcttaagaaaatagataattccagcgacaaatctgtattataatggcggataccttagagcatctccaatagtattatcttttaaggatgttaaaaattaacacatcatcaaaaaatataatatttttttccacatcatttttggcactcttacttctaaaaatactctaatgtatagcactttttaaaaatgttataattatgatctcgcacatgattatttaatgtatatcctaatttttagttataataactttttagctttaattctttatttaaaaaaatgaatagcatcaatgctacaacgtaacatttgtgcaaatttctagaatgacatt

SEQ ID NO: 225524 - DNA, 2589 bp, Cannabis indica
tacagaccaacacgagtatttttagcatactttgtcctcactcgcatgctacttgggaaaacttctcaggaggttagtcacccatcttaaaatgatcacatgtcaaatacacttaactgtggagttctttcatgatgggctactagaaaacaagatctaccttgctgatatatgtagtaccaatcaatccatttaagttctcttctactatgtagtccaatacctacacagtctcagaattatcacacttgaccttcctcaggcggtgtagaattgtacaacttatccgatatttctccttacagatcacgggactactgattgtcacagagttatgctgcaattaattcttctttctacatacatttgtcagttatcaccacgagcaagtccaatccaacgctgagaatttatcctcatactatataaacactttaattttaaatgagacattttgtttaaaatctaaacacatatgcatgatctaaattgggaaataaactaacttgcacgattgaaaaacttcaaattcatacggttttcaatatttcaaatccatactcaatgcaaaatgtctttatagaagtaacaattgaactcttttgtttttccattatagaaaattctatttaggttggacttaaatagaatcttcttttgattgaagtgacttcataattttgttatctaataactcttttctcttccacttctcatgtgaacaaggtagctaggtggtgaaataaaaaataaaaatggaggtgtcaaattttgtcaacggccatttggttagtttatactatattttattcaactccatttaaaaataaaattataacaatttaaatgtaacctgcctaattaagaaaaaagaaatagtaacacacctaatgaattagtctatttagtcatattaacctaactactaatatttttttcatatttaatttttatattttaattaattacactaataaaataaatatctataaattaaatttaatatttaaatcaaatcatgaacttagtgtcttaaattttatatatattttttaaatatgtatataaattatataatatataatagaaaaatttataaaaaaaaaaaaatctcttgagttagtattattttcgtcaaattttttgtttgtattttttagcgtgttattttaagttacaaacccatttggtttgcccataaatttatcaaaattgtttaaagtgtatgactttgaaaaaaaaatgagtaacgataatgaaagagtgaagaacaacataatatgacaattgtcaacactactaataataccacaaattttcttcactttatttaatggttagcttattgctccacgtgtcgtccaccaagaaacaaacaaagtaaatgtgcttgccgcttttgtttactatcacttaaactagctagccacctttgtatattttagtttaaatttagcttaaaatatattataaaattatatttattttttttttatttgtactctaatactagtacagaagagcattgttattgggcaccagtggtgtctagcaccttctaaatgtgtcgacttgcaattggctagcgatactctataaaaattattatattaaactataagagacccgatacttaattgcaccaatagcgatattgacacgtaggaggatgctaggcaccaatagtgccctttagcatttctcagtacagaaagtgtaaattaattataaaagtcaatatcattaatactcatttaaaatatataaaataattaattttatttatattattttaatatcttataaatatatcttattcaaagttaataaatagtattaataagtgacaaaaaataataataaaaaatgtattatttattatggactaaaatttgacacatattttacattaccagcagaattaaattttaacaaaatattataaaaaatagcaatacaccacatttctagctctttattaaaaatgctcttaaattagatttttgttaaaatgctaattggatccctataaaatgtttaatgtctccaacaacaaaataaagtaaatattttattgttttatgtctccaacaataaattaaaaaagaaaaaaaaaagaaaaaaaaagtttatacgtagaaagaaatattttaaattatattttccttatgtataaaaatataatatatttgatgtattaaatttttaaatatatttgtattatatgtattacaagtttaaattattattttttttacattcaaatatttattgtgtatatatttttttcaaaaaatatataaatatatgtagattggattgaatgagttatttttacatgtcaatgagcattcattccacacaagtacatattttagatttttcaattcaatttaattcgtactagtacaaatattcacattttgcgcattaacaggaccactgtaagaatttatgggcttgaaaaagagtgatatgaaattcgaacctatgatattgtataaaatgacatacatattaattaactaagctatgaatatttattgtttacaatatacttaattttacttaaataaaagcttaataatt

SEQ ID NO: 225525 - DNA, 2496 bp, Cannabis indica
tcttaaactttatatgtgttaaattccattgttttagaaattcatatttagaatgttaaacaacatacatgacagtaaatctagatcttgataaaacaatccccaacaattacaccatggcttctttttcttgtcattgttggagttgactccaatgacaaacaaagcagaggcgtcattactagaaataagggttggttcattgttggacatcaccttcctatgactttcttctacttggatttcagaagagacttcacgaatcgatggtaatggtcgacgtccaagaattctactcttgacttcatccatattcttgttaatctcagcaagaagcatgaaaatcctgccattctcctcacattcattgtgctggagcagatccgcttgactttcccacccattatcattatattggtccagttcttgccaccatgccaccatttcataatagtatcttgagacatctcgttgccctagtttggattgccatagttgagtctttaactcggaaattcgagaaaaattctcaaggtcagaataagtatctctaatagaatcccatagtgtaacaatgatattttttttttgtaattgtgtgatagtcctaggtttaaattccgaactaatcgggctgagatctataggagatcaactagagcaattagtatttttgtcgttagacaacatcttcagatttgctatttgctacctttttataatgtttcatattgatagagtatgtgaaatacttatattcatgatattttttttttatattcttttaatatgagaattgagttgatcaccaataattttatactaaatcaataagtatctctaatagaatctcatggtgtaacgacaccttcaaatttgtttttggccatctttccatatagtttcatactaataaagtatgtggaacagttatattcataataatttttgtatattcttcggatttaagaattagattgatactttctagatcaacataatttctctgtcttggcttgaattgaagacctttgcagcaacaataaaacatgtttttaatgtcattttcatgtcataaatgtgtcttttattatctcaacagtcattcattctattgtttacatttacaacatttgatcaattagaaacaaggatgaaaattatgatacttcttcgcccttgcaagcagcgacccttcacaaatggcttaaaaataaaattgattgatagctaaatttattgtgaggagtgtgtcattttttacaagtgaaaattaataagtgtcaattctgagaaaaggggcttgtaagttagtgtgtcatggtagaggcacatgcatttggagggatccttggattcctcacttaaaaggtttcattccgaaaccaatgggagaaatcccgcctgacttgaactgtgtggctgatctcctcacaaattctggctcttgggacatttctaaactaaataggctattcgataaagacacggtctctgctattttgaaaggggctaatccttcgggtcagggtgtggataaatagggttggaccttagagtctaatgggaggttcacgagtaaatctgcttaccttgctcaagcactggaaagagccaaccattgtgaggtggccccaacgctgtggaacaaactatagaatagtaaagttctggagcggcataagattctttggtggtgcatcctctcaaaggcgctccctgtcagatcagtcattggaagaagattccaaatagaggatatcagctgtcctctgtgtggaatgggggaggaatctgttgaacaccttttgctctcgtgtgatgtggcgttacacctttggcgctcctctccttggggcatatatctggtctgtggcaatgggattcgtgtttgggactaggtgaaatttctttggagtcttaaaaacaggggtatccgagaggaggaggtttttctctatgcttcgattgtagttgataccatttagagggcgcgaaatgaaaaaagtacacaataacaattccccgaatgtattaaaatgtattgaccttatttacacttcttttgcagaattacatgcttctctggtgtcgtgcccgactccgattttgacggaaaaatggaatccaccccctgaggattggatcaaactgaattgtgatgttagagtgggattggcaagcatgtgcacaactgttgttgctaggaaccacctgggtaaggtgattcagatccacacgactcagttggacttttcggatgctttgtgcggagaagcagcagcatgttgttcagccatttctctggcaattgacttaggtttaaaatttattattattgagagtgactcgagactagccatcaattaactcaatgggaaggagtcccattgggcacttgagaactatgtcacattttgtatgagatccacttattcttttattagttgtaactttatgaatattagtagacaatgtaactatgctactcataat

SEQ ID NO: 225526 - DNA, 1384 bp, Cannabis indica
ctctctctctctctcctattactaaagggctttggttttgtagcaagtggagtatttgtatcgatgatttccctctactctccggggcagaggcggtgaagtgaattttcaacttgttttctcaaagccccgacccacaatttgatagggaagagttttctctatttgcaactgtgctatatcataacatgtggttttttaggaattccaactttcataacaatggtcaatgggggttttcagacagaaaaagaaaatctttgagaatttctagagctattggaagataatcttaagcagtaggcttgcttgttctgttggtggtcactctcttaagactcggtggatcctgtctaggcctgggagaattcggttaatggggattttgccacaaaagagagtagtggtgcggttggtgtggtggtttgggatgcgtctagtggtatcttggtcttgtttgctgctaagatccccttcctctctgtgattcttggcgaattggttgcagtttgtaagggtgtagaagtgctacgcagtttgggaattgaggaggcagatattctttcaaattgccaaagtttagttcctacgctttactctgttgttgcccctcattggaacgtgtgctttttgttttctaaggttttaagtctgctgactagtttgtctgctaagtttttttggattcctagatctaagaaccattcggctcatgctcttactaaatggggattagatcactcgtgtaagggtttccttaatttttgggaggtgagtccccatgtgctcacccgtatcttttcgtcttttgaataaagtgtttgtggtttcttagcaaaaaaaatgttaaagtggaaaaaataatttgttaaagaaacttttagtcactaggttaatgttacatgcattatgtgcatacttagttatattcttagtttttattttggctatgtgtatttttagttgtataattaattgtatattatttattgtttctcttgattcaatcactatttctatataatgttatacattatttattatattatatataaatattctttggtagttaatgatattttgtgtctcctacgttaattgagtatattttttgccttctaacctttttttctttttcttttggtagttgagtgcattttgtgcctcttaaattcttgatatagctgagtgtatttttgcctcctattacatatcttctctagtaatagcattagtgccctcctaacttttataattatctactattgttttttgtcatttttttaattattgtatttagttagctataattttatttactttgcttaagaaatacttagaaaaaaaaaaactaaaaaaataaaacttattctttcaacataag

SEQ ID NO: 225527 - DNA, 1723 bp, Cannabis indica
ttttttttttttttttgtttatcaggaattggttttcagggataataagttgacaaaaatacctgatgttagcatattcaagagtcttctggtttttgatgtttcattcaatgagattactgctttacatggattatctaaggtcagcaacaccctcaaggagctgtatgtgtctaaaaatgaagttcttaagatagaagagatagaacactttcatgaattgcaaattcttgaacttggctccaacagattgcgggtaagtttttttcattgcttagatatccttcaaacttgtccagtattgtttttaaagtgtttgtttgtgtctacgtgtttgggtggtttattcaggtgattgaaaatttggaaactttgaataatttacaagagttgtggcttgggaggaatcgtatcaaggtagttaatctatgtgggctgaaatgcattaagaagattagcttgcaaagtaatagattaacttctatgaaaggatttgaggtatgtcttctaaatttgtgaacgaaaccatttttctagaatagacgtgcatttttattgtttgattgagaaagaaacttgttttcaatgtgtttattgtttcaggaatgtgttgctctagaagaactatacttgagccacaatgggatttcgaaaatggaaggcttgtctaccttagttaacctacgtgtattggatgtatcatcaaataagctaacttctgtggacgacattaaaaatctgacacagtatgtgtatttctgttttcctgaagctctgatgttgatattttatttttctttaatccacaatcttctaccaatttgacattagagatcctgactttctttccacttctgctgttatgaaaattgtgatagattggaagacctatggttgaatgacaaccaaatagagtcacttgatgcaattgccgacgctgttgctggttcgaaagataagcttgttacgatctaccttgaaaacaatccatgtgtatgtctactttcatagtgactgatttaaattcttcagagcatgatataaagcttgttacattgtcgattgctttcattgtgaattttgatgattgtcctcattttgatttgcattttcaaagttcatttttagcaaatgaagctttgttaaatacctcactgaacctttccactgtcccaccaatgattttatatggcgaaatcttttattggtttagttagtttttctttcgctggtattttaattcagagcattcctattgggtaccaatagtgcctaatatcttctataggtgacgtcttgcaattagttagcgatattcattaaaaattatttttttaagttatatgtgaaccgatacttaattacaccaatagcgttatgacacaatggagggtgttaggcaccagtaatgccttttaacaattctctttaattccctatgctttcattatgggttgttctctgtagtctcttaataatttttgatgaattttccattttaattctgtttagcttaatttcatattgctttaaatttgatcgtgcttctcacattccaggctaagtctcccaactattctactattttgagacaaagttttccaaatatccaacaaattgattccaatatctatggttaagagatttcatggaattggtttctataaaggcagctttctttaaaggccgaaaaccatagctggtgtagggtaagtttcctaaa

SEQ ID NO: 225528 - DNA, 1924 bp, Cannabis indica
aaaactgaataaaaaaaatgttatcaaacgcactctaaacatttatttattaaaaaaatatattaaacattttcttacatttaatatttaaaacattttacaaacacaattcattaaaaataaatgtagatgcagctctttaacatcgataaagatttgtgcagtttgagtatggttgttagaaataaaaaaagaaattatgttttggtctttgccgcttgcggaagctttagctttgaggaatgcagcttctcagtgtgttttatttggttttgacagtattttatttgagttaaattgtcttggcctactgaaaaaaaaattaaaaataaggttttattagagtcttctataggcttagttatttatttatgatttctgtcttttttttcttctctagatttaatctagttgtgcttgatcctattgatgtagtagcacttactttagtaaagttgactttattgacaattgttagcattgtttggttctctagctacccctcttaactttaattcatatttgcacaatacaaataatttataaatacataaattgttaaataaatcaatgaaattatacagtttaataattacattatattttaaaatataaaatatatttgaatatgatgtggtaattatatatgcattattaatattttatttggcaaaataattagtaattacacaaaaacaataatattttttaatagttaatatttaaaataaaaaagcttttagtaattatacaatgtaattacactcaattctcatgtagggttatgagaattagagagtgtaattagatcccctcaattacttcaaattacacaattacataataataattacaaaattagacaaatatgtcaaattgtgtaattaccactaattatacacaaatctaattacaccatcattttccaaacgcaccctaaagatagctacataaacataaaagtaaaacttgtaaaatgttaaatattgaatataatttttattttttttaaaaaaaaataataaaatatactcatatttgtggtattaaaataagataatttatataaatagaaatatgtatctttttttggcagaaaaaataaaaatatgtgtcttaggaaaatgcttaattaggtagagtcacgaaaaaaatctgtgtattcaatttttttttcattatgtgtcactatattgtggacctttaagccttatttactaaaaaatgacattttttaaaaagaaatactaattttttcatttgatatatatagtgaaacttgaagattgaaaattataaacacattagacatataaaactaaggtttaaatatatttggctatataattaattaatcaaataatactatttttttttaccacagttcatattactttgttagtataattttcgataaatattatttacttgaaggtcacttatgttatatcagcatacatataatttattcaccaatcaagatgcaattaagaaatcctaataatatatgactcatcttttttgtcatctacatataaaagagagaaagtgacatacatacatatcacattgatcaaacaaataatattgcaaaagtatttcttttaaaaaaaaaatctcgtgtaagacacattatttgaatatgttttagtaaatgaaactcaatgctctacaatattaaatattagtaattttccttattaggtgtcatcaaattattcaaaaaaaaaaagaaataattaattattagtataaaataatggctaattagcaattttttctctcgaactttgacatatactaaatcatgccccttgaacttttttggccgttaaaaattctccctgaactattaagattgttaaatttaaagacttttatctaattttagtaaaaaaattctaacatggatgaaagttctggg

SEQ ID NO: 225529 - DNA, 2981 bp, Cannabis indica
gaaatcaagggctagagatcttgaacgggaggcgtcattatatttcgctgcaaccaatgtaatgttttattaaatccttatgtgtttatttcattgttttagagaattcatatttatgatgttaattcaacataattgttagtaaatctagatcctggtaaaatattcccaacaattaggtttataaccgagctgaaaatttgacattcgaaattgatacgaacgtaagctactcacgcttggttgattttttgtacgaataacttgatgttgacaaagtgtagtatgacttgaaattaaaagtaaattacaagtacatgaaaggcttaatgtatcgccctgaagttattgaaaataataagcgtgtaaggttatttttatcaatgcttacaaaaagctagatgaatttactctcttatttgtgactttggcgaagaagaatgtctgtatcgatcctagttctacaccaagtactatcatcgatactcatagcgagattgggagttttgttccaaaaatgaatccagaggtgttggcgtccgatgtgttactaaaattaaacactatgatactgacagttgacgttgtagcacaaattctctatgatgattgttttagtgatagtccagaccctgaatggcatgttgaaggtaatgataacgtaatagacaaccaagatacagaggtccctactattgtagctttgaacttgactccactatcgtaccaaataccacctaggaaaccgatacagaaaagaataccccgtatagaaaataaccaaatacctggtaatagtagtagttgtccacatgatgctagatgaatcactgatggtagaggtcctagtgtacgagaagaaccagtcaagatagagggaccactgatagtagaggtcctagtgatgctagagggaccaatgatattggatttagcgatctattttcttctttgagaagttacggtaaattcaaggagaaaatatttacaagagaagacatcaaagatcatagtcattatatatttattggtggcacaccaagtggagagttacatctaggaaagtcttttagagacaaagcatttaaagatggttgttggtttgtatccaatgaaaaaatggttttactatttcgttaggaagtctggtactgcagtttggtatgttacatgtaaggtttttgtaaaattgagcaatttggcaacaatcggaccatatatcaaactatatcgaacactatcaggccagtcaaaatatagagcataagaccatataactggccctacatcgagcccctatcgggccaactatccatttttttttttttttttgcaaaaatgagcaaataggcctattgagaaccatcggatgtgtatcgaacctatatcgggataaatagaaaatttagaataattataaataaaaaaatccacaattttccaatgtatatcatagttaaatattaaattttttgttgtcccactaccataattagtaagattttaagaaaaaagcataatttattataagctttggtagaataaatctatcccccatcttgtctaaacaacaacatgttgtcactgtattaatagataaacaataatttactgttattataatcatatttatcaatgtattaaattacttagtaaatgtattacctcgtttgtatgtggtacttccttctatccttgtgatcctaagtgaatcatctgacttgactttcagaggttgtcatctgaggtatcacgaccatgtagcgggtgttaaatatactagactgatcgatcaatgatgtgaatatgttacagtaatcgtccatcaacgtcttcaatgcatccttaattattgaaccaatattggaatctaggacaaataacttccacaagtccgaattcatctccacggccacccaatgtttttgagcatgcaagaagagggccatatatatgaattccttcttctcctaagaaggcaaaaactggacttcatcaccacgaatcaaatccaaaatagagtcatcccaaacaaagtctcgctggtctgaatctcccttccaagcatcccattaacccttcactgatgcgaaaaatgaagtgggcatgatggtgtactgacatttgtacacatcttggtaaaactattgctgccttctcattatgtgaaaatgcatcatctagatgctacacaatttaacaataagccataaacgagcacattaaaagaaaaaagaaaaagaacaataaaatagtgcatagtgttagaaacttacatcatcagaaagccactccttgttgtcgagctacctctagaactgtttcgagtcgtgttgaccagagaagcactttctgagatacttgttcccaatgatgcctacacacaagtttcagagacggaacaataacttatgatcaactagtcgaaccgagtcaacattcaaatttgcccttgatggcctcgacttcttctttattttagtgtactattcaaaccccttaggcctttcttcgatctcttctccactaatgttggagctgtgtctaaaacttggcactcagagtcttgagtgtcaccaatggacgtgatctgatgttcttaggtgtatagagaacatcagattcatcatcaggcctgtaatcattaaggagaatgaaatcatctccaggagcctcgtggtgtggctttggctctgaatttggcattctctgatcttccattagttccattagggtgtttaggtaacccataatctttgttttcccttttaaaagagcagtgtggccttgcctcaaagtaatttgctccctctctacagtctccaaccttgccaaaatggtagaatatactagttcctgagcctctgaagtgcaggaaatagatgctgacgagggcacaactgctgaagtgggagcaaaacatgttgaaaatattttactaggatctagatttactactatgtatgtttcattaacatcct

SEQ ID NO: 225530 - DNA, 4363 bp, Cannabis indica
ccattcctagggatcaccccatataaataccccgtaaacatactgataaaggagagagaattctgggttcaaaggaatcaaagaaagaaaataggagaaaaatctataaagaacattctctgtaataaatactctcattaataataaagactcgtggactaaggctcattaacgctccaaccacgtaaaaatctaatgccttaaacttcctacagcttttcttgtatattatttaattggttgccgaaaacatcggtcaacaagaataaattgcggcaaaattcctaaaaattttttatttttagcttaacaattaatacctccaaacctattttttagcggtaaaactcttaaaactcatgatctgttaacaatttgttatttctatttatttttggatgttaagtgctacgttggattgtccatgtatacacaatatgttgtctacgtggacacagtgtatacatgacataattctattcatccatagtaaataaattattaaaaaaaaaaaaaaaagaaatttgaaaattaaagaaaaaaaatcaaatttaaaacaattaaaagaaatagaaaataaaatagattataaattaaaacaaaaacaaacaaaaaaaacataaaacaaattttttaagaaattattataaattaaaaatatatttttttctttttcttcctttagttaaataaataaaaagattaattttttaaaagaataaataaaagaccttatatccctaaatcttcgaccctaacttcttcacctaccaccatatactatccataaccatatttccaaatccactttactgttgaaaaatatccacaacaccaaacatgttattatctttcaatataccataagaaaaacctaacccagatgatattgaattaaatcgatcaaacccaaatggtagatcgtgtaaatcgatcaaatcgaaccctgcgaaccgatcgttcctccatcatttcagagctctatgaatcgatcgttcccctaatatttcagatctctatgaattgatcgtgctaacatttcagatctccagtacctaccatcatcgggaaaatatggggatcgctgacaataaagacaataagagtaacgaatgtgaccacagaggaagaaggtagcttcgtcatctaaaaggtaagcgtttgaggaaggaagtggtgggagtcgcagtcattggagttcgcgtccccgtggttttaggcgagcttggacatttagggctttcacactatcaaatctagtttgtattttttttgttgttttatttttatttttcattttatcggtgctaatttggatttagaaaatgcaatggtggtagtgggaaagcagatctgagatttggtttgagtttattttaatttatttttctgtgatttgggtatgaaaagtagggtgtagtggtggtagttgttgtggtggtggtggatagtgatggttttggcggtggatggtggtgtagtgatagtatgaagaataaagaagaagtgaaataaaaaattggattcaaaaagaaaaatgaaaagaaacactactcactattgtactgatctttaagaaagaaagaaaaaaagaaaaataaatgaaaaaaattatatttattccttctatttgttttaagttttttttaatttaaatttatttttattttttttgaataattatttacgtggagaaataaaattttaccatgtgtacattgtgttcacgtagaccacacagtgtacatgtaggccgtctggtgtggcacttgacatcctaaaatagatgaaaatagcaaactgctaatagaacatgggttttgagagttttgctgccaaaaaatgagttttgagagttagtagagtgaaagttttgaggtgttttttcgtaatttactcttattgtcattattactattatcaaatataaagtttttaacatgttgcatttttagatagattatttgtgcttacgtgtcatgcctttcgagcttatcgtgccgtcgtgcttaatctcatattttttgagttgtgtcgtgttttaagcccatattgtgtgtgtcgcatcgagctaatttgtagcatcgtgtagtatcgtgccaatttgtagtgtcgtgcccaagcttgtatttttgcgcttggtcgtgctcgtgcctttcggtggagcttcttcaagtcgccccaatgccaaggtggcctggacctccatgtctagtgatgccacagggtcctcactacctcctcctcccccgaggcctgcatcggctggttagccaatgattgtatatcctccattgagaggactctgcctccacaccaatctttgggcagcggggcctagaagtatgaccgtggggcctacttagccattggcagaggattgctcatgctacccgtagttacattggtagtactctgcccatcatcgatggggagctccaagagcttgaggatgaggagctggagtgtctgacgtccagcggtctctaggacatgactttgataagttgcatatttgattttactcaagttgttgcactaataagggttgatcaaccaactatggaacactgcaaggttggccagccaaggttgtattactgagaagctagctggcaagaagtgcaccactcaggggctagtcggccaggtcttcttctgccactagctcgattttttcttttgatttcaggccatattaaagttcaaccttacccatggcagggccaagagctccttgggcgcttaccgagagaagcttaaggctaaggagactaagctttaggcagagagggatgcccatacctagacagactgatctgcaaaagtctcaggacttgatcaatggtctgaagcacttgcttagtatcaggaaccaagaaaataccatccttgctgctaaggcctccaggttggaggtggagcttgggaagaaggaccaagcgttgcaacttgctcttgatggccaacaagccatcaaggacaagtatgttggcttgtcctctgaggtcttgtatgacgtttatctgtgtaaccccaaggttgacctctcctacatgggatcttctttccttgagagcaaaatgcagatagatcgggttggctagactgtcttccaacctatggaggaggtggtcggccaagctactgattacatggtcggccagcctgcagaggctatggctggccagctccttggcgttccagacgttgcagcttctggctcgactctacctgcacctgcacatgactgcacctgcacatgagtagacacattttattagtatcttacatttatgacttattttatattagtagacatattcagtttcatgttcgtatacgacttgttggccttttacttttgaacattatttattttcggccttagggctttcatgttcttgcttttggcctagaggcactctgttttttaagactactattatttagccttaaagccttttattatggatatgtgattgaccaggcagtctttaatcctggctatcttcttacgctttgacatgtaagtatctgaatatacttttttatgccaagtgaagtatgcttgcattgacatagcggcaggttttatgcttatactaagctttaaatttctctgcataagttctctatgctagttcgatgccttgtatgttgtgggtgccccccaagtgagcacgcaaacttacagtctcttggtcacttgcaattcagcaagtttcatagaccttgcctgggacttttcttggagggttaccgaatgtacgcatgtgaactgaaaaaagaataactttaagaagttgtcttattagcaagtggtttaggcacaatatatttgaactgaaacaccatttttattcatcaattggtctttattgttgtttaacttacattaattgattctacaagcttacaaaatagaaagtttgcttctagaagtcaagtggctacccctacctgacatgccaggcagagggcacttcagcgatggagaggccagactgaagagggatgggtacttagctctttttaaactaactttttttaatgagttagtaaaacttctactgaagagtagcgttcttacaagctggtcactggtaggagaatcagctccatgttctcgttgtacctaccaagcttgtaggctcccttacttgttatctctgtaacttggtagggggcttcctagttaggtccaaacacctacttcgggatctttggtgttcaagaacactcttcggagcactaagtctcctatgaatatttcctttccttgacttatttattgaagtgtcttgccaccttttattggtaggcatgcagatttaggttggctttgttggaaattatttta

SEQ ID NO: 225531 - DNA, 3619 bp, Cannabis indica
accatattacccctagattctaagctacttcttagtgaaggaaataatcaaattaataatttatcatagtttgtcttctatgaaatagtagatttatagtaaatcttaaatttcattagtttagattaatttaataaaagataagtattctattattatcttttatctgaaaatcaaaaaggaaatcaattctctctttttctctcttcacattcggaccgaaggaaacttttggggaaaacaatttagaccaaactcttgagtgttggcagcaaggatttgagtagttagcaatggattaacttaagctaagtatctccttcctctcttctttgtaattcatagcaaaagagttaggttttcatagtttttgtgagtttagcttatgtatgtttgggttgcatggaattgtttttttaggttgttttaaggttattcaagctattttaagcaggtttggttggttgtgggtgagctaaagcttgagttgagttattgaactcaagcttagaccttccatggtggattttgctatagtttcttgatattgatttttttagttggtttatgcttgttaggacttaattaggtggtatggagagttttgtttgatttgaggtaaaattgagttaatggtgaagtctttagggttttctgcaaagaactgattaaccggttctggcaggcctgtagatttggtttaccatttccctaaacagaaccctaggaactagtttttcattttgggaatatggtttaccggttctagtagttttggaaccctattttttcatattttagtgatacgtaaggtagccatgttatccaatgatagataacttttagttatgattttatgtcccctaaaaagtaattgagcgtatcacttattagttttgcgtacattgtgactaaggggcctgtaaactgtcgagcaacagtttcactcaggctgaccaacacacctaaattcaggatagaggtaagattagtataatgatatacgttagataatatattgaaatagcggtatttgtatgcgtaaattatattggatatcgatgaatgtaagtttagcataagtactgattgatgctatgaatagatacaactagagtatcgagtataggctgatattatggtcaatagaatcagtacgtgtggaacacgtgttagggttatgattgtgtgcatgagcgccttgttgtaattcggtttaagttgatgttatgattatgcttttcttgctgagtctgccaactcgtagttactatttacatgtgtaggtaagagaaaagctaaagttgagcatcattgagtgcgagtagatgaagattgtacatgttgaggcggttaggcctggagcgtacaatctttgtgacaacaggctgtatttttaatagtcgctaggcgacaacttttataactaatattttctaatacagttgtaaatattttaaatacgagatccaattttatgcaaatgttatttattttcatttcagggttaattaatcacgtttttccaacaaacacgtttacaatggattgcacagttagtatgaaatcatgacaacacgcctaaactagtagggtgttacacgtggcctagaattggatgatccattacctttggtcttatgagtgtagttggtcaaaagttcttcagacccatattgcgctccctttggggtatagacttctttcccttgttccaaatcatgtatgaattgattatcttccacagattgtcgtgttgggatttatgccctaaaaataattaattaatggataatatattagaaaatatatgaaatataattataagataaatgatatattaattagaagagtaaaattattaaatatctaaaaaaatatttattcatatagaaaaggtataatattgtaaggatgtacaagagaattaagattataggatatgaaaaaaacaattcggtagtgtattaaagtattgggaagctttaatatggatctgctaagtatagtttactatacactacacttcttgttgacctcacttttagccgattcattttcttatagctcttacaacagtatctctgaatatataattcttagataatatatttaggctatagtctcagctaaactgtcttcgacctcttgcccagtgaacatgcatcactatttatagggctagtaagcttggagagaaagagtttttcctctcgttaaaatatgtataaacagaaagatcgtgagattgatgctggatacactgataatgggatcatgtgtaagccataaccatgtaatattatccctgagttatagggatttcattgatgactcacaatatgaaagctgaattcgctaagtgttggttgatctgcgcggattgctgattgctttgctctaagcatgccagcgaggcatcctgctcggactatgctactcgagcagatgctccgagtggattccatgtgtcaccattcatgcgatgccacgtcagagttcaaaaattgggataacatttgcccccaaatctgtacgggacttccgaagtcgcgcgtagacttcattcgagttgcttctgcctttggatggggacacgtgtcaagcgcgaccgtctgagactcgatgtgaggcttactaggcgtcccttcagttttcggctaataaattctctgacaattaatattttgaaatccgattttctctctccacgactgacgactacacttgattatttttgatttcccatattcacttttaaggagggaaactgaggcgtctgaggttcctttgtatcgattacctcttttcgtggcttgcctataaatatcaaacagcattggcacataaactcattttcatcacccttctttgctaagtaggcttcagagcgaaaagagaagttcttggcttcaaagttgctgaagtgccttcatcaaagttgcttgttggattgatgttgcttaaactcagacatctgactctcgagtaagtttctgatttcatttatccttatctttgcatgtttaaatttcgaatgcaccttcgactctgctgtagaaaatgtctaggaaaccctaggtccagaaacttgtgtgattcttctttgtcatgtcttcatgcaattttacagtccataatgcttgttttctctgtctgtctttcatcttgcttattctaagcttcatgaacttttttgccccaactcgagaaaatttcttacttcttgagtcctcacttttctttgaacattctggttctataatttgctgagtactcctagtcggcatattttcttgttttatcgttcgatattctgaccaaacactcatcttgtgtgttgtcttctgtagatgaactcaggtgagtcttgggagaacggacatcgaattgaccacgacctgctttaacttttgcacgaggatcatcctcgtctttgttctaggccaccttcctctagtgaaaggactattatccaaaatccctgtacacagccatagaatgatggcttgtacaaagaaaaaacacgtctggctgacgctatctgacccttaagtggctcggcacgcaactttgcccagcgccaaaaggatccaatcgtccagatggagggggatca

SEQ ID NO: 225532 - DNA, 4366 bp, Cannabis indica
aagctcaatgtattgcaggttgccatgtgttaattttccttctataaaggatgcagcagatgtagctattgctactatgcattctggtatacaggtaggaatctgactctgtgttatgctgtgaattttgaccttcttaacagtttcttctgttaattcttgcaaggtatcaagggtagagctaatggatgaagttcaaatcaaggctatcaaccttgccaatggaaagaatttgcccgaaactccaaccttaatgtttgaattcattggcacaggtgaattagattattgaatttgtcatattgggattaatagtcaaatttaatggttttgcttttaaaagttgcttgatgtgatttgcactgaatttcctaactgtttttagaggcttatgccctcgagcaagcaaaaattgttcaaaagattgcttccaaacacaatggctcagactttgtttttacagaagacccaaaagcgaaaaaggaactttggaaggtaaagaacttagacctttataacaactacctttcaatgccagtgtttatagttctgctgtcgttttcccttaaaacttgaataacttgtttcgatgcctgtgccgttcaattgaatttggattgccttatctcttgaaggataatcttgaaagaatcataatcacaagcctattattgtatgttgttcgtattttcttttcactaataaatagttcttggtttgtcatttgaaatcccgtcccgtccgtggccatgttcttatctacaccaattattattgttactcagttcaagtcttggttacgtgcagataagaaaggaggcactctgggcttgttttgcaatggtacctagttatgaggcaatgattacagtgagttgcaggatataattttcttttctttggttcttcccagattagctgctgtgagaaatcacaattatactaaaggtcctttttactaaaaaaaaaatataaagtccagtgatcttttggctgctatttgctattccacaggaccattttctgcattaacagtttattcttatagttgtgccaatcacattttataaataaataatttcattttatactttagccaaattaatctttctttatcttccattaaaagtgctcattttgtgtaggatgtatgtgttcctctttcacaccttgcagaactgatttcggagtccaaaaaggagctggctgcatcctcattgatctggtattgtcttttcgagtttattttttctacacacaaacacatcagaatgattatctttctgaaaatgttgcttgaaatttatgtccaagtctccaaggtgtttaatgtcttgattgttcgttcctaatgacagcacagttgttgctcatgctggtgatggaaacttccacacacttatcctttttgatcctgaaaaagaagaacaacgacaagaagcagagagattgaaccatttaatggtcaatgctgctttggcgagggaaggtacatctgttcatctcttttatcaaccaagtatcaatttaacatcagcataatttctgtctgatttttcttttattttggtgccattttaaaataccatcattcattgattcttacctctaaaattcctttgattatttttattttattttctttctttgtgactagtgtttcactgtttagtaagtagatgttgattatgcctcaatgtttgtttcatttttattgatccacttttaaaaaagtaaatgatatgtacacacatgaattgtgcacaaatttgaccgcacacttatgtgggaagtcacttttaacaagtgagactcatcttaaataaatctagttgattcaaatttgttatctcataagtgtgtcaaatttaggtgatatcattactcctttcaaaatattacgttatctactgtaaaacaacaattgtgctgacatgtttcgtgtgtctttgacaactaaacaggaacttgtaccggtgaacatggtgttggtaccgggaaaatgaaggtagtcctttcatagctttaaattattcattggctaagaaatattgtgtcaactgttgaggcagtcttgacatgtgtcagaatgtttttaggtacattcttcagttgagagactattctaactaaaatttgtttttatgtctaccagtatcttgagaaagaactaggagtagaggctttgaggaccatgaaaagaatcaaagcagctttagatcccaataatatcatgaatccaggaaagctcattcctccccatatttgtttctaagatcttcctttctttacgtgaatccaggaaagctcattcatgcacacactttgcagaaactgttgtacattaacatgaatatttccgggtccctttctccccttttgacattacatgatatgcatttttggtctagtgccatctaggttcatagaccttatcaccattttcacttagaataaagatttactaaattacctggatatctcagtaatctttccctttcacactatactcccattgatgtgaagaaataaactacttggatatgaaagtagaatgtaatccagattgaatctttttgattggcttttaataataactctagatagaactagaaatttaattgtttagtataatctttgtggttcaatttcacttgtgtgaatatattacttgcaacgatacgtacgcttatgtaattaaaatttcacaatagtgttaaatatagaaagttgaatttttgtgaacaaagattacttacacacttactgaatgatgtatagagagtgagtgcttttgtggctatgtttgttttggttgtaattttgtagttgattaataaaatttattttcttgataaaaaaaaccaaataagttttaaaattcgtacatatgaatccctgtgatgagatgatttgtgaaaagagggaatatgaaagatttgtgaatttcaaatatgaaaggtattccttatgtgattttgtgttattatttgattggattttctaacaactcacaaaatataaagaaaagagagattgaagtggaaatattgaacacacagattttatgtaggggtggcaaaatgggttttgacacggtatacaaatatgaacacgacgcgaattttacaagttagaattgaaaaaattagacacgagtcaaaaataagtcgagacgatttaacacaaaataaaaagatgtcaaacacgacactgttgagattttatgtcctaaataatacttaattcaatgtaattttatttactattaatatagatttgaaatcatatcttgactttgtcatatgttttgttcacatgtttattacataattataagtttatataagttctattaaattctgtacatatagttattcataattatagtgatatcatcacaagtgaaataattgtgattatatgcttcaaattatttagtcttgcgatttattagtgcactgaatttgtactaacgtgataatcatcgatgtagtttacttaaatctggataagcggaatgtcttttttaggatgttagtaaagtaaatctgtatcaaatgtattggctatatatcatattggaccaatttttgacaatggagaatatatcataaatttactattatatcttttctaagtcaatatcatttagttgattgtagatcaattgattgatctcaatcctgagatggttaagttctagtttaattgtactatacggattctttgacttgttcgttaccagtttattgtaggagtagcccatatttacatcttgggaattcggtagtgcaattgagtgagagtgttaatcaataatcatgatatggaatctatggcttctataactatttagaagtgaaacaacggtttcttttgagcttgactaaactcgataaatgatagagcgctcattttgataattatattagtttttcgaaatatcgtttacaatgagctaaatgtttgaaggataaaataaattgaagtgtaaagtggtaattaataagcgagaaaattcatttggtaaattttagatttatttattaggagcttggttacatatgtccatggtccttacattatctgaaataatattactttgtagactcaattaattagttaagtaaattaattagaattctaaataaaactatgtgtgatttatgaattttactaaggaaggcaaatttgaagaaagtaaaagagaggttttatttgttaattaaaacaccttgtaggtttaatttattaatatatttaaatagtattttttttatatagttaatattacatagataaaataaatatagcaaaaatcaaatcattgggcctatagttgatttcggctataggttgtgat

SEQ ID NO: 225533 - DNA, 3825 bp, Cannabis indica
tgtttactagtattataatcaattcatgtaacctaaatctgaaatttaaattagtttgaattatatattagtttcttaaatattttacaggataattaaaataatgagaatttaaatttgtttttttttgtaaattatcatattaagtttgaatagattaagatttaactattataatttatgcaattaatcttcataaataaatattggtgtaaccatgactttacacacaaaataaaattcaaacaacaaatcttcaaaagatttcataataatttacatataggtagatagatagaagagatagtcatttaattaataatatattaccatgaaaacgtttctaatttattagacataaaatattcaataatattatcaatcaagcaagaaactatcatatcatgaattaatacaaagaaaattataaatacgaaaaatattgaccatttataaatgtagtgctgtaaaaatacgtgcaggttagcccgacatatatttgttcgtgctttttaaaatatgaatcatgctataaaaaaaatatagatcgtatcgttcatatgcgtgccaattatttttagagaagacttagcttggcacaaccctttagtttggtattttcgtatcatgctcagatttgtgttgtgctttactcgagcagctcattattttcttatatgagctcgaatttgtgctcttcttttccatatatattcgatttaattaactagagaattaggaaactatatatatatatattttatattgcttcaatttttttatataatttgttaataatattttatagactatcatataaaaaaaataattaaattttgaagatttattaataaatactcaaattattattattaaattataaggatttaaactttcatgttggactatttatgcctacatattatgctttttggacttttcatattgtatatttttttcgtgtcgtgtaatgcataaattcatatttttttcgtgttaaaaacacacatatttacatcactattaggaagtacaaattattgcaaaattatcactattaattattaattagaacaaggccagctctaaaattgggtaagccttaagaaaataaaaattattagactatatttatttaaaataaatatagtatttttaaaaattattaaaatataattttttagaccttcgactggatgggccttaaaacgatcttagttcaactttccaactcttattaaagttatattaaaattaattaaagtaaattaggatgatcttctttatagaaatctatctagctagctaggtagtttgagtacaaatattctaatactgaaataaatatgggagcttccaaatttccaataacaataataataataataattaagcagagtcaaattaagtactatagtttttattatttgttgtttacaattacgtttgtaatagctaggtatgtagttaataattaattaattaattaattaattaattaagtggtagtagtagtagtagctgttgttactaagacctcttctcttgaaggcttccttgaaatttgaatttgactttgctggcactatcctgattctccttgctacgcgtacaaaatccctgtcatatatatatatatttatatatatatatatatttatacatgtatacccactaattaatattatattatatagagaaacagatacatatattttcatacaaatgttaaaagtttgactagtattatttttggtgtcatactggtcaaaaaataatatttagaaaatattattaattaatcataagacacacttatagaaagtgctatgtactatttgtattcaataacaatgtttattttttatatatagagaaatgttaaaagatattaattgtgtttacatagcatcttcttacgtatcgagtttcatataatttaatgtgataatttttaaaatgtatcgctaactaattataaaatgacgcatctaaaaagtaaggtgcccaatatttatataagcattatatagaaaggtcaaacaattactaaaagacctctaatatctctttgttacaagaaatatatatctttggaaaatgatgaagacacatctaaatattacacattatttttatgtataatgatgtgtaattaattgtaactatataattttaagtaatatgatttaacttaaaaatataaataattatttttaatacgcctagtatatataatttaactgtatatctagtattacttgtataaattgtatataattttttcaaataataataagtatgtaattttaagtggggtcacgtcatttttaatcataatatttttacgaggaagagttagattaaccataggaaaaattaagaagataaaaaataataaaattatatatttctaattaattataatatagtaattactaattaggccgtacgtttgtttaattatatgggaaaaggtcatatctataattatgctaattaagattaatataattgcttagctttttctatatcataccgttgaataagaatcttaataataattttaataattacacaataataatcattgttttttacattttttttttatttttacgaaagttaacataaaactcatacaacaatcaacagaataattaacttaaatcacaattaaaatttacatagtaacacacaaaaaaactaccgaaataatatctaaattgtaaatttaaaaaaaaaaaattaaaaataatataaaaaataatttcactaattataataataaaatattattttaaaataattaatggagaaattactttaaaaaatggagaaatgataaaagataaatatattttttttttatgtataaaacatgtagtataatttaatataataaatttgataaaatatcactaaccaatcaaaaatcaaaattaactaataacaaatatatatacaaaaagatattatatacatatataaattcttatacttacttccaattaaggtcaccagcaagaagaagatcattctccatatcttcataagcaatgagatgaccaggaacagcattagacagatccagatctttatcatcaacatcatgatcgccgccctccccgaacattcgtcggagggctttagcaaagctttgataactcccatgtttatggaggctaatacggtgacagatggaacgcccttcaagcaccactgtcaccgccggcaccaccgcagctgccaccaaatcctcgtggcggtgatccagcatctgcggtggtgccgtggcttggagataagtattgatattaatattattattagtagttaatcccatgaaggagagtccaccgttagaaggtggagtcgcagtagtattaagccttaagtgttgttgttgttgttgtctcttaatctcttgccatcttctttttaatgagtattgttcttgtctcatcatctgtgaatgatcatagctaccaccattcatcttttttttcttctatatatataaatatatatatatatatatgagaagttgattgatgaaaaggaaatgaataaaagaggtctttctctctttctccctttttttctatagagactttgatgttttggttgggagatagagagagagagagtgtaagtgtttgagatatggatgtgtgagtatatatatatatatataagtgtttttgtgtatctatatatgtatatatgtatttattttaaagtaaaataagtggggaagagagagagacacaaatggtcgggatgggtgaggtaggtgagagagagagtgtgagtttgattgtt

SEQ ID NO: 225534 - DNA, 3674 bp, Cannabis indica
acagaccggactcaaagcaggaggcaccagaagacacaagggagacacgaaggaagggcagataaacgagagaattggtagatgaccatattccctttagctagctaaattttttgcattagttaatgataattaactaagaagtcttagttgaaaattaactaagaagacaatagtgtcagtttttgattattgggacagataatgggacatgcaattggaacggagaatttcaatccctttaataaaagatgtattttataagattcaatacttcaatataccacttggtgaaatgacatttaagtagtttagtatttctttttatctaattagattattttattacagcagtggtgtgcgtatatatgttgtatattctttcaacggaggcggctgcccctagtatctacttggtccgagagtcacataatataatcaaatattaatatatgagaaggttcaatgatcacgtgtcacagtttaagtggtagaagaggattgttactctaataatcttaataatcaaataatttaatataataaatttttgtaaaaagacacctttagaaattattaagcagctgtactcaataggaatgctcctcatatagctacttgctagcaatagagtttgtctatatgaaaatatatctgatcatcatcagcagttaattaactgagctactaaaattggtatattattgtcatggaaaaagcagagcttgtactcattccggggccaggaaggggtcacatggtgccaattgtagaattcgcaaacgagttactgagtggagatgaacgattctccgtaagcattcttatcataagctcaccctttgagaacagtcctgtacgagctgatcccatgcccactaacatttcccaacaccatattcaatgcttccacgttcctaaaccctctaacctacctccctcagagctttatcatgagtcccccgaaaactacttctctctctacattgagagtcacaagtcacaagtcaaagacataatagtcaaccgttttacacccacgacaccgtttcgtctcgctggactggttgtcgacttgttctgctcctccatgaacgacgttgccagagaactcgaggttccctcttacttgtttttcgcctcaggtgctgctttcctagggttcacgttctacctacacagccaccaggagctccacggagcagagttcgagaaatcagattccgagtttcacataccgagttacatcaactcagtccccgccaaggctttgccttctttcgcactcaacaagcaaggtttcgtggccttcgccgctctcagcagagagtataagaagaccaaaggtattatcgtcaatacagttctggagttagaatcccattcagtgtgctcactatccgacggtgtaattccgccggtttatacggttggaccgcttttggaccttaaagttaagagccgtacaccgtcagatcagctggaatatgaccaaatcatgagttggctcaatgatcagcctccgaaaacagtggtgtttctctgctttggaaactacggttacttcagtgaagcccagctgagggagatcgccgccggacttgaacgtagcggcaaaaggttcttgtggtcggcacgcaaagccccaaaagacggaaaattttcaacggctgatgatacagatgttactgaaattattccacgtgaattttgggagaagacaaaggaggttggaagagtttgtggatgggctccacaagtggaagtcttgtctcatccggcggttggagggttcgtgtctcattgtggttggaactcgattttggagagcatgtggtttggggtacccattgtgacgtggccgatgtacgcagaacaacagcttgatgctttcctgttgtcgagagatttgaagttggctgtggaactaagaattgactacagaagaggcagtgatgatattgttagtggggaggagttagagagggccgttagatgcttgatggacggtggtgatggtgatggtgatggtgttttagtgaggaagagagtggaggagatgagtatgaagtgcaggggagctgttttggaaggtgggtcttcgttccagtcatttgaacgtgtcaaggagactattttggcaaacggtcccatgacaacttgtgcgcgggccacctaaatttgactcattatgagatatatttttagttttcttttacaatttcttttagaaataaaaatcatggctcacgcctttaaaaaaaaaaaagttctgaagatttcaatataattttaatgtgatttattatgctgaactaataaactcataacattaaaattaatattttagcttttcttatataaataaataatgtcttatttatttatttgttacctagacataaatatttatatcaaaattaaacataaaattaattaagagtattttcatttttacattttaaaatagtttttttttttcatagaattttatatagttttccctttaacaactaacggagcaacttaaatcgtaaataaaattcatatagcaactcccataaaaactatcagataaaccactagagcaacccaaccgtcaaaaaatattaaaaaaataatatatgagataattctccaattagctattggaatattgtttaattattaataataaataaaagaataaatatttctctttgaattatgacctaccttaattttttcttcttgatttttatgtatctctattttacatatatttctataaagcactacttagaggaggtatcttgcgatcgatattttatatagttattacattaaattatatctgactcgatacttaattatatcaataataatatgatatgtatatgttggagaatactaaatactctagtgtcttttaccattaatctttttacatattaatatgaagatgcatgtggagcatgtttttaaacctatctttatattttctttaattttttataggtacgggacatttagagattttattggatatgctctaagatgtagctcataagacatttaaaggttcctattttcaccaaaaataatgaattatgtttttgaccaaattaacaccctaatagttttttgattgtgggttcttcccttcgaaagttcataataaggttctcttttctcataatgatgcacccctgaaatcggatgagatagttttggaaagcacttcagcttttcctattatacgtgatcaagattctaattttaaaactacaagaataactattagagaacaattgaacttcggttccttggcttcttctagtaaaaatattacaaattttctatacagatgtttttactgccacaagaagggacataaacaatctaagtacctagattcctagcccaaaaaaaaaaaatgaaggtagtgctttggtatttaaatcatgtgttttagagaacaaaaaatctatttggattgtcgattctctatctactaaccatatttgcttttcattgcagctgcttgagacttgtgagtctttgaaccccagagagttgaagcttaaagttggtaatggcgaaatggtatcggtccaaacttgagaaaaagctcgcctcaagttttagaacaattttttttttatttttttattattttagacaatgttttgttt

SEQ ID NO: 225535 - DNA, 3040 bp, Cannabis indica
tttcgagggatgtagaacacttcggaactgcatactgtgaggctttgatcactcgatacggtttctttgtaattgacttggaaatgagcaggcattgagtcaacaactttctttaccatggttccttgtttcgaaaaccaatcactgtctttagttgaaacagtaacccaagaatccgatacctaaatcgaatcgaaatggttagtgaaagagacaagttaacaattgcaaagtttatcagataaagaatcaatttcatatcatttttcctttcaaatgaagccaacaaaagaagaggaaatgttaacatcaataatcatttgtggggacacattgaatactataactaactacatattaccttgtttggaatccatagtttactcctgtctgattctaggagattccaataattaagaatagtattgtcctgaaggaatagaaatccctctgcactgctatataaatcaaatatcttgggcaggtgtctgcataaatccattaaagataaacagcttaaagttttgtccaattttggtacctacctaaacttcattttagagatagtattcaacaagtttaagtaaatatgaagctaaatcccctaaattaaagtcagcacatagttaggtacaaagtcaaatgatggatatgacatgttacctgtaaatttgctctaattgtccttgctctactgcaagatcttggttcttctgcccggccaatatgaccacggttttaaatatccgcccgtaaagtaatctccattcgagagctgtacgctctacggggctgttgcagaacatgatgagtacaacattgccgaaattctttctccatcgaatcagattcccgatctcagttgtcactgtccctgtttcctcaaccccgagatgaacagagggtaacttttgtgggacaaactcctttcgatccccatgaccaatggtggcacgagggcgatccaattctaatgacattagtcttggttgctggtatccaacagcaagcaaatcttgaagccaagcagcagtgaactttaaatccttctcggtccagaacccttcctctgccattgcgaaacttaactcgagaatcttctcgaacaatctgtgctttcctgatctccaagacaccaaaaatttcgtcaaacgacctacattaatgtggagatctttctcttccgaaaaagggtatgcttcgattctatcgaatcgatgaacagttgggggataaaccacaacatatccacctatttcccacaacatcctctgactccagtaacccctcaacacatccgaagccatcgagctaatcgacacaggaagcatcaaagcccaaaatgctgaagaatggtaaagggtattgaatgaattcacaggcaccatcataccctgtggcaatgccacctttggggcatgctcatcaaacctaatgtcaaaggcttccaagcccgattttcgggtaaaataaaacacagaatcaacatcaggcaatccatttgagataccctgttgaataaactgtttcccaccaaaaatttcagtgtaaaactcttcatgttcaatctcacctacattctctaatggcaaacccctaggccaaactgatctttgcccaaaatgaatataagggttcacaacagtcctattaggattttcatgactatactgcataatagtctcttgtctagcattttctcctaccaattcaacatcaaaatgcttacccaaatcaccatcgatcacctcaccacgatcatcagcatcaaagattttcttcgcaccatgctgaattgcaaacaaataacccacagttttcctaacatacgaatcataaggaaggaaatccacaaccctaaaccccaatttagcttgctcctctaaagacaaaaagatcgcacctttaaggctccaatccgacggcgttttggagttcccaatcgccaagacctgccatcccttgatcttcacgagctttctaagcgaatcagaggcataatcagagacggagacgatgatccacctctccgtccgaaaattcgcataaggtgaacccttatcagtgattggagtaatcgaattccaattcactttggggaattcgatcttctccaaagcttcaacctgattctcgaagcagagaagcgccgcggtatcaccgacattccggagaaagaagagagcggcaacagtaccgatcagaaccaaaacagtaacgactttatagagattctcagatacccatgttgagaaatctaggtttttgggttcggttaatctaccgggatggtgatgagtgggcaaactcctgatctgggtctgtttgggagacttaggccctactctatcttgaaccacattgaaatcaaacccttcaaatctctgaccccagaacacaaatctctcaacaaaaaaatctcaataacccagaaacgattttccccaattgggcctctgatcaagctctcaccatgaaaagacctaagaaagcttaagtctttatcttcttcttcttgttctagtagaactagtagtactactactacttgggtttttgggaaaagacagagggagaagagagagaggtataagtgttggtttgtccagtaataatattcttgtggttgggtttctctcagctgcggttgagttgccgacaagttctggttggagtgatgaagagtcggttggtttagctttgcttgggcttgaatataactgctcactttctctttctctttctctagtctgtatgtagtgcttgaagaaggagtaagagtagttgtttagtttagtttagttggggaaaggtcactgtcttcttctctgtattggtctataatttatcaccttcggctgctaaatctaatctatactaaatatattattgttgttattatttgattattcattttgcttaattggcttgcctcatttcatttttgtatataatttgttgtttgttaaggaaaaaataacatattattaaataagtaatataaagttaaaatgtaacttatttattaaaattgtattta

SEQ ID NO: 225536 - DNA, 3508 bp, Cannabis indica
acaaaaaataaacaacaaatgaacaaaatttcaacataaaaagaccgtattttatgtaaataaaatcacaaaaattgtaaaaaaatgtttaaaattccgtaaaaccatatttttgttgttttttttttttttgttatttttgtgcatttgtaaaattaaccctaaatagaatttggtatataattcggctagcaagaatattcttgctctttccctattagggtttttaatttgagttttcgagattttaacgagaccaaatattctctaaaaagccatataagaaatcatcaattcacaagcaataaaaactataattttctctttaaatggttttattattatttttttttttaaataagtcatttttattgtgatgtgtcaaaaagagaacaaatggaagactttatacaaaaagaaatgttaaatggcactcgtggtggttaatattttttaaaaggtgtaatattattagttgtaatttaaaattgagtcttacttattttattttaataaaaattatgaaaatcagataagcaattatagtaggtcacctcataataatgcaagtcatttgaaaattgaaaaccccaataataaaaacccaaacttttttctacaaaaattagtggaagtcaattcatggaaactgaaaaacatagtacaatttacaaccacaaatttatatcatcattttgcaatctaccattgacccctaatatgatagagaaaattcaaacaaaaccagaaacaattttcaagaacctattttttcttttgatataatattccatacattttcaaaatcactaaacataacagatattggattttactgcaatatagaaaagacaaaagtaaccattacaaacactctaaaaaactcaactttaggcctaaactggaactgttctattgttataaccagatggttgttccaactcaacttgatcactctcctcttcttcattctcaccagacatttcctccaaagatttccctttcgattcgggcaccaagaaagtaaacaacatgcctagaaaattcacaacacccaacacaatgagtgagttcctcacaccaatcccagcagagtaccctgcatcaaccttactcttgtcctgattttgagccaaatacaagaacccaaacgcgccaaccatagcaccgagcttccccgatgcagctgagattccatgacatgtagacctgagtctagctgggaaaatctcagctgggacaacaaatgtagtggcatttggcccaaaattagcaaagaaaaaggttagtgaatacatagctacaaacccaattcggttttctttatgagtccaatgattgtaaggaatagctaaagcaaacatgaacactgtcatgaagaagaatcccattaattgaatggcaaatcttcctattctgtcaattaaagcaactgtaaaccagtaaccagggacagtactgaaaagggcaatgagtgtttgagctctagcaatcttgtaaacctcttcaagtgcattcattgactttgcatttggtatccaaccaattgcactaaagatatctttttggaaaaggttttgactgtagaaagcaatgtcaagtaaaaaccaagtactcgttgttccaagcaaatgaagcccatgtcttttcataaactccttagaaaacaaaccgaatgtgttagcatttttcacatcagaagattgaccttttttctctgtttcatcctcaatctcaacttgtaaaacctttgacatgtctgaggctgcttgtttcatgttcttagcaacaagagcagtgtaccgcgctgtttcgggcatcttcattctccaatagtaagtcataccagcaggtaaggctccaaccattagaataattctccaaacaaaatcagcttgtggaacagttgaaccaattggatcaacctcataagaaggagcactaaattgagttttgaaagcagttgacacaataattgcaaacaaaccgccagctaaaatcccaaaaccttgcatagcaaacactgcagcaatgaaagcaccacgagttttcttgttagcatactcagacatgattgtagccgaaagagggtaatcgccaccaatcccgaaaccaagccaaaatctaaagaaacaaagtgttgccatgacagattttggtgtgtgaccaaatgaaagacctgaagcaacagaacataaaaccatcatcataagtgtcatgccatacactctttttcttcccatcttgtcaccgagccaaccgaaaaacagttgccctgctaaagttccacaaaaggccacaccattaacagctgcagacacatttggtggcaatgtaccaggcttctcagcaccatcaacatggtagtaaatacgaccaagtaatttggtcacaagtgatatgcagaagagatcatatgcatctgtgaaaaatcccatcccagctatgatgattgctgtgaaatggtaccattgtgttttggccacatctagtgcattaagtacttgtaattgttctctagccatggctgcctagctagctagctatagctacaaaaaaagtcttcacaaacttttgggattctttctctgcaacaaagtttaaactatagttagattatatgacaaagagaagagaaaagaaaattgatcaagaaatcacaattttgaactaagctaatcacatggttttgactaatagtaacaaatttagtcatatttattcaacaacaagttacttatgtaccataatacccctaaattataaatggatttgttgagctagcaaagggtatcttagtcaactaatgatgtaactataggacaaattgattcaatttaagggtcaaagcacaagtgaatgaatacttatgggattctttttctgcagttaagtttaaaccagagttagatttaagaaagcacaatattgaactaagctaatcacatggttttgactattagtaacaaattagttacttatgtaccataatacccctaaattattaatggattaattcctagagttgttgagctagaagggtatcttagtcaactcatgatgcaactataggacaagttgattcagtttatatatatatatatatatatgagggtcaatgcagaagtgaaaggtgaatgaacacttttctcatgcaaatgtatatatcaaaatttatttatttaaagtatgaaaagttaaaataaatcttttaaagaagctataaaacactccataactaaaggaaaagttgaatgaaaagacaaattttgttatttatgtgaaaaaaaaagacaaatatagtgaccacacacacacacacaaaggcacatacatatatatatacatacatacatatatataatatatatacacacacttttcacaatcacataaccccacatgagctaatcatattgacataagtcatgaaatgaaatttaacaagaaaaagaaaaaaactaactactaaaagacatataccttttatataatagctagatgaaat

SEQ ID NO: 225537 - DNA, 3382 bp, Cannabis indica
aaataataataaagtaaaataaaaaatatgagaataaaacaggtaactggttaccttaaggaggagggtacatctctagttagcctaaacattttttctatatttttattttttccgtaaaattattatttttatttttcttttgaaaaaaattgtaaactttgccaaaaaaggcttataaaaaatgaaaattttcttgcttttattagttaattaatatgtgtgttttttttttacaggttcttgcaagcttcacttgttatgaaaacgataacgttgaaaggtgcctaagagatggaaaatttgtgagtgaagaaatttacaatatggcttcagcttacagccgatcaactcaagatatactaaacgtatatccagacctgcaaagcctgagtgaatgtaaattagtaaaggataagtttagttatgtcgttttgaacgaatgtgtgccgtttcaagtggcagttcggttgctttggctctccatgttgtcgctttccgtaattatggtcgttttggtcctaatttggttcatcaaagctattcaagacaaggctagatgtttctccttgtgctctctaatccctcgacctcaaccacgacccatcatacacagattttagaaaaataaattatatatataggattttaattttgattagtaatttttttttataaataattttttgaataatcaaaatgagaattaaaatgtcaaaattaatagtctatggttgtcgtaagacagaagaagtagagccatgtggagaatatcacaattgtaaaagaaattattaataatgtagctaatgagaatatttctactttttttttggcttaatataaaatttcaataagagaccacgaaacaacccaaaggacaaagccttaagtggaaacaagaggttttgcctcctcggaagacaaaaaaccaaaataaaaaaccgaccacgaacaatgaagcaccgtcgcatgaacctcgaacctccgtccaccacgaacccataaacatcgttgcacgaaccttagtcaacctaagaaaagagagaaggagagagatcgatgcattccaaaaggaaaaaaagagatctgagtatgaactgtccctgaggttacgttggttgcctgtctgttttcgaaaagaggccaccgacctgggtgttgcacgaagatggaagaggaaggtcgtggcagagagttgggagatcagagatgttcaatcgttcgtggaaatcgatagacattcaacatgagaaaagagagaataatagagatagagaggtaaagttgggcgaaagagagagtttggaggaagagagggaatgtatgaatggaagagataaaatatatcatcctaaataaaatcctatcgggataaaataattagggaaatccttaaatagggataaagggtttcccctttacctcatttggttccagcaaaacaataaaaagtgaaaatttaatttttcctgtgaccaaccaaataagacccttcctccaaagtgtgatagaagactcattaggggcgtgtttggctagtcaataaaaaaataatctttaactttgttgataatgtaatgtttcctttttttagtgctcaaccaaacatggccattgtgatgtgggataaaaactttcaacatactttttatcccactttttatttttaagtataaaaagtgggataaaatgttcattttctataatagtgaatgttctcggcttgcacagtggaggtaacatcaaacttgttagtcaatgcttccagcaccacaacaatattatttttggcaatgatagcgccaacaacccacaaacctctacaagctacatccacaaaaatagtaacagtacatgtgcggtaaataggtagcaagtcatcttctctaaaaactactgaaaagcttctgatgttggggatcaagaatctgattcacaaagttttgaatcaaagctttcacactagccaccataaggtaaacaccctcatgaaaagctttattcattgacgtccacatatcataacacatgcaacctacaaatatactaaattgcaacttgagagcaagagggattctaagatgaagatcgaagttcaagattcagttcagtaagaaaaaagtattatcaaaatgtaaattctcagatctcaagcctcattaactaaaaaaccagacacctttagtcacaagacaattaaagaatagatgttgaaaaaaaatcatcacctccatgacagatggagcaagccatattattaccaaaaaccctttggaagtggctaccaaaaggtagggcatctctactaagcttccacatgaaaatgtagagacgttcatggatcttaagcttctgaagatctttccacaaagggtctagatggctccactgttgctttatcaaagcactataagcaagtttggtgaaaaaacaaccttcatgagcatccttctaaatgagtttatcagggtgtatggatggcatcctcttcaaagaaagaattgactcaaccaagctaggcacaaaccagtggcgaagcttatcagagcccctaccaccatttgccttaaccgacaaagggtaaaaaaggatgggaaaacctcgttaatatgattgaaggcagttcgatagttatcccatttaattcaaagaatccacatagcattccatacgtcaacaacattatcagaacctactaagaagcaagtttcatttctcaaaatctctctagtagtcaaaatccaaacacgtcgtgctcattagggtgcgtttggaaagccacaatgtaattggatttgtgtgtaattggaggtaattacacaatttggcatgtttgtctgaccatgtaattacactataactgtgtaattggaagtaattgaggggttccaattacactctccaattctcatggccccccatgagaattgaatgtaattacactgtgtaattactaaaaactttccatattaaacattagctactaaaaaatattattttcccatgtaattactaactattttgccaaacaagatattaggaattcatatgtaattaccacctcatatccaaacacaccttgcattttaaaatatagtgtaattactaaactgtgtaattaccaccctagtaattaccctacctagtaattacacagttacttccaaacacacccttaataaagcagaaaaattatgtgttgcgactttacttggccaagaatctatgacaccaaaggccctatcacatgaagctaattttcatttggcccatgctcattaattgaggtattttgaagataattctactttgttatcaacaattttgattttgaaatataattatctttgtggtcaatagagatcacatgcaattaata

SEQ ID NO: 225538 - DNA, 2999 bp, Cannabis indica
gatgatcttgaattgaagtattggggggagaagtccttattcaagattattaggcaaatagggagacctataatggtagatgatgccacaaaaatgagagataagttgagtttttgctagggtccttattgaagtttctttacagcaagaatacccgagtatggttgaatttgaggatgagaatggttataccacttcagtagcaattacatatgagtggaagccattggtgtgtagtaactgttcgggaatggggcatgttgtagctgattgtagaaagaaagtggaaaggaaacaagaatggatagccagagatgtgagcaagagagacaaggcagtattgcagacagatcatgaagggttcagaccagttaccaaaggctggaagagtaaggaaaaagaagagggaatagtggccacgggtactagtaattcattccaggtcttacaacagattgggaaagaaaaagaaatggagtacgtgagtggaaaagaagatagggagcaacagattaataacaagagaggggggagaaccctctcttggagatggataaaataatggcttggaatgtccggggaatcaacagccagcagaagcaaacatcagtcaagcgattgattgattatcaaaaaattgggctggttgggctcctcgagacaagagttaaggctcggaacttaggagccttgtatgttcgtatgtttgaagggtggtgttttacgtctaataatgcgtggcataaggggggaagaataatagtatgttggaagccggatagttttgtggttaatatccttcaatgcactagtcaaatgattcatctctttgttgaatccatagagaaaaaggcaagtttttttgtcacctttgtttatggttttaactcagaagaagggagaagaactctttggcaagacataaaggagttggctattaaagaggcttggttggttcttggagacttcaatgagatcctcaacaaggaagaaagaattcgcttgcgagcaaggtataaagaagcaaaggagtttcatgaatgtgtggaaatttgcaaattggaagatgtaaaatacacagggaattttttcacttggagtaacaagcaacatggagaagatagaatccactcaaagattgaccgggtgcttgcaaatcagccttggatggagttattcccagcagctgaggtttattttcaaaacgaaggtattttttatgactctcccgctattctaactatatacaatatgccaagtggacacaaaagaccatttcgttatttcaggatgtggtcaaagcatcctgattataaggatctggtatcggcaagttggaacaagcaggtgaaagggaccaaaatgtatcaaatggtagtgaaactcagaagcctaaagcaagggttgtctgctttgaacaggaggcatttcaatgatgtccctgccaatgctatttcagcaaaggaggctcttgatgtttgtcaggatagtttgagggatgatcctctaaatgttgagctgcaaaagagagaaaaagaagctagagattgttatgcacaggcacaagaaacttatcattccttcttacagcggaaaagcaatctaaattggttgaaagagggagacattaattctggttttttccatgcttatcttcgggctagaaggactcagaaccgagtgctttccatcacaaatttagacggagtaagagtggaacaacctgatcaagtgattgatgcattcatggttttttaccaacagcttctaggcagcagaatgagagacaggaggctggtgcaggacagtataattaaacagggtccggttgtgactaaagaacaggcagacatgctcattgctgaatacactatggatgaagtgaagaaagtcatctttgagatcccgagaaataaagctccaggtccagatggttatgggagttttttcttctaggataattgggagatcataggcaaagatacagcagaggccattatgtctttcttacattcagggcagattctaaaagagctaaattccacggttcttaccttggtgccgaaatgtaagtgtccgagcacggtgggggattatagaccaattgcgtgttgtaatgtgctctataaggcggccacaaagctaatatgcactcgtcttaaaaggatattacctaaattagtggctcaaaatcaagggggatttatacatggtagatttattggccacaacatcatgatctgtcaagacctcatcaggcactatggaaggagaacaaagaaagcgaattgtatgattaagttagaccttcagaaagcatatgacaccattgagtgggattttatagaagagatgcttcatggattccagtttccaccagacttcatcaaactggttatgatttgtgtcagaactcctcggttttccttaatgttaaatggttcattacatggtttcttcgaagctaaggggggtttgagacagggagatccaatgtcaccacttttattcgtacgtgaaatggaatacatgtcccgaatcatgaggaggattggaaagaagtcagagtttatattccatgaaagatgtggaggccttgaactgaaccacctaagttttgctgatgatgtcttattattttgtaatggtgacttcaagagcatttacttcttattgtaggggcttaagctcttctccaaaacatctggcttggttcctaacccttctaaatcagcagtttattgtagcaacatgtcggaggttgaagttcaaagagtgcttgatgtctctgggttccaaaagcagagtttgcctttcaaatacttgggtgtgcccatttgtgaaaaaaggatatcctcagccgaatgcaagttgttggtggaaaagatgatggctcggatcaaaacttggagcatgaggaatttatcctttgctggccgagtagtacttatcaactctgtaaagcccgcctagttaatttggaaattagcagttgttta

SEQ ID NO: 225539 - DNA, 6084 bp, Cannabis indica
  modified_base (4)..(4): a, c, t, g, unknown or other
gggnggggggtgttcataaatgctcagttgatttatcccaaccaaaagtatcaaaaccattggtgtgtggcaattccttttatgaaattcattggtatattgtccatactggaataggctgagtgaagatcaagttgaggattgtaatctgctagctagtatgcttttctttaacctaatctaatgtagatcaactaccaccgatcgatatcttacggactctagaatgtccaactgcagtacttgtatggtacttctagagcaatgatggcatataaaccgagtcatagacaaggactaatcatctcttgtacagtaatccctggtccaaggtactttcaacatggttattgtaccccccataatgtacggttaccaaaagcgaattatgttccacttgttgctacccatcaacaacttgaggataataagcttgttatttgtataactgttaaagtttacacttgcatgtgtttccccatttttaatgagcactgaaacagtatactatacaatttgcttttgtgttgcaaacttacgaataaccagtgtacacctagtgtctaaggtcattattttcatttttttcctttgttattttgaattcttgttaatttttggtgaacttgtgatgatcaacaggtaattgcaaagaagctcttgagatttttagtaaaatgcaagaagctggggaacagcctgacaaagctgcatgcaatattctggttgagaaattaagcaaatcaggggaaacgtgggtcatgtcccaaatcctccaatacatgaaagaaaatcatattgttcttcgttatcctgttttcagtgatgcattacaagctttaaaagttgccggcgagagtgacctcctacttaggcaagtgaatcctcattgttccactgaacgagtcagtaaagattttggtagaacaagagctgctgaaatcaattctacgatagacgagtggctcatatttactctattggaaaaggaaaatcttattgctgttgatagcttacttggtcaaattgatgataaaagcacacaattggattctgaaatcatctcaaccatcattgaggtaaactccagtcgttgtaggcctgccggcgctttgttggcctttgagtacagtgttaaaagaggtataaatattacaagaaactcatatctagctttgataggaggtttgataagatcagaaatgtcacccaaggtggtaaaagttgttcaggaaatgatcaaagctggatattctattggaatataccttgcttcggtaattatatataagcttgggagtggtggtaagcccaaatgtgctgctaaactttttagtttattgcccattgatcacaagtgcactgcaacttacactgctcttataggagtctatttctctgttggtaattttgataaaggactggaagtttataagaacatgcagagaaatgggattattccttctttaggaacatacaatgtaatattagctggtctttcaagaagtgaaagtagagttagtgaacttgaatattttagaaaggaaaagaagagactacagcttcaggtccagtctcaggacaccattcccattgagaaagggatttgtgatctgatatttcttggggatgcagtcacttgatgttgtttgtcttgacactattcttttgttcttcataaagtaaattaaaaaaagaaaaattctaaattttcttaaaccatttattaagattgaaatagaaggcaaactgacatattaacggtgttagatttacaactctctaccgtccttgacggtagactggtagagtgcttgacactgcttcgaggttgaaggttcgagggtagagaagaaaaaaaaaatgaaaaacggtgttagatttggtgggaagagaaatgtcaaattcaatccatattgtggagagcttttagacttaggttgtcatatacaaatatataactatatattcgtaataagaaaagaaaaaacaggagaggccttcttggctaaaggggctttaggcaactgccctagtcgcccaccccttaagtcgagtctagccccactcgctcacttatcaagccttttggctcatctgctatgactggttgaggttcttgcttagtgagaaatgccattgatgggcttgacctttggtgttcaccgaagagcctcacctacgaacggctcactcccttgatataaaaccacttagaaatatttttaagtggctagagagcatgccaatgcaaattatgcaatggccaaggacaccctctgggtacaagactcaaaggacgagtaagattgacagggtcgattttagacataggcgggttaggtttgtgcttacggtttacaattttgggaagcccaaataaaaaatgaaaggtctcattagattttttatttaagtaaaaataagtgtattgtaaataacaaatattcgtaaaaataataaaaattattaaaaattggataaaatattaaattaataaaaaatattaattttacttaaaaaatattttcaaattttattttatttatcaacacgtattttgaaaaatcaaaacaaaattattgagattctaataaataatttaaatgaactaagatttttcaaagaaaaaataaaatttctttatatttataaaatcataccttaacaaataaagaaaataaaaataaaatttttttttgaaaaagttataaattaaactaaaaaaatattttgtttaattaaataaatctaattttttggtaaaaataaaatatattcaagtttgttcctttaaaatttagtttttacaaattaaatttttaatatattattttaatatgtaaatgaattttttaataaaaaataaataatcttttatatcacgtaattggttttaaaattatatatttttttttaattttcttaatcattcaaaatgatttttttttttaagatttaaattaaatttgcaaaaaaatgttgaatctttctcatttttattttgaggggatacgatttgatagttgtcaaaatttagggggcaaagttgctaattgacaaagacatgtcatcatttgaacaaaataattagacagaacctaacagaaggactaaatttatgtaaatgtaatagttcagtgggaattcttaacaagccgtatattttaggggccaaaatcagcattgtcgaaagttcagtgagaaaaattactaattattctaacaaaaatgttaataagagacacattaaggtgtcaagcaccacaaaaagtagcatactattattggtgtattttaatatcatctcccacaaattttaatttgataaatatcttagaaaactgttaacaaatcattggataccacatcgatatggtattgagcacattaataacgaaaatgttaaggagcacacataaaggtgtcaagcaccacaaaaggtagcatactgtcattggtgcatttcaatatcagttcttacaaattttaatttgataaaaggtttaaaaaattgctaaccaaatattgtgtatcacatcagtatggtattgagtatcttaatgtactacatagcaataatagtacaaaaaaatcaattataaaaaaaatatagtacaaaaacaataaaacaaatcatttttcattcttattatatagtagagatatgtataggtggagctagtggatggatcatcatacttgaggcaaccactagactatttctagtacataaacttaactcttatctttctttcaaaaaaaaatttaactcttatctctttgtttcatgaaacggcttgttgtgtgacctcctaatctaatcagtggcgcggttagaaggtgattatgtaatttagagtagttataaaatttgacgtatttatttaatcaaataattatacgattattatataacttgaggtaattgagatgtctcaattacactatgcactctagatattgggtgcaattataaaatatcactattttcaaataataaataataatattattaaattatgtaattactgacttatttactaaatataaaaataataatttatatttaattattatttcattcgaaaatatattatattttaaaataaagtataattactctaatattaataattaaaactaacagagtgaactacctaaaagaggaacaatatcttcatatatgtaagcaactatatatatttatatatatatatcttggtgctaggagctctatctagtaaaaacagattagtttcttgagaaccttccaataatttttctgaccaacttcaattccttgatgacatcagtaaagttcattctttctcttggtgtttccacagaacatgcaactccaactcttaggattgcagttaaacactcctctctttgctctttcttgctgtaacccacttcattgttattagaaatatctatgttatttggtgcctcttcttctctttctcctccaaccacaaatattggatctaaaacatctgagatttgtcttcttagtaatgccctcttaacataatcatgaagactcaacccatctttaaacatttcatcagttggtctctttcctgtaaaaatctctagcaagagtattccatagctgtacacatcaccatgtgttgaaaccttacttcccattccatattctgcaaggttttattataaccaaaaaaagaaaacaattgttgtgagtgactatgctaacatgttcttaacttccattggttaaaagggttgttttcatttttaacaaatttagaatttattagataaaaaaaagaaaaatttatgttaattttacctggtgcagcatacccaatagttcctttcaatacaaatgaacttgtttgttgagctgtggcttcttgaatgaaccttgctaacccaaaatcaccaacatgagcaatcatatcattgtcaagaagaatgttacttggttttaaatcacaatgaacaattggttgttgacaatggtgatggaggtaatccatagcagatgccacatcaatggctatgtttaatctttgaacaagacttaatatcttcaattctccatcttctctcgaaaacgaatgcaaccaactctctaagcttccattaggcataaactcatagactaaagctttgaattcattgccttgaaaatcagaacttgagcaaactgttaacaatttcacaagatttcggtgtctgatgtttctcaaggcttcacattcagccaagaagcttttcgaggctcctcgttcgtgtagttgaagtacctttactgcaacaaccaattcatttggatgaagagttgctttataaaccgaaccaaagctaccactgcctaacaaattggcagaagaaaactcatcagttgctttgagaagacttgcataagagacatgtaacagaagatctatagttgatgaattcggtgcagatgaaggctcccttttcagcttctttaacctcaagacaattagagttgacatgatcaaaacagatcccagtagtccacaaaacaatggtataatccacttaagtctttgagatatattctcattcttagacttattagcaatgcaagctggaaaatgcaattctggtatacctccacatagcttttcatttcctactaaggaaataccacttgcatttttgaaaacccctttagatggtacctgtccttggaattggttgaaagaaagattcaagttttcaaacaacatgtgttgaaagtagtttggaatttcgccagacaagttgttgcgtgaaagatccaagtcttgaagtcctctcaatgagctaaaagatgaaggaatacttccttcaaataaattactctccatgtgaagatgttctaatttcaaacaacttcctagctcactaggaattttgccagagagtttattttcagatacatcaaagtacccaagattttgtaactttcccacttcagaagggagagaactagtaaattgattttgagctagattaagggaaattgtcaaagaagaaagactcataacttctttaggtatggagccattaagatagttatgagaaaggtctaactcc

SEQ ID NO: 225540 - DNA, 1136 bp, Cannabis indica
ttatgtgtatcaatataaatgtctagcatatatacgagtgtacacataaataatctattgtgatagttaattagttaaataataccctaaatttactattattttaataaattaaaagattttatggctaaaatttaaacttaaaaagttaaatataaataaaatgatttagaaaaaaaaattcaaaataaataaaattcttcaaaaatattaaataaaacaaattcttaatcggataggaacatcaaagttttggtttttagctattatgattagaaacgaaaaacacaaaaaagtcagtgcccactgtccactagatttgtgatcaatatcataatgaggtggcagagaacattacacagaaaacgacaataaacggcaataaacttccataagtttgataaacggtagctacaggtagtcaaccaaatcactaaccaatcacgcataaacacgtgcagcataacggctcttttaacagacgtctgctagttactaagtacaatgaatacgtgcgtggcgtctcgtgattgggtaggcccacatcggatagaggtatctttgaagttggagtattttatttaataatttttaattatggtggaaaacgtggttagacggaggaaaattccaatgttaaatctatgggcgagagactcgagcgttatataaaccagagaaggaaaccacatatacagcaagagagattgaaaacaaagaacaatattcaaagtgagaattcacctaaaattgagtgttaaacagaaaagctctccaatttttcattcaagttaattatttttcctttaaatttctccctctcccctttacttcccgcttctttgtatccctttctgtctttcaaagttgtgatttagtggtttttttgtttttggggttcaaaagtgtctgcaaactgaagaaaatcaaacccagaagggttgttttggaagccaggtgattcagaatagagatcttttttttttttttttttggatcaatcaaaaggttattttttatacctgtggttggtctctaatcttaggagtacaactttttagttcttattgtgcaaaaaacttttgtttttaatctgaatttttcttggttttgtgtacaaacaaaaaaaacaaaaa

SEQ ID NO: 225541 - DNA, 2819 bp, Cannabis indica
attactagataagagctcttccatttatccctattaagctaagcttgaaggaaatcatcatttcacttctatgtccaaatagaagctatagatttcatatctatgattagtgctccaactcaattgtactatcatgttcccaagctgtacgggtgacccgaaccaaatggtaggctttaactaacaactctaagaacacaaattacactcttgagatcgaacctaaccaaatggtaggctttccaaaacattaagatcttttgatctaagatcaaccagtggtattgacttaaaaagatacaacagtaagattataatatctttaccaagatcaatattggtccctgtcaaatgtatactccatatatctgatactagcatactttgctaatgttttggaaagaacataacacttatccaaggtgtaagtaagatttatcactgactatcacatcagtataaatctagtgcgcagatgaatcatgggacattatcttttgaagcatataatcacaattacctttcactgtcttgacatcactgtaattgtgaataactatatgttcaggatttaacaaaaattgtatattaaaccactaacatgaaaacatgtaaacatatagtgattcccaatattttcctggagctaacatgaagtacaactactgggcagcctccgccaaggtagctggaaaaattatacaccgtacatcacccttcactgcctgcaaaatctatttgcatttcaaagtacttgatgtgagacataggatcttccttgcctttgtatattttccatgttggcattttgaacttgggtagtagatcaattgcgttaatttatggtgaaaagggtaacccctggtcaagttttgggccggtcaggctttgcacaaggctcttaagctaatttatttgggcttgcaccactagatcaacttaacctgcctattgatcgacctgtgttacttatggatcccttagaacagtaatgggtacatagttgtccaaattgatcagttgaacattggcatggttgcattgtttgtcttgtccctttctgcgattcagattctctcaaattgtgtacgaggcccaatctcttaaagatttattcacctcgaggcctccttgtccggttgttatcaacaattaattggtttgatatatccatctatggacggatgttatactgaccattccctccaatataataggctggaaaaacttgctcgtctactgtgtggcccacaatttgactctttcaccttggattggacgatccgttaccttgggtctaatgagtgttactagtcaaacattcatccggcccctactgtgatccgttgaggatatagatgtctatttagatctcgtataactagattatcagtcacctaataagcacagtggcctgcaatgattgttgattgcttcttgttgtgccctcataatcttcatctgtttatccatccactcttggagttggcatttttgctgctcaaaggaaaaattaacgactactcaggtatcttcctgatcatgatgaagagtgttggtgtgctcttgcatgttccctaaagcagctcgcaaattttgcagttaagtgtcatcaccaatcatcactcgaggatctctatcaaatgaccagtctctaaaattttgtgatgacactgaactgcaaaattaaaataataattttcattagatactttatattgcatataaaagtatataatatagaaaaattctacaatgcactccctagaaggggttcaccgatgcatctattttggcatataggaaaatttacttcaattttttttatagtcttctatgttgtagttatttaggacttcctacaaaattttgagaaatttagaaaaaaattaacacgccaaaaatagggttcaaacagtctatttcacacgtgtataaaataaaaatatctaacgtgtaacaaactatatgaattatattttcggcgtgttaaatttttttaaatctgttaaattttgaagaatgtagtcttaaataactacaacgtaaataactataaaaataattagattgaaaaattctttcaaatgttgacataaataataatatataataattaatatcacctagtttggtagctgttgaagctaaaaagaagtttcgagttacatagtttctcgaatcttgagttctatcattatttaatattttcaagaaaaatatacatttaaaaaatgtcttctttttttataatattataaaaaagttgatggatataatattaaaatgaatggagaaaaaggttggtttagttgacaattaactgaaagtaagttctcttagtaatgattaagaacatgttaaagaaattttgggagagaatcagacaaactagaaaagtaataaagattcatgttaaagaaaatagcgatattttggtgaagaagtgatgatgaaggacacatgataaaataaaatttgcatgcatctattgcccatgatacttctgcggctaggacatgatcattatgtgaatcttttattttattgttttctaaatccttttttcacgtttcaaaaaaaaaaaaaacttttttagtgattttataagatgtaaattaataataatatgtacacagaactatatatgatatatgatacatatctatatatatgataaattatttgtaataagtggaaccatagcggtctcaagctggtgaaaagggtcaaatttacaacgaaggtttattcatatacatatatatatatattaaattttatgttaatttttttttctatattatttaaaagtgata

SEQ ID NO: 225542 - DNA, 2917 bp, Cannabis indica
gcctcctcaagtttcctatcagcttcatcctggatggtcttgagggcatcctcgtgctctttgattttcttctagtcagctcgttgttgcttctcaacatcttcctttacccgagagagcttagactttgagtcgttccacttcttggccatgacatcacgatgttctctagtttggcaaagctcagtctcgagcatctcaacttgttgaagccctcggtgttgagcagtaaaagacaaaagagatgcctgcaaggaatgaaaacatgtaataagaaataaatataaagatgaggagagaaaaaggaaaaagagcaaggaaaaactaacctgctgcatgagatcataacttttctacaccaaagcctcaaaatttctcttgttgagccattcccaatcgctagacaaaaagcactgatagcaccgccagttattggtagcgtgtagcgagcaaagctgcgaaccttctgtgccggcttcaataggcaaggggtaggagggctcgaggaagaccatctccgggcaagaactagagaattttacctggtgaacagactaaaggggttgttcactggcgttcaccgaggcaggggcagccttttctagagattttatagacttgatagtgagttggcttgaagatttcttcttgtttgcagttgtttttattctcttgggttctttgatagaactcgaggcttcatttgcatggacaactcatttttcaaatcttttgtcaatgagaggggggctgttgagcatagtttctatgtcgagatccatatctgtgaggcaaaagagatacatcaaacacttgctcaaaaacaaataatagaaaaatggggaataaattcccactaaaaaaaggttaccataatcatcagatgatgaactgggacgagaatagtaattactaaactccctagaccctatgatcatgaatatatcataagagtttattggatctagatcccaatttgaatctggatggctcgcgcttccaaattagtaccatattgctcggcaatcccacaatatgagctagtgcaactaagttggacgatgaacctaggataccacctatcaaacctatgtgttatacggtctataaggaaattatcccaagtatagaagttatattggctatcccaaaaagttactagcaaggtacactctgtcctaagtgcggtaggtgaccatccacattgattaccttgggatgcttcttctttagcttcccgaggggttactttttggagataatgaacgcgggaaacataatcctggctttcttcatcggttgggatttggaccttctcccacaaagagtactttaaaaccttgtagttacaagtatactcatttgagccaaggagattgacagtcctcaggttggcttcgttcaaaagaaagtctgccaatcgcaatctgaatggaagacccagtaggattttatggcgcttgactatctcaagggtggggattggtcttttggaaactgatgtcaacataataaatgtaataagtaagtgacctcaagtcatagatataaaaaaaactcaaaaccatgtttttaagacaggaattacttacgtatgatgcaaaatgcagtcgtgttgataggagaaagaccggtagtccagaagaactcctctttgaactcagtcttatttagaaacctcaaaatgatcctgcgatcatttgtgtggtaccgagataataaaagccccctgagcatctcttcctcgtggggatagctttgacagagtagaaataaactatctcaaggggagtgggacactcccatcctaagatatggtacataacctttaaacttgctagaatcctgtaagaacttggaatcagctgaaagggggaaattccaagagaattacataattttttgtagtactctctcaaggggagaactactctagccttgatgtgctcgaggctccaagcacctatcatagacgagccattagtactagcaccaccgcacttctcgaggataactctttctagagggaagtagttgaattcccctatagcaacggatcttatacaacatctacgcctttgcttgatatcgcaagatattaaaacaccaccaacttattttccaatgactatcaccttggactcaatgagttcaacttcaaaggttatattaggatcctgggggtctttgatttacgaggcttgttggacataatttcaaaatcaaggtcacctggtaaaaaagcaatagtgactttgggtaaaaacaagagactcgctaaaaggatagaagataaaatttggggtaacccttggctgtttgggttattgggcagactggactggttgtatctgtgggcctgtcttttcacgtactgtttaaagtgaccttgagtgatgagactttctatcttgtctttcaattgccgacattcgtcggtcgtgtgtccaatatgcttatggaatttacaatacctgttaggatctctttggatcatcgcattcctcatgggctcgggcttgccgaaggcaacctttttctcatgtgtgaggtaaatattctctcgagtttcattaagctcggtataaattgtatacactggcagatacttatcgtgctttttctgtttctttttatcctttgacggttccttagaaccgtcctttctctttgaatcaaaagcccccgagttatcaattctcgtggaaagaatatttgttgaaacgttgctgggtttgcttcccgagcttattttcaacaaattcatttcctttcaagcttcttcgttctgaacaaatacctgagccctttcgttgaactcagtgatgtttcttattggaacaccttgtaagtcgtcccacagctcgccccctacggttaatggatcagtagagatccctgcctgaagggctgtaag

SEQ ID NO: 225543 - DNA, 3252 bp, Cannabis indica
gcatcccaaatattctcaaaaagatagccagcataggtgaagaatttccacttgtcatccaaaagcaacccctcctgaactatatattttaactctatcttgctcataataggcacaccattcaggaaagggccagagaaccaaagagcttttacaaatgggcactcccaaaacaaatgtagagaggtttccatttctgtttcacacagcacacaagacttatatagaataaagtccaacttatccctagtaggaagactcttggcaaacactctccatagcaaaatggagagtctaaaatgaatattgttattccaaattagcttctaaaacctgctaccaagatcccctgctaagcttaagctttccaaataagctctcttagtggagaagcatccatcagctgcattcttccacaccaaagagtctttattcgaacttgtaagccttctaattgagccaatcttttctcccaactatggttcaaaaatttcttcccatctagccaaattccattcagaactattaaccaagagatctgccaccgttttcatactagtagcattgcattttagaacaatccctcgcgaatcatttttgaccactaaaatcctaagcccttcgaatcacctcctcataggaagggtcctattccaagcctcaaaaaacttaaaggtttgaatcttcgcttcttaccctcacaagtaaccaccaaaataaacccatgatcagaaacagatatagggaaattagttacctcagaactagggtaggacgtaagccaatcatctgacgccacaccaatcgagcctttctctagtaaaaatacctgagaaacggttattttccaagtaaattggcaccctctaaagccaaggtcaatattgtccgtttaaaggaaaaactctcgaaggattttagtatcatatggggtaaccttgctcccacccttcttgtcctacgggccagacataacgttcaaatcaccagataataaccaaggatgatcactctccaaaacctgatcagtgagagacttctaaaactccttcctctctgcatcatacgttgccatagattacaaacgaaacctaattgatattcgtctcaaggtcccaaacagccacttcaacaactccctaatctaccttaataacattaagtcaaatatcattattcctaagtaacaatacaccacccgcaagaccaaccgcgacaatagtataagaattttgaaacccagtagctttcgctgtactcttcatcctttccttgttagttttagtttctatcaagaaaatataatctgttttgtaccttctaacccaagcttgtagagctcgggctatcagggttctaatgttctatgaacaccccaaaaattcgacgaaagaaacctcattggggagggagacttgataaggatcgcctcctcgcccatttgaaaattttgaacttgttcaatagcaacctccaccaactgaagatcctatgtgatagcattaatttcccctgcatcctcaccgtcttccaagattgaccgaaccgtgaccccctttgacttgagatcccttaccactaatctttttcttccccaagcttcctatctaccttttcccttgtcttctcttcgcagacgagctaccacccccattttctgcccttcccaaagaaaatgtggtgactttaagaggtggaagagaaacagtagaattataattatttgtctcttctgtaataagactactgagcaggaatgatccaatcaataaccttgctcttctttttccccgataggctttgtcctgtaatggacaattcattatcattacaagcaataactctttggacctgtaatggacaattcattatcattacaagaaataactctttggaccttgtcaggggtaatatgggctggatccaagaccccattaacaacctccactagatccttattaatgggccaattaacaatagtagactcaggaaatcgatgaggctttcttgacttacacacttcttcatggggtatctccactatttggcgactagtgggaccaatgtcccgtaaaactcattatcacccatcatcacgtaccttattatgaatatgtgtcataagatttcaaagaaatatacccactggtctcctatgcatcatacctagcttttccaaagaacgggaaccaatacgaataggttctcgcattcttctctgctccctctttccattcccaaaagagggagcttctcccagcccgctgctgccactaccaacgacacactttctagctgtcccttgtcctggactccttggaacgtcaccatcaaacgaggtgattacccttttacccttatcaatattattggatgtcggagcttccaacccatgtaagtcctctagtttctgtttctgcatcagcgagatttttggatcgaagcagttgcgaatgggcacaccaaccttaatccaggctccatacagaggaactgctttcctaatgggtggatacgcatatttagtgggtctctcgcactttgaataagtatgagccaaataaccaaagttgaagcaaatagctgggagtttgtggtatttatattgcgacacgggaagcttgatcaaagtcatataaatacctactttcttggccactatatcagtatttttcaaggtcagattcgacttcgacagtccgtaggcctccaaccaaaatctcgccttgccatattaaccgtttgtcaatctccatctttttgccaatcatgaatgttcaaaagtgcgtcattaactagccaaggtcgcttctttagaacgaacttcttatcctcttgattgtcaaagaaaacaccctaaactctttcctgttctagcattattttcatcctccacttgccttttagctcccaaataccttccaaaatctctttaattctacctttaggaacacctttcctaacaatatcaacacttagttcaaagtcaggttcatgttcaatagtcatagaatccatgaactgttggctagcattttccacatcattaccttcaattatctcgacatcgaagtcttcttcctcctcttccattactacctcttcaagatgaagctgagggtcaacagggggagaaaccccactaccatccaagtccgtccccagtgaagtgttctgaatactgggatcgatgttatcctcctctcttgaagtcatgctaaacgatttgagagaaaacaataggaaatagac

SEQ ID NO: 225544 - DNA, 3004 bp, Cannabis indica
cctactatagatttaccctaaatttatattgtatagcttgtaacaagttttgaggaatataatggtattatttttaagtaatatttttgagttataattaaagatgataaaagttattcaaaattatttgtaaattataaaaattaaattatttataatattaaaaataaaattaaaataatttcttacgtatgttattttattttttatacgggtggtaaaaatttatttaaattttattttttgtattatagattatataaatttttttaaaaaaatcacaaataataatcttaaataagtacaacatatgattaaaataaaaaaataaattaaaaaatattattaaagactaattaaaacaaataaaattatactaaaaaccattattttggagaagtaacatatatttcttttctcgtatataaattcaatatgatgaactaattttgtgtgtaataattaattaggagcactcatatccatccaaataggcctcggaattcaagaaacgcggaagcttgagtagagccatacaattttctttgaaaaagacattttaattattaattacttatttacataaaacaccatataaattaggttaaacatgtttttatgatatattttttttcttttttgacatattattgtgtattaatggtgtttattatttagcactatttaaaagtgacgtccgatgattagttagtaggactggcgttaactttaatgggccgtaaaaaaaatatttttaaatccttatttaaagaaaaatatagtttttttacaaaattagtaaaaaaaaaatggtaattttaaaagggggaaaacttttttttttgagtctctgagctagtgggccttaaacacaggcctaatccgcttatgaccagggtcaggcatgttgtgtctaataccttctagatatgtcacattacaattgttagttatactccctaaaagattacattaaattatatgtactcgatatcgaattacgtctataacgatattgaaacgtacgagagtcttaagtaccttagtatttatctaaattttatggaatcagatacttaattacattaataataatataataccaaaaaaaaatattacacagtacacaccactgatattttttaatatttttctattatcgagattagatttaaagcaacttaattttttttaaaaaaaatagaaccaaataaaataatttggccaaacaataagtcaatgacggtggaattattaactatatatatatacatatgatgtggtgattaaccgataattaattaccccaaatcccaattatattttatatatacccttatctataatttagttagtagaagaaaactcattgagtagagagagaaagtcatttctcataattattaaaagataggtagtacaataattgagtacgtacgtgctatataataagagacaaagtttttattaataataatatcatgtatatatgtacccatgtagagttgttaactccataaataaattaagttatatatttacacacttgtattataccaaatatatataataaatgtttcaacaaaacaattattaattagatggatgagatgaaaatctcatatttttttacaacaataaaaatgataagtgccttaattttttgactagtatgtacgtacgtaatatataatactaataatagatataatttggaacagatccacatataaacgaaagaataatcgagaaaaagaaatgtatatatatatatatagctatttacgaaatatatttattataaattataatatttataaacataatattatagagatcaaaaagatttaaatctcaaacattttttttcttattaaatgttttttgtccttatcttaaaaaaaattatgtacctcaaaactttaaatctcgagtcaatttaatttaatttattagttatatatatatatattgataaaaactgttaaaatatttatggcgaagctattttaatatttataattattgtatatatgatcttaattaaaaaaaatagtttattttacgattttgttgtaatcgtacatttttttaactattaattaagtgttaattcaagaatacgtggcgatataatattagaccacatattaaataagctaataaaatatgtcatcatgtgtttcttgaactggtactaaactagtttaattagcacttaatagttaaaaaatagtatgactataacaaaatcgtaaaataaaatatttttatcatattttttattaaaattataggtgtaataattataaatattaaaaaaaattgccgtaaatatctaataagtgtatacattgtgaataattcatgaattcgtcatcttaggtatatgacaatataatcacttgaaattctcgtgcaagtgtcggaaaatcatgacatttcaattaatgtttcttgaccatatacatacatttatataataggatattccaagtggatctattaataaccataatttgtactatcaattcaaagcaaataaactaaacttgataactcataccatatcttctaaatataaaaataaaacatgtatgggcatatttatctatatatttatgcatcaatcttttcaaggtttaattttatttgtctttaggttttaaacaaaatatattattagtttcaattttcaagaccttccaaaagtctatatttatgcttaatattataagtatcatatatttatttcaagctcttttcaaaatatatataaatatattgaaaatttattgagactaattgtaatatttttcttatttgtaggataaattaaaatatttattaaatactacaattagtaatattaaatatcaatcgaagcactattagcaataaataacacacaaatcaaaatataaaaattaagatattaaaaattaaatttctaaaatggaaacacaataaatgtcaacaaaacttaatgagaataggaagtttg

SEQ ID NO: 225545 - DNA, 2323 bp, Cannabis indica
taactggaaagatgctaaactggatagattgtttagttgggttcggggatttccccttaaagactttcacattgaataatgttcaacgcataggaacactagttggagaagttgtggcgatccgatgaactaattcacaacatgcttcttaatggatatgtttgtgctcgtattggctttccactgaatgaaaatattttttcaggacaacgtattccttggggagaaggaaagtttggattcaaataaaatttgatcggcttctgacacactacattcgttgtggcatctagggccatgaacatagtgattgtgagagggaggagcaaactgaagtggatgtttaggaacggtgagttcctaaatatgaaaattggttaaaagaagaagatccaaccatgaatgacttcatggctttcgatcaataccaagccaggttgcaataagctagagcggtgaatgttgaagctcgattggatagagaggagaatgatgttgtggaaaatgatggtcaggtgcagagtgacaataaagatgtagcccatgatccaccggaagtggttagtaaaggaaacgactgcaggacaatggtggtggaaaaagaaaattcaaacaatgagttgggtcacgacgtgggacatgtgggtgcgaaaattatggatgagactcagggccacgatgggaatgaggtgtgagagtgagatgatggggattgagccggatggaatgggcccagctcttggaggggttatgaatggtgctcataattagaccctcaataattagaacatgagataatgatagcattgggcctgcgaatattgttgacaaagggaacaaaggggcttctttgggtttaggccaaacgttgaatgtgagaaaatgagttaattatttttttaaagttaaatgtgaagaactctcgtgaagctttcgagagatatctcgatctaaaaaaatagaagtgtgtcaaaagaaaagaaatggaagagtagactggggaacgacgagggtttagtgtgaatggaggtacaaaaagacattgtcggctctgaagttcttagtccacagtgctagtggagtttttgtcagaggtgattctaggagttcgataggggataaaaatggtgcagctggacctcaaaaatgtatcttgatcaagaataaaactagatttcaagagaaaatgagggtgggtgcgggattacaaaattctcagatcgatgcagatgcgacaatggggcttgttcttgtaaggtggaatttttaactacggagattaatggcgaggtgggtatttctaattctatggatttccctcctctttgatactactatggaagcggtgagccttaagatgtaaggccgtcgagaacaataaaaatcttgtgttgaaatatttaagggtttgggaacccttggatattacgtgcgttacaatcccacattcgggagttagacccgagtatcatcttttttagctgagagtaatttgatgaggtttcaaccaaaacaagtaggtagcattttacattttagtaaattttggactgttgacagaattgggttgaatgggggattattgttggtgtggaaggttaatttagagttgagggttgactctagctcacctggccacatcgctggtgttgttgggggcaggattttgaaaaacttggagggagagttagaaattaaagagttatgaaggattttagagaagtgatagatgattgtcgattaatcgattttggctgtaataaaataaagctcactgggtgtaatggccatggtgaaactagtctatgaaactattggataggggattatgcaatgaggaatggttgcagctgtttgagggtgtggacatcaatgtattggacttgaggaatttagacaacagagccttagtgatagatatactgattcgaaacccagatgataaatgtggtcaagtgaaacgtcgaagtcagttttatttcaagaaagctggtgtgaggaggtagagtgccaagacattgttgtgaagcattgggagaggggaacttcggtgggtcgacaagaggcttcaagatgagagctaaagattgtggtaaagcattacaataatggaacaagaccaagaaattaagaagttgaatgttgatattagcattatggtaaatcattacaataatggaactatattaccgaataaaatttatggttcagtcgcgaactaggtttttctctttaagatgttcgcgatactgtctaggaatgtacaagcagtcgataaatatcaatcgtccttaagataaaataaccatgttgaacactgtat

SEQ ID NO: 225546 - DNA, 5214 bp, Cannabis indica
ttacgctccacttaaatacgtgcagttaattttaaaaaatcacacacctgctatttaaaccgtctttgaggaggtcaatgctaacgtggattaggacacgctgccaaatgtaccttgctgaggcgtctcgcctagtacataagtgagtgacttagtttacttatattccaacaatggcatgagcaccagtgtactgagcaaacttaagaactactctttgacaataaggccttgcagattggacaatcatgtccttcaagttattacacttagttattataatgtatattatatgctaagtgttctaataaccaattcgccttctgatgcaaaacagtttctcgtcaatacggaaattaatagtttctacatccttgtctcgcttaagaatatacaaccagcgagttacgaacatactctatttattctatatttaatgagtcatttcgctaatgatataattatcatcatatttgttgattcatattccataagactgacacgtgtcactttctgaagtacaaccgaatttcgactataacagtagataattaaggatttatttattattatatgcctcttagtatataattaaggcttacagtcagaaataggctttaaattataattttttcaattatagagatatatttaaattctagatgtattatgtatgctatacatgaaatttcatatttttgatattttatgctcagtaatagtagaatgtaacgatttggccattagagtctcttagatgcgatggagtattttagaattagcgtgacaaaataattagatatttgcaatatcggtattatttggggttgagatttcaaaccattttacctctagactctttgtgttgcttcatggtgaaggaagggaaaaaataaaattttagccctaatttgtggatttttgtctttagtgggatcttgttaattcccaaggtttaatcttattttagtttaattacatttcttttattgatttagaaaagttagaagaaaatagaaaattctcaaagtcaccctctctttatctctagtctgccacaaggaaacccccaccccaaccaattttctccatcattttctaactaaaagcaaagagtttagctaggtatttcatagagtttgattgatttcagctcaaggtaagcttctcctctatttttctctttgaagtgcaaaatttgagggtaagattttgtatgacttgaggatgtttaggattattttatagacttgttttaaggttattcatgttattatttggttttttggtgggttgtagcaagtttgaactaggtttgagcttttgaagctcaaacttagctctttaatggtggatttggattcaatgattgatgacgctattttctgttggtttatgttctttatgtctcaaataggtgttttggagttttatgtatgatttggggtagatttgagttgaaaataagttttttttgaaagtttgcagcaaaaaacagcaagccatttttataaaaacggtctaccttttttagtagacaagacccagaaaaacggtctaccgttttttagggtatttttcctaaagtctcctttttagtgtttcgtagataattagggtatattaccatgctatttatcgataggaaaacttttagttttgactctaagtccctaaaaagtaatttagcggatcacttagcagtttatgtatgtggtgacttagggaccttaaaattgttgagcaatagttttcactcaggttgaccgacacaccagaattcggaactgaggtaagattagtataatgatatgcatgcttacatgtttagctacatgctttatgatttcctagtagataacatatcagtaagagcattattaatgaacatatagttgcactgaataccgacggatatacattttgcaaagtacgaattgatgctatcatattggtacgactagagtaccaagtatacgctgatattatggttaattgttcaaccgtacaaactttccatacctagtacgcgttggacgtgggatagggttgtgattatgtgtatgggcgcttggtcacaatctagttttatatttatgcttttcttatgagtctatcgactcacagatattgtttacatgtgtaggtaaaggcaaagcaaaggctgagcagcagtgacctcgagctagatgaagattgtacatatcgaggcagttagaccaggagtgttcagatgttcaggacagttgaactttattatgatagtcactaagcgatgacttttgtagtacatgtattttgtaactcatataacgggatctcgagatatgtattagtttatatttatttaagtttaagtttatttatgaaattttaattattctcattctacaataaaacttttgattagtaaaggagtgcacattacttagaaaaaatgataacatgcctaatgtagtaggacgttacaatttggtatcccaaccgctaggttgtcttttatagagcgtcacgatatgtacaatatattggaaagcctgttttatcaggatcttatttactattcatgtttgttggattaaactaatctaacaacctaatatggattcttgaaacaattaaaataaacacataaagggattaagaaatcattacagtggtttcagtggaatatgttgtctccttctgttcagttctctaacccttgatcttttctatcgtgaaatattgccaagaatttaactataatcttctcttccttcgaatgtattcattacaatcttccacaaaattttgagtttcaccttgaatagtgtgagtttatactcaagcaccattggaataaatattttagagagttattgcttataattttaaaaaaataaagagaagaagaagaaatgacattaagtttcttcaattctcttctctttctttatataggcattcacatagggctaggttttgatgagatggactaaaataaaaacttgagctgatatctaactcacaacactgaatatattatgggctttagagttatatttttactactttatttaaattaatgaatctaaagtgtatttttctatttcaccatttatctcatttaattatttaaatactaactttattttaataattagtaaataaaatagaatttaaatatatttatcaattagacccacaaagtatactaattaacaaattaatccctatttcttttttcttctcaatattatccaagcttggtgaaaattctcaaatatgacatagtctattttcgaattctaattgacttattaaatcaattagttgagtctaaaagatgatattatcccaaaaaatatggagatcatgggcctatgtagtcaagctcctactaagtagatctaaaatttatcgagtaaatttcttatcttattaattcctcgtaattctgctatagattcagaattacactcttgattacatagaacgctctatatgccaaacatagatacactaaaaattatccatgattcaatcataacaattattgatcctctatatatgatttacattgagtagagacaaaattactattttacccttcaatgtatttcatccttaaaacacttagctactcttgtaaatgatattttgggaaactaatataattatcaaactgagcactctatcatttattgcgttaagccaagctttaaggaaatcatcgtttcacttctaaatagttatagaagctatagattccgcaactatgattaacactcccactgaattgaactaccgtattcccaagatgtaagtattaggcaaatcctactcgtaaccatctcaggattgagatcaaatgatctatgatcaaataattgatatggactgagaaaagatgtaatagcaagtttataatatattttcccttattaatatcggtctagtttgatgtatagccgacacatcaaatcctggtttagtttactaatgccttgggaaagatatttcactcagataagtttaagtaaactttatcactaatatcacgtcagtgtaaattgagtgcactgataaatcgtgagactaaataatttgaagcatataataacaattatttccactatgatgacatcattacaattgtgaataactatatgttcaggatttaatagaacttatatattaaacctataatcatgtacgaaacatatgaacaaagcatatgacaaaattaagatatgattcgtgatccttattgaaagtaaataagattacaatgaaattaagttttatttatggaataaattctcaacaaactcccacttgcactaatataaaaccaaaagtgaatttcaatttaatttatatacttgatgtccttatcaagtgtagtatttggcataaactatgtaatatgatctaataagctgtattcagtatcaatccactccgtcagcatattttccttggtcacaaaaaattcataattttgtgaatttcccatccgtatattttactcctcttgaggtacaagactatttactatttggcaattgcatttgtgttatcacaaagtcacagtagcaattatttcatgtttggaattatgccaaagtttttattcaactttcccgagtttgaataattccttaattgcctttagggcaaccttattattcagccatactggaagagttagtgatcttgaattggtttttacacttctctgaaattcactactccacctctagagtaatcactatctcatatcaaaactctctagcattgacaaaagtctataaatttgatttggtgtagcctaagggttttaaaataccacccttatagctaacatatagttcaacttcttgtattttaggatatatttgattatcttctaacattcctttctggattgaactaatacttactcacagctcccactcaatagtaaatgtctggtctaattgcatacaagagcatatataagacctcctactatttgatccttacggaatccttttcactgcctttattttttctagagtagtcaaaaataactccttagataaataaaatccatgtctggaagtttaatgaattctcttgactaggaaagtagccaactgacttggagtctaataaactttgattaatcatcaataaggatttgaaaataaaaaataaatagaaagaacacacaaaattatagaggtt

SEQ ID NO: 225547 - DNA, 2633 bp, Cannabis indica
aagattacattgaaatagagtttgagttagggcaaaaaacccaacaaattcccagttgcactaacataaaacaatcagtatattttagccaatcaacctatcattcgcgaatcttcacccatggcaactcctattcttcctcccaaggttcttggcaagggcagccagaaatatagtcgtgaagcctgctccaaaaagggtgagaaggccatagaagttgtccaaaactaccttggcaagtacctgctaggtgttgataagcagcttcaggggctagatgatgactcccctaatttcatgatggccaactctttgagagatggagtatttataagttctcttattatttgttcaactttctacttcatgcactgtacaactctattaaccttgtttttttttcagtgtctcttgaagcttggttatgctcatgccaaagccaagggctctgcagcagccttcaggaagaaacttgaatgcaaatatgttgaacttatgaccaaaaatgtacagattcctaagtttgacaatgtgaaggccgatttggagtcggtataaaaagagctgagagaggtaaaggaccagtacgatggcgtgggtcagctacttggtattcgtaccaatgaggtgaatgaacaaaattcagagaatgtcacattgaagagggcgttggaggctgctaagaagatcggccagcagaagcaaaagagtcttgatgcaactttatagggtcagaatgacctggtagccaagtatcatgacattgccatggagactttttataagtgttacctccataatccttggcgttacttttcttagattgagtctcttgatcgtgattgcatgatttcttggggtagggagctatatgaggctagagtagccaaagaaaatactctaggggcatttgccgataagcctagccaagcttctaatgaggtatatataggccagctaggtggaggaggccgaccatcactttgtggagatacatgccgaccagccattgttgaagacacatgccgaccagggtttggctgagcaggtcattgatggggctgccaagttgttgattctacccacgggactcttgttgttaaggctgccgcctaagacttatctgcccatgactcagctgcacctaacaacactaaaaaaacttttgtgttattatttttttgttctttgattttgcactttttctttgtttcggcatggccatagcctaatgcatttaaatcaatttttttggcagttcttgtatggccctaaggccccttattttcgaactagtgactgaccaagcaatctttgatcttggctttatcttctttccgttttttgaacatgtagctgactgggcggcctttgatcccatgtttatgcattttatgttcaccttgaagcatgtcattcacacatacttagttgttaagatctggctttaacaagcttaattttttggctaagtatatctatgcttgtttgatgttgtgtgggggtgcccccaagtgatcaagcagacttatggtctcttggtcgattgaaactcaccaagtatttagatccttttcctgtaaattttcttaggaagaccgttttacatgcatgttgaactaaaaataagaattatctttaaaaagtttattcattagcaagttgtttgacacaatttgaactaaaaaaatgtcttttattcattaattggtcttatatatgcgttgttattatgcaacgtacaattttgtgtaacaaaagcttaccaatacaaggtttgcctttaaaaccatgttttggctacccctacacggaatatcgtgcaaaggccaccactgaagagtggtggtcatatagctcttttctcaattcatgtatagtgagacattataggaaccactactaaagagtagtgttttgtacaaatgagttacaagtagtgctttctaagatattctctatccaataccttggtaggagaaccaatttcatcttctcattgtaacttcctagtttataagcacctttacgtgtaatttttatcacttggtacagtcctttccagttaggtccaaacactcctgctataaaatatttagcattcaggaatactcttcgtatcactaagtatcctacgaagaattttctctccttgacttgcttattgaagtacctggcaactttttgatggtagacatgtagttttaagttggcctggtctcttctttcttctttttctacaagggattctaccaatacggtgtgttttgttccttggttttgtggatgttttttgattttattgtaacatgaataggtgttcatgaagcttagggtctcatggccagttgtagcatctactagttggtcgctcattggcaataggaaatagtcctttggacaagccttattcaggtcagtaaaatctttgcacactaaccacttattgtttggtttagtcaccaagacaggtctggatacgcaaagtgggtaaaaagcttcaatgataaagtaattggcctgtagcagtctgactttatctttcagagcttatgctcgctctttatctagcaacctctttttctgctgtacaggtcgaaaatttggatctatgttcaaggcatgagaaatta

SEQ ID NO: 225548 - DNA, 4852 bp, Cannabis indica
tctcctttgcttaaacttttcttatacaatgctaacttattgccggtaaaaggaacatttttgtttaattgacttttttttttataatttgagataaacccagttgaaattttgcttcattgcacattgctccatcgcaaagtttttttcttttcattaaaatgttctgtattggttgagttgttggttgtggttgattcagttgagttaaagcttcaattatattaattcaatataagtcaataaatgttatgtaaattatgctccatataggattcctgttaatgggttttgtctcatttcttgaccatttattcaatgaaggtcaatggactctaatgaagaaaataaagagaggtgtcagagtccaagaggttcttcttctgatatgagtcaggtggttattgatggtttttgtggtcagagtgaaggaggtgaaagcctgaagaatgttgtaaagaatggagtggttaatgatggtgaacatgatgagaaccagagcccgaatgtttcatctgttgacattgatggtgaggaatgtcaaaccccaaaattatcttctgttaatgagtgtgaaatggatgttgattatagtcgttttgagtcttcctcagtggatttatcagaatctggcagtggtgttaaggatgaggaagaagacttatatttggttccagatgttgggattgagtttgaatcagaagaccatgcttacaaatgttatagtagatatgcggttttggaaggtttcagtatcagaaaagattttgtaaacaaaagtaggatagatggtgcagtggtttccagaagatacacttgttataggcaaggctatcggcccgtcaggccgaatagtaatgccaggaaaccacggcaggagactagaactggttgcttagcacatatgactatagcacgccaaaccaatgacaagttccgtgtcactcattttgaaacaaagcacaatcatgagtttgttaactcctcaacaactcacatgttaccatcacagaagaggttgacttttgctcaagcagttgaggatgagttatctaatcattgtgtgatagatggtgtaccaaagcttggaatggggtttaactcagaagatcaagcatatgagttttacaatacatatgctggacgagtaggcttcagtgttaggaaagattatgtaaataggagtaagatagatggtgctgtggcatctagaagatttacttgcttcagagaaggttttaggcagagagacaaacgcgatatgaacgtgaagaggcctcgaaaggaaactagaataggatgttcggcgcagttggtcatttctagacagtctgatggtaaatataggattactcactttgaggaaaaacacaaccatgagctagttgctccttgtagaattcacatgttaagatcacagaagagattagttgtgacacaagttgaagaaggtagtttagtagatagttctaatggtcaaccactggcgataccagcttcggatttattgtgtaagacagttagagatatagattataaaggtaaactaccatccaaatgtacaagagaaataagggaaggagaaggtgttaaaatgcagcaatattttattggcaagcattctaaaaacccttcctttttctatgctatgcaacctgatgctgatggtcaaataacaaatgtcttttgggccgatgcaaagatggtgatggactatggtgattttggtgatgttgtttgcttcgatacgagttacaaactacataatctctgcagaccttttgcaccttttattggaataaatcatcataaacaagtagtaatatttggtgctgcacttttgtatgatgaaacacttgaatcttacaagtggctttttagaactttcttagaggctatgtcaggtaagaaaccaaagactatcctcactgatcaagatgtggtaatggctgaggcaatcaatacagtgttggtaggagcacatcatagatcttgtctgtggcatctataccaaaatggagtcaaacaacttggttacatgtttgcagggtcaagttcttttattaatgatttaagccgttgcttttttgatcaggaagaggaagaagatttcattaatgcatggaaggctatgttggatctgtacggtctatgggaaaatgattggttacatcagatatatgaaaacagagaaaaatgggctataccatatagaaggcatattttctctgctgacatggaacgttcattacgattcgaaacttttactacaagcttgagaaagtacttgaatcccgattcggatgtcattccctgttaaagcatctagctaaattagtgaatgattttcactacaaagaattggaagctaactatgatatgagccaacacctccaaaattaatgggggatgtaatttttttgaagcatgcaagggatttctacactccatctgtatttgaattgttccagcatgaatacgagacatgtttaaatatggttgcgaaccaatgcacgaacagtgaggcgctattccagtacagagtcagtctatatgggcaacatagggagtacacagttacttttgattcagccgatgagacgatttgctgcaattgtatgaaatttgagtgtgttggagttttgtgcagccatgcaatgaaagtgctcgactataggaacataaagcttcttccaactaagtacatcttgaagagatggacaaaagatgcaagagtctgaaactgagttaattggctacttatagcatgagaagactatctgatgtaacagtaacttataattagatatagtagctggatttggagtaacagcagattttgttcaaacaatatgtgaagaaaataataggaacaagcaaacactgtacataaaatcagagcattgtataaagaatgtttcttttcttttctcaactattgtatttttatttggttatacttttggttgtgtttcaaacattatttcaacagttgatttgaggaaaaagttgctttctttagtaccaaaagacaattgaaaaccacatatatcatagttcatatcccagaatacaagtcctaacaaaagaattatgtactcaatactaattacaaagtggaacttggaatgaatttatgaattatgtctaaattattcaggagaaacttttggcatacataatatccggggattcttcaaagcttatattcgtctgctttcattaagccctgctgaatatttggagatctgttctcatgagttatcgtagtcgtccttgtgggccgtgaaatgagagaacaagttggactacgagcattctttccctgaatctgtttagagccattgctcttcactggtggcctattgggagtttgagaagttctcttctcaactttggtaggagtaggcttgcttctcagattaggtgattgaggacgagtaactggaacctgtaaaaacagttcccaccaaaggaaatatcaagccttgtaatatatgaagtttaaggggaaagtgcataggcttatttagccatacctttttcatctcattctgttgaggttttctttgcttgtaaaaatcaggcaatggcctggctttgaagcaaaggcttggatttaaattcccagctgctatttctggtttttcctgcatatatgttattgattttggcactgtgttatatgcactctactgtacttttccaaccaactaatgaaaactcaatccatatgaaagaaataccttgacttttgtttgtagctgctcggtttttgcctcattcgcattgaatttttcttcaagcttctgaaacagattaaataaggaaatgacattaataagttaagtccatactgtattaacaataatatgttcaaacaaggaaaagaaaggcagagaaaagagccatgcctcctgtctttttgcagctctttcttcagtcctcaagctgaaaggagtggatgaaaatggagatcttgttttgtttctactaccactgaaaaactttgaacaactggacaaagaaaggaaaaaccaaaagacaaaagcaaatcgaacaactcaatacaagatgtttgttttgactttgattcatacttgttacttttgatatatgttttaatgaggctttaaagtttaaagtagtttttggcttcaaatcaaattacatgtccacaacttcatctttctaacacaatccagaagattgtatttcttaaagctgtcaaagatacacatgctttgcaatattaaaaatctatataaagaaaagaaaaaaagattactctgtagggagcaaccgccattttggtccagatgatttggttcctgcggttgggggattgagtggtgttgttgttgtagccctgtaaagtcacaaaatgcagtcttgttacatatgagttaatcttaaacaaagaagaaggaaaaataaatggaatagattatgaattttgtcatgtagaaccttctgtttgatgaacaaggagtgtttagagtctgctgccgaaccccattcttagatacctgcagtagtttaagaagaatcactttaagcatacttgagaaaaaaactgataaacaaagtatttgatgggaaaagttcagagaagaaagaggtaccatgtttggggttcttaatggagtggaaagatctttatttgccttggaagaactggcacccattctagaattctcaatctttctaatgactgatgaggttattctattaagctctctaatgggtgtgaaatttatagctttgtgaagggattttggagttgatgatctcttcttatcagcctgctctattactagtcttttattcaatggagtggcagtagtagtag

SEQ ID NO: 225549 - DNA, 4111 bp, Cannabis indica
cttcccgatacctcccaaggaaacaggttagtggtattttagaagtaattaacacaaatatttatataatttttatttttaaatatatataataatattataaaattaataaagaatattctgtaaagtaattaggatattctgttaaagttaacgtaaaaaattaaaaataccgttaaattaaaaattttattacataaccacattttatataaaataaatattttcttttttttttcctttgtacaagtcattttctgcctctattgcacaagcttgaaaattgaaattgatagttgtgttgattccctgacgcgtatccccacttctccataaagccaagtcttaattgattactatagaattgacttgaggtttggtttagtttttctagaaggaaactccaaaactacacccctaacatatatcacataattttcaaataaaaatatcaaccacaggttactttcggccaaagcaacatcattcattaatcaacactccattccatcatcaactctaataatttttcttgtatgaactggatatgactaaaacaagcttgcaacatacaatggaatcaattttgaacatggaattaattaaaacttattagtccataatttttttttccctaaagtcagataaaaatgagaaaaataagagttgtctcatgtctgtgttacatatattgggaaagctataatctctattcttccacagctatcccactacataaaaagatttttatttgtttattttcaatagttatggataaatcaatactatatgattagaccattatcataataacattatctatgtgacagtttatgttagttatttagtatattcatgtaccatacttatgcacattcttccaactcaatcctccttaataaataaataaataaataaataaaaagggcaacattcttattgtttgtttggtagcctaaattagaagataaactcatgagctggaatattgatgaagcaaaatgcaattattattatttttcttaaaaaaataatccatataaaaaaatgaaaatccagctgcaattcttttcttgcatgccaaacagcctccacttatttgtattagtcaactcaaacataatgtggcatgtataattttcctttcttatacaacaagtattgatccagatatcacaatgttgcaaaaaaccggctatctaatttgaattttaggaaaggaaaataaatatatattaatgaaccaggatatttaattataaaaagaaaatataagtaacaatttatatatttcatttttatttaattgaagtttgaaggttttatttcattacattctcaatcatgattactaaaaaaaaccaaatgtataattaaaaagttatttcagaaataagaaaaatatagtgggtgactgggtgccttttgcccctccgataggagtgttttaaatttttcacatgaggatatatattatacttatttacgatatcgcaccaaatttcataaaattttgaataatatataatgtcaaaaactacttaaaaaaatgacatatcttataagcgtaaaataaatttcaaaattacttatttctcattttttgatactataaattatttaaatttttcaaaattttgtggacaatacaacatatctacaatatacattgttacataaaaatttaaattatgacatccaattatccatgtgccaaaagtatgaaaaataagttattttaaaatctattttaacacttcaaattattagagtttcacaataatatatgagagggtaaatatcattttggaccctgtgttttgtaaaagttatcaattagaccctctgttttattaaataacaaaatagaccatgtattttctcaaatggtacaaataggaccctgaattgattttttgtcaaaataaaatttaattataatccgatctaaaagtggtataacaaaattgtttacattttctgtatctatttgtattaggaattgttttcaagttgattatattaaaaaaaaaaaagttgtcaaaaattaagctcaaagtcctatttttactattttgaaaaatacaaggtccattttgtcatttaacaaaacacaaggtctaatcggtaacttttacaaaatacatggtccaaaatagtatttaccctatataagagcatctctaatagagatattttaaagaatccttaattacatggatatattttttacatcttttaatagatacttaccgttggagtgaaaaaaaaatgccaaaaaagaatgtcatacaatgacatcttttatatcttctctttcttatttttttttaattattttgtcataaagtaaggaaatttaattatttatatatattaagtaattatataatattattttaagaatttttagaagtacttactataggaacattttaaaataaaaagtgtcaaaaataatgtggaagaaagataaaaaaaatattatatttctaggtgatctgaaggttttcgacacccttaaagaatggcaccattggagatgttctatggctagggtcctcaaggttgatgtctgaaggaataactctctcaacaggtggatacagaccatacctcctaaagttctcctcagaggccaacgtacaaatattacaggtggatgttaggagagatagaatgtggttagtcctatccctcagtcgcagtgtggggaatggccaactaaaagttggaacctggtggaagtcctggcagacatatcatatgtcatatgccataaagtagcttctaacgtactttccaacctaagacatagctgaatcattagtgttgtccagccaccagtagccctgctggctaaaatagaagtacctagtcctatcctggcatgggatggacttaaactctaagaaataacacctcaaaatttgaaagttgtggccagcctagctcgacataaagaacgaaaagagctgacaagtacttgatcgatgctcttaggtgcaatctgagttggacaaagcctaaagaaattggaaatgtccttaaagtatgggtgtagaggaagcaccctaccctgctccgtatgggaataagaccacgccatccaattcagctgtggattgtgagccaagtggtctcgagtaggcctaatgcaccggaccttcccaataagttcgctatcaatgacgttgtcaaacatatcccttgatagtgtagaaggaggagatacccacctatctccttcccccatctgaagaatctagggctcagtagtctcctcctcaatgtggtcaacctcaacctccaaaggttaacctctgttgttcagaggtacactagcctcatcataggagcccaagagattgccctggacaacatcagccaccttagagcgcttcctactagccctaagctcaaccacaggctcaacctggtctacatccagctcctcctcttggctggccataggctcctctgcctggccagcctcaagctgttctgcatccttgacttgacaaactctcccctatccatgagctcaacaatatcgaaatcggtcggaggcgcctttaaatatgtttactttgtctatgctagctttgattactacttagagtgttgggtaacagtaacagaaactactactacaggaagatctcttagtgcaggagatgcctgcccaacaggcaaggtgtcaggaaatccttggcggacaatgtaagtccacaacttaggcaagaacggtctccacccttgattcagttcccaaatgaatctcccatagatctcaccccctatttgctcagaatagtggtgatgttgaatctcaagtttcagggaatcactgctcgcttcaaagtcacttgaagagctgtctgacgagctcttagaagaagaactagctaagtgttagttttcaaatagaagatggagcaagtcctcgttaatctggttgtcacctccccaataatcacgcgggttcatttgtgcagaaaaacaaacggaggtgagaaattagagattacaaataaagataaggatgaaaaacatggcctaacaagccaatacccataggtactaaccgaccaacctatgagggtctcag

SEQ ID NO: 225550 - DNA, 2099 bp, Cannabis indica
agaggtatgtttcaaataaatataaaattaaaggcaaaattgattaattgattaataaaatggatatttttcaacttacccctttgcttatttggcagtgaccatgggtgcatgcagcagctgagcagcaccaccatcacgtacggtacggcggagtacattcgctcacttatatatatatataaatataaatataatgaagatttattaagaaattaataataaccaaaatataaaactatataaaaaacaatcacatatatatagtgcaaagaaaacaacaatataactttcatccaatattgttctacccattataaatacaatccatatctgaaattaatgcaaataccaatataataaaaatggatcactattttttttcatgattgggtcgtgtaaatatttcttgagcagtagtaggcttcttcattcctttgttgggatctctagtattattaatatccttcttttcttcttcttccccatgatcattatccttctgtttttttgggccaaatagatcttgtgggctatggaatgaatacggtgatgatgatgaactcatatctacgtaccttctaatattattataataatatatattaaagaaaacaaatctccaaatgatgaatgtatataaaatatatagcaaagagagatggtatatataatatatatatatatatacccaagctagaagatgtatgtatagttgatggtgatcaataatatatcacctctcttctcaaatcttactcagcacatatatatataaccctatggtgggttcattcaagacaaaacaagaaaactgtattgaccacgtagcttggccgtaactacggttacacaatatatgggtcccacttcttttggcttattgcaactttattagtccaactgttggaagtttgtgtgcaacttttggattatgagtaggaatttcacacgagataaaacttttatattgttgaaaagcagaagcaaacggctgatttaacaaattgggtcgtgaatgatttttttgtacaaaaattatattctcaatgatttatttgacgatttatatgattactataattctgacaaaactcctaaagaaatttagaacgcattttaaaagaaatacgacactgaggaggctgaaattaagaaatatgctgtcagccgctaccttaaattccaaatgactgacgataagtcagtggaggctcagtctcgtgaatttcagaaaattgctcacgaaataatttctgaaggtatgtctttagatgaacaattccaaattgctgttattattgacaaattgcctcctggttggaaagattttaaaagtattctcaggcacaaaacaaaagaattttctttggaaagtctgatcactcgccttcgcattgaggaggaggctcgtaaacaggaccagaaagaagaagtgcttgttgtgtcaaacaacaacactacgaaatccagtgcgattctgaaacccactgggaaaaatttcaagaatcagaatcgcaagcatgctccaaaccgtaacaataattctcggaataataataagaattggtttccaaggaaccaaaacaaacagcagcaaccccctaataagaatgacccgacactgtttttgtgctttctctgtaacaaaccgggtcatatggcacgcaagtgtcggaacaggtctagttctgctccgcaggctaacctgactgaagagttgccttatacagctatgatttcagagatcaacctgattggtggatcagaagggtggtgggtagacactggtgcttctcgccatgtctgctttgatcgtgcgatgttcaaaacatacacagctgcaactgaggataagaaagtgttgttaggcgactctcacactactattgttgctggtactggtgatgtggaattaaagtttacctctaaaaaaaccatgattcgatctcaaataagtcatgcatactccagagatgagaaagaatctggtcttgggctatctcctcaacaaagtgaggttcacacagactataggggctgatttatttactttaactaagaatgggatttttgtggggaaagggtatgctactgaa

SEQ ID NO: 225551 - DNA, 5382 bp, Cannabis indica
tatctaaaccatataggtactctcgtcctatatcgaaatttagttctatttcattatagcataatcgacactcacttctcaaatcttgcatcaaaatcataaaaatttaattggtgagcttttgatcagaagaactgggcttgagattagatttatgagtagaattgttgagcttttgtttggaagaagaagtagggaattttgagaagaaggtagtgattgtggtcgctgatttgtcttacacatcattcgcttttcttttacttggttggattagtgtgttgcattttaatttgggggaaacattataaacattcaagcaactaattttttcacttaattaattttctatctaagttgatattagtttaatttcttgtaatttgatatgggttcattctattcaggaggaaaataattcccaaactgttctggtataaattttcattaaaactattaaaagatggaacattattctctctagaaccctctagtaagtatgcgaacacgctcttctcctggtgtgaatctggtccctgtaatgggagttttggtccacccagattatttctgtggtggttttctctttgatttcatgtgtaattaaggctttcctctaataaatgagagcattaattactatgagtattatactccttctctttccaatttcatttttcctactccgtgcatttattgcattttggttcgtcttcttcttctacttaatcaaatctatcatttctcttccacttcttcaaatctttgcattaaaaaccatcccttcaccttctcttttgcccttggaagtcgtaagatgaaggcagtagtaggatatcttgaagctgatcaggtttttttcatcattggggctactccggctaagtttagggttatgattaagggatctttgagagtcatcctacggggttattggttctacctctataaagtaagattaaggtacttcactattttctcttctcttacttgttcttttcctttgttttctttgttttctttgctgtctattctgtctttttttaatatggatgaatttctgagtagtatttcaagctctcttgtccttgctactgatgaaaacactatatttacctatgatactaatccctcaaatgatactccagcccctattagtttgcttctcaaacttcacactgtcaaaccctttaataggctttccctcatgaaaaccctcttgggtatctggtcatcacagtgtaggtttcctgttcgtgtctctaaacatgtcgatggtttgttcgtggttataatttgggtgtgaaggggataagggtagaattctagaaggccaaccttggcactttacttaaagcattactatctttactgctccttagagctcttttcctataacccctgataatcttcattatgtccctttctgaatacaagtgtatggcattccttttatgtgcaaatcccacaagttagctaggtttattgcctctaaaattggggatctcattgaagttgacagggatacagttagggagggtacaggaccttatctgatgcttaggatcctcttagatgttaatctgcctattagaaggggtatgaatattcgctttatcaaaatggggagggagtttatcaagtggcttgattttaaatatgaacggcttcttgatttttgcttctattgtggtcggcttgatcacactaagaggtattgccatgctttcttacaaaaatgcgatgaaactctctctgaacctctttgtccttttaccattttattgaggggtaaggagaaaatctttgataagagtgtgcctttccaatatccacaaccacctgtcataactttgcttgatattcctcttgttcacattaatatacctgcgaggggttctctgggaccaaccattagatttccttccttccttactaaccaggtcacttctggtttccattgtaccccttcccaccaatctactgatgtcttgatccctacaacctttaaccccaatgctcgtgggaaaattctaactttcagtaggtcgggtattggttcttcctcaaacccttctgctttcacctcctattctactgattctattttggttattgatagaacaaaccttgcttgctctgagtctatgattgaagcctttccccaaccaaatcaatacccctgccctaagccgtggaggtctagctcttggtagcaatactatagacctagaagttggtgctcttacaggtcagccggatccatttgtgcgaggcaagggtattgcctcagctttaggggttaaacgcccttcctttcaaagccatcaagctgttgttggtggcttcttgaggtctaccctcatgggagctcgtggtggtgatagagagggtggcccctctgcaacaactttggaacctaaacggcgggtgatgaggagcacacctgcccataaaaaatgagtttattaagctggaatttacgtggtttagggagtacacgtgcattcagacgactctccttttggtaaaagatcataaacctctactttttttgatggaaagcttgacctcctatccatgctgcggacaagctcagtgtcaaccttggctttgatcatgcttttgaagtcccaaggaagtattttggtgggggacttaagcttttgtgaaaggattgtgtagatgttaatactttaactttttcatgtaatcatatagactgtaatatcacttttgatgataatgaaatatttcattatactggttttatggttctccaactgcttctcaacgtgtttttacttggaatcttcttgataaagttttttacaacactcctaatctcccttggctcattatgggggattttaatagttatcttcttcatagtaataaaattagaagtagttatatttataaaaatagtatggatagtttttctagctttttgaataagtttcaactatttccccttccttttataggtcataaatatacttcaaaaaataataatgtttctaaaagattagattgggctattgagtctgatgcttggtgtaatctttttccttatgtggttctctatcatttgccattttatggctctgatcatagagctcttaaggtcatgattaatcaccatagtgatagttgtatccctttcaccaataaacggttccactttgaaaacatctggttagagaaccctgatttttacaccacaattattagttcttgggacatgggtactcatgggatgcataattcaggagattactctaggttcatttcttgtcataatacttgcatttcttctcttaaatcctagggtaattcaattaggcatatttttaagtctaggattacaactcttcaacaggaaattaataggcttcaatccactctttctagtgataggaatattatctcacatgttaaacatctccagacccaacttaatgctctcttatataaggaggaagtttattggagacaaagggctagggttcattggcttagggctggggatagacacacaaccttctttcatcgttttgcttcttaaaggaagagaaataatactattaagtttcttagggatgataatggtactgtctttagcaaccctgatgatatgagtgctttaattacctcttagtttgaggatcttttccattgcaatggttgcaatactgaggcagtcaatcacatattcttgactatttgagtccccctcttgaggattctgaggttgatttcttaggtcagccttttacttctgatgaagtccggtaggctattttccagctctctggtggtaaagccatgggtcttgatggccttaatgcttacttttccaaaagaactgagatactgttggtactaattttgtccatgctattttagactatttgaacaatgaggctgatttctctgaggtcaattccactctaattttccttatccctaaaaagcaaagggccaacactcttaaagattataggcccatataagtctttgcacaacctcttataaggtcctttctaaagtgttcgccaatggactttaaatggtgcttgataaaattatctctccttttcaaagtgctgttgtggctgggagagtcatctttgataatattttgattgttcaagaggttattcaggctatcaactctcgaaagcatggtaaatgtggttgggctgccttaaagcttgatatggcaaaggcttttgatagggtcaactagcattacttaaagagcattatgcttcatttgaatatccctgtcacgtttgtttcccttattatgaagtgtgtgaccacttctagcctttccattttgatcaatggggttgtcaaagggtcgattaaaccttctcgaggccttagacagggggattccttatccccctatctcttccttttctgtgttggagggttatcctctctccttcgtgctcatcaaaatgagggtctactcaagggagttgccatatctagaagggatccttctatttctcatctctattttgctaatgacagccttatcttttgttctgctaataggaactcttgtagctctctaagggatattttccagctctactcccaggcttctggataggccattatctttaccaaatcttccattttattttatcctagtacccctcaagatattagaaacctttttttaccactttttatctggaagataggcctttcattagcaaatatttaggtctacctcaatatcttactcaatcgaaatatcattcttttactttccttagagacaaagtcctttctgttctgactaattggtctgctaaatggttctctaaggctggtaaagagacacctctcaaggcagtgattcaggccattcatgcatatgtgatggcttagtttagactgcctgttaaattatgtaaaggaattgaagctgcgatggctagattttggtggggttcttctggcagttctaagaaaattcactggaaatcttggaaaaaagtatgtcaatctaagtatatgggagggttgagttttcgctctctaattcattttaaccaagctatgttagcaaaacaagccttgaaaatttttaaaaatcctaactctttgttgtgccaggttcttaaagctaggtactttcctaactcctctcttcttgaagctattcttggtcataacccctcttatgcgtggaggagtattctttggggtagagatctgatggcttttggtcttatttggaaggttggggatggggataacattctgaccattgaggatcattggctgcccaattataaatatatctcttataaagatagcagcttgcgtacttcgtctaaactttcttattttatt

SEQ ID NO: 225552 - DNA, 6101 bp, Cannabis indica
atttgagtaacattacttaaaccccttcaatcggtaaggagattaagcagtaaccctaccaatttacatagaacacacttcagatcctgtctggatgcctctcaaaagagcatgaacttttcttgatttgatgaccaagctaacactaagttgaaatcaactgtgactccagctctcaaaaacaagtttaacatttttctatccatatagatcgttacgtcctcttaattaactatattaaaagcgttgaaatcttggaataacttttccatattataataccataactcagacaaacccataaaaacttaatttccaataacatttctgatctcagccaaatcttgaccaattcaaccttatcccgtcttcgtcatgatctcataatcactgaaaagccatccatagatgttgtccatacatcgtttttactaaagggtacccaaggatatcattaacatactatgacatatgctttgagaaaatccttaattaccctgatcatcaaatctataaaaactactagagcgttgattagttcaaaaggcatatctagaaattcgtggtaatcgtacctagtacgggaaacactacttgaaatgctctcttctcagattctaaattagtgataacttgagcaagggtcattcttaaagataactacatttccctaagactgattgaaccactcataactccctaacaaaggatattaattaatgattaaaagctgatttaatcttcgataattaacattcatcttggggcttcccaagataatacactaagtcgaataaaccttaagtttgtcatcttttgaagttgccaatttacttccttgagttctgttggagccattcaatatggtgcctcagaaccacctttgctcaagataccatacaatgacaaaatctaatttttgttgtgatgatacttcaggaaattcttctgagaatacatccaataacttttacaccaccatatatccataaactgaattacttcggctgggtggtatctaacaccattgctaataattccacgtaccccttccatgatggatctttatcttttatcatcataaaaactggagctagaaaaccccaccccaataccataatacgaacgaaccatcactttcaagttgaaaagttactgctttatgtttgcaatcattatagtggccctatgctgacatatactgaacttatagttaagaatgggttgaagattgcataggtcgatctagaggaggttaaggaacatccagcaacctaaaaaactgcagtcatttgtatagttcttggagtaaatccccaattattatttttaagggattcatcaaaagaatttggagacacattggtgttgctcagattgcaaaaataactttgggattgattatggttaaatttaatgatgaatccactcgagatcaagtgctcgaatcaagggttcttcaatttgataaaaaactagtaatagttaggccctggtctactgatttgaacgcgttgaagatggttcgatcagtccctttatagatttgtctccatgatctaggtctccaatactagtggaacaaaagcttgagtgcgctcgttagtactgttaggaaaccaataatagtggaccaacatactaaagacagaactcaggtttagtttgctagagttttggttgacatggaaatttcagacactcctccaaagtctcttccctatctcaatgaatttggtcaattaatggagcaaaaaattgattacgagtggttaccagtaaaatgtaaaaaattgctctagtttcggacatatcatggcagattgtagaaagaatggttcaaaaataaagggacaaggtgttgtttctagatagtaggataacaagttgaataagtagcaggaatgtgattctactattgttattaacaaagagcgggagttgaatctaactgagactaggggagataaagacactcagattaaaaagaatggcaaaccccaaggagaacaattcactaatctaaggttcattctaaggaaggagatggatgcttagatacaaggctgaagtctgggaataactttgatgttctacaagaggttaagggcgtaatgaacaagatcagttggataagaggcagatccatgtattaccattagctaataatggataatttcaatttagcaagttggaatgttaagggtgttaataaaaaagagaaacaagatgttgttgtggagttttgtagtaagaataaaattggtattaaagccttattagaaactaaattgaaggacaataaagtcaaggagatgatggatagcccgactattgaaaggcgtttattgataatttggaggagatgatttattagactgattgttattgttgagacacctcaattggttcactgttatgttaagatttcaggtcaataaaagactttttgcattactttcatctacgaattcaacaccattgatgagaggaaaagcctttggacagatttttagagtttaaagctgcctgtgaaaccttggattttgctaggtgatttcaatgctatctttaacttggaggataaaattggagggaacccgattcagtatagtgatttacttgattttactcaatggcttgctcaagcccatgtggagtctcttaagaaaatatgctcaacatttacgtggacaaattatcgagatggtttgagtagaatatactcaaaaattgatcatgcttttgttaatgaagattggggtgatctttgtcctaactccatagcccgttttggttgggaggtaatcttaaatcattgctcttgtgttatcaatgcgaaggctgttgtgaatataggtgttagatcgttttgtttctttaattttagtttgatcacccagattataagaggctggttatgacatctggggtaagaatggagctggcactgatttaaaaaatgtttatctgaagctagtgagagtgaaacatcagctcaagaaatttagtagagaaacctttggtgatatggggagaaattatcaaaaggccaaagattattacatggaagcaaaacatggctcaaatgaacccaagagatgatagataccaagagcaggagaaattagttgatggttttttcaacagtcaagaaaaattggataacaagtttctaagacaacgttgtaaaatcaagcggataaataatgagatgataacacctcttttttcatggctgcctaacgaagaggaaaatagataatagaattgtctcttatataactaaacggggagatactaatgaccatttccctgatgttgttgctcatttcttagaccattttaggattattatgggtacaaaaagcagagatttcaacagcttaaatcctgattgttttaaccagggaaatcagctagatctaaaccagaaactcatgttactaaagcccttttctcacaaggaaatcaagagagcaatgttcagtattccagatagcaaatctcctggaccagtggctttggatcaggttttttcaaggctagttggactgaaattggtactgaaatctgtaggctagcaacatatttttttaaaatagcgaggatgcctattgagctacattctattgttatatcattaatccctaagaatgataatccaacaaggattgtggactataggtcgattgcctactgctctataatttataaatgtatatcaaaactactgtgttctagactaactatagtggttccttatgtaattaagcaaaaccaaggagcgttcatccaaggaagaagcattgcccataatatgatgattctttaagatctcttgaagaattataataggaagaatatttctcctcaatgtgccatcaaaattgatattagtaaagcctatgacacagttagttggaatttccttgaagatttgttgaatgctttcaatttttctcaaagttttgttaaaatggtgatgatttgtgttagatcctcccattactcaattacgttgaatggcagaatcaaaggtagctttaaaggagaaaaagggcttaggcaagggcacccgatatccccattgccttttgtgctaatcatggactatataactagaagtcttcaacatgctgcccaaaattccaagttcagatttcaccctatgtgtaaaagtttaaaaattattaatctttgcttcgtagatgatttaatggattttagcaaagggtcaaaacatttaatttaggtgcttaaaagagttttagatgaatttagatcctcttcaggattgcatatcaacttgcaaaaaaccgaaaattaacttggggggggaaaaaacaaaagagaagctcaacattctccagggtcttaagctgtcagagggatctttcccctcaaatatttgggagtttcgttaaggccaaccaagtggaaggttgaagactgtgaagtaatcatcaagaagataagataaagattgtatagtcggtcaactaggaatccctcctttgttggaagagtctaatttatccattatgggcttctcgggttctgcaattattggatgagcatttttgttcttccccaaagcattaccaaagaggttaagaaactttgcaaaaggttttttggggtctttctggaaacaggaacaaaactcatgtaacctcttgggagaaattttgtcttttgaaggcttatggaggtcttgggtttaaagatgatgctaagtggaatcaagccattcttgcgaagtatgtttgggctattacagcaaaaaaagatattcttttggtgaaatggattaataacatttatctgaagaacatcttttactagtcttatgagttgaaacaagacataagctggtattggcacatgctctgcagattaagtattcagagactgatattttgtctgtagtttgtacaggtaaattcaaagcaaacaggctttataatatttcacttcatcagcaacaagtgtataaccatagagctatttagaactctttgacgttgcctaactattgatttgttttatgacaggctatgaaccatcaactcctaacaagagttaacttgttaagattccaagttgagatggccacggttaattgccctgtatgtgatgctggaattgaaacacatgaacacccatttattaaatgttctttgtctaggctggtgattaagcaagtcttcgaatggatgggcataaaagcttggtccttgggcttcttaggctggttcaattcgctagctttgacttccttgagtttagtgtagccacctgttattgtatttaggtcaatagaaataattgtattttttagggcttttctaatatagtgtctcatatagttaaagaggtcaaaagtgtaatgacttatagattataaattgttaaacataggaatatttctaaaagagaaatggtatacttgaatagaattcttttgtattaaggagccggtttttatttagagcttcttttggttgtaattttttgtcttttaataaagtttcttttttttgaggaaaatacttgttattattaaacaaacaaagattcgtttacaataacagagtaaataggtgaagggataacctccaaccaagaacaagtctcatccacccctaaagcaaacttagcaagaccatgagccgtttcatttgcagaacgtttaacatgtgaaacatgtacattagggaaaaaaggataaaatactaataacatcaactattaaatctgaaaaagaggaatttggattgaagggagctgtcaatgcatttgtcaccatgagtgcatctatctcaacttgtataattggtagctgttgttgaatagcccaattgagattgtggaagagtgctttggcttccatttcatgggatttgaagttacctacaattgacattgacatagcagccacaacgtgtccattaaaatctctaataacagcccccacaccaattgtattcgttgaggaattgacagccgcatctacattcagtttaaggccgcctagagctggaagagaccacggttgaaacaaagcaggattggcactgtaatatcccgataagtta

SEQ ID NO: 225553 - DNA, 4006 bp, Cannabis indica
tggaaatttaaggttaaattattatatcataagattaatcggaggagcacgatactagcaatctaaaactaaactcacgctaaatccgccaaagattctgatttagtcacacccttcccctctgggagctcaagacaagtataatgcattatcatttccttcatagtgtactttgtgtttttcatgtcattatcccataagatgctctgaagaagaagaaaaaacagagttagggaatggctcggcacttttaagcttcagtcagatccgaataaaggtcacaaatcacaatcatattattaacaattgatcaactaatgcaaatcagtaaatgatttgtttagtttagtgtacatcatgactgaaacacaatataaaatgctactaaatttatatttatgcaaaacaaggaagcacaacatgattttattcgagttttagtacaacgtgtaactttatagatttttaatagaaagtacttacctttctaacatattctctttttacatcttcccaaggttttacatgaggagaaaaaatagaagcattccagatggctcctctagcaaccatgactgatgaggcaccttaaacaatatgacaatactttaaaaaaaaaaatacatgacacattaataacatgttcaagaaagtgcataatagtgtatcagatggtttttggatcttctaccaatctatccactgtatttatccatcaaataaaggactcacaatacagtgttctgtgcccccaaaacacttcctaagaggtacctgtaacagtttttatgcgctgaaaatcgtcatactcaaaaacatctccatttgctattattggaatggatactgatgatacaacatcggctatctcatcccatttggctggatctcttggcctatctgcaactttcctgtaagttgttcagattaaacttaaatttataaaaagataaatatattcgaaaatatatggttccaaaagcctgcaaaattaaacatggaaagcatgtagacaagcacataaatgcaattgagggaaaactttggactgcaaaaagcaaaaagaatccagcagaatgaattcctttcttaggttgagaacttttaggctaataaactagagccccctcgttgtcccaaatatagttgtaccacaatgtgcaactacgctaacagcctctgtgctaatagccttgttatctatcaccaatatttattatcaatcaatggtgacatagagcattggtgatttattaactaacaaacaaagagactactgtcctacaactcataggggaaatcaaccaatatgtatttaccaccataatggaatattagaaatcaccttccatggacagcaagtgcagaaacaccagttttttcaattctcctagctagttccacagtatcacgagatgattttaatagccgaatcttacatgttactggggtgttcaagtttctcttcaaggtagtcaatatctgtaatttgaagaaagaaaggaaaatgtgatgttgtgtagataaattacaaaagctatttaatgaaagtaaaaagagaataataaacgttacgcacatcatgaataagatctggtttactcaacagtgctgctcccattcctccgctcacagaaaatgccttagggcagcccatgtttatatctacagctgcaacatcattacacctacaaaagaaatttcacaataattcaataaaggcttagaataggaaagaagcagagtaagttaaatgctttagacaaagacttttctccaaacaatgtcagcaataatcatatcaggtcagaacacatgagaaaattaaaattaaagtttccgagaagttgctttcaagtcactctttggtgcccgaacctaaaacaatccatgtagttaataaaatttccagtaaatcaattgaatcacttcagtaaataaacatgaatatacgtataagatagattaccagattacaaggaaagacgaataaaacgatcaataacagaagctctaagtgtttaacttcatacatggagaagagaatcacatttcataagtcacaaacagcttacactatctgagcagcagcaagagcccttacagcatcagaagttcctatttgaaatactacattatttctttcttcattgcacgttctgaagataacactttctgtcttcttctccacaaaatcaatggacccaatatgttctacaggagaagaaaagagaaggccttttgatcatttgaaacaaacatatctacatatcatgtttattcttttaataagaaaatatatatatatatatttatatatatattactgattgaaaaaggcccaattacaaagaggagaagatatcattctatagagcaacatactaaaagcaccaaaagattacacaaactctttctagaaaagaaaatgttggtcaacatttttttaatagtggatcttgatttttatttgttctcaccatcatcattaacaacttccacaaacttcctattaactaacaaataaaggcaaaaagattttaatttggtcatttttatcccgtttcctaatctctcactgagcaatttttgctttttttacacttgcacatttacttcacccttatatttatcaaaattcatatatcaaactatgcatgcattattattcttccatctcaaactttgtacattttagatactttaagaaacttttttttccattttagttaaattctatatcaggctttatccaccaactgaccaaccccaataataagtatttctacagtaagctttataatttcaaaacaaaattaattactttatgttagagctagaagcctagaactggtaaatctatttcaattaaggtacaaaaagtagtataacactactttcaaattatattttcacatcacatgttgcctccaactactaaacatggcaatgttttgaagctagaccatcaaagcatgttaaatttgaagaactaacaaacaaaagaaaatcagtgtattgatcttctgcacgtaacagagattaccataaaatctgcactctacattcagttgtccaccttgtaatttaaacggccatacattaaaagtaaagtaagatagaaaaaaaatatattgaaattcaaatggtcaccaagataattcatcacctacaaacccagttctaaattgccctattatatccaactgaaaaaagaaaaagaaaacaaacacaaccccagttttaaagaatgcaaataccacttcaaaatatgaatataccgaatcattagttttttaaatgttagcgaatacagcacaaaattcccataaataaaaattttgaaaagaaaataattttagaaagaaaaaaaagtaccatttactctgcgttcacatttgaccagtttgtgatcaataatttcctccccgataagtaatatcagcaccatactcagcagctaataatctaaaatggtaaaagttcccctaataaaaaataaaataatataaaaaaagcaacaacaaattaaaattgaaaatatgggagtgtatatgacactaaagaagtgaaattcagctgcttaaggaaacgatttatggagaaataaacgaaattaagagttaaaatggttgggaaaactcacaacgcgaaccataggagcgagcacgagtttattctcgtactccatgttagccggagaaccagaacttggggactcgtcaatctgagacctggtaaccggacttttgacctctgcagattctgatgtctatagtggcaagcatttgttcttgagctgggttgggccaatcccaaaactttcctaggacaatcggcccactaatattaaaagtggaaattacactcggattttaatggttcttatgataaatatggcacaatcccaatttcgtgatgaaaaaaccaattttttggtaattttttttgtgatttttttggcgatgatgccaataccgataacttttttagctctagtagcaac

SEQ ID NO: 225554 - DNA, 3294 bp, Cannabis indica
tcgtcattgttgataagtgtaaagtttattgtcaccagccgttacttaaaaaaataattcatttttgtatataaatttgtggtctaagagtgacattcaaccaatttttttccttttgttcttacattttgtgcactgttttcatgattcaggtcccagaaggactcagtaagcatgttcattcatccaaaaatgctcaagctaaatggttattagtctactaatacattcattttcgtaaataatcaatctctcttatttaaggtaaaaaatgtcaaaatatatgtgtacatatatatatttgtatatatgtgaaggtatagaagactactagaggcatggagagaagccaaaccacctccaaaaacagctaaagaagcagctctgcttataatcaaaaccttgaataaagtccagaagtcagatatagaggtgagctgatactaaattggcactaatcgttgtaatgaacttgactagaagaaactaaagtaatagcaatcattgtttattttttttatttttttattttgttatagtgttatatccttatgtatagggactattgagattctatggtctctcaattcctgatgacacagttgtggaattttctgctgagctcccaactacattgcctgagggagtgcaatttgcgatgcagaccttaccagtaagtggaaatgtacactgcgaattgccacttatgaaattccacatatatgaaaaaattatagcctttgtttggttacattttaaagtatcagaatgtcattccaatagaatgacattttttactattttggtagaatgactattctattttgaaatggaaagaaaaaccattcaaatgcaattttgttatcaatttcatatttctattctcattcttatttttatattttcatttcttccaattaaactcacatgaaaaacttagttcccacctgacattcacttgatgttatgtcatatgaacttggaatcctaactaattgaggtaggttgttgtgacaaatttatttatatctatctaaatgatcgaaggatggtacttcctggttaactgttgtgtggtgatataattgtccatttatattaagctttcaattgaaagtctaaaatggtacatgattagttcaagattatgtttataaaaaagaaacaaaagttacatgtttataaaacatgtatgttgttatgactatgaaacgtatgaatatcttcttcactcatgcacaagagtactattaataataaactgagagtcctccctctaacactcacaatggtgttatggcactatttaaagattttctatgtaatgtttattgtgctaagcacaaatggaaaattcataagctaatgaacgttactgttttaaaatgtgagtttaaaatggtataatgcttactgcttactttctgatgtggtttggataacaaattgaaggttgatccaagagctgttcaagatggggattcagtaactgtatatgtaagcacagaagatcctcgtgagtcggtgagcattccccacaggtgaacttattgcagggaacgattgaaagcacgtagcaggaatgacaatggaaaagcaaaggaactccatgataaaattattaattctggttacaggtttgatgtatttctgatttattctcactgaactttgaactttgcctcaatttaatggttactttggttcactgttagacaccaaacagagagcatctatagattaaacttttggatttttcatcagggtactcaagatagatgacaaggagattcttgctagaaaatatcgaattcgactaaggtctgttgttgttaaaattcacattgtatttctgtttgattgacttgattcaatgtgaataaacagaaataatgctaatgaaatgtaggggaatagatgcaccagaacataaaatgccatatggagatgaagccaaagatgagctgactaaactcgtacaaggaaagtgccttagtatttttgtctatgaagaagatcaatacggccgtactgttggtgatatatattgcaatggcatttttgtacaggtactacactttaaatcatgtagtatatttttcttttttaattattttctgcaggcatattaatatatggaaatcagttgttctttctgataaaattttcaaagttaaacaggaagtaatgctcaagaaaggttgggcatggcactatgtaacttatgataaacgcccccaactagctagggtgagtattttattttactgcaatcatgctttttgcaacgtttcaatgcatatatgttattaattacatgagtgtatatatgtagtgggagaaagaggctcgggccaagaaagtgggattgtgggcttcaccaaatccagagaagccatggatatggagaaggaataatccgagaacagatgtatgaaattgcttcttgcaatgatatattcgaacattgatctgagagttgtgtttattgtgttatcgaacgtgtatatattttaattcatcttggacactattatttactctatgatcatcggaggaccaatgcttaaacccgagaatgctccaaaatcttttggattgcttgtttgtaaatatactcaaagctttttagggcttgtttgacataacttatacttttattttaagataatagaagaaaagacctaaaagtttgagctttttatttaggtggcgtttgattgggaggaatgaaaacatagaaatgaaaatcggaattagaataggaatggaatggaataaaatttgaattacataaaattaaattttttttcatcatgcaatggaacggtctttccttctattttaaaatggaattgtcattctaccaaaatagtagaaaggccattatattggaatgacattccaatactctaatatgcaaccaaacaaaggaatggaatgaagattgtttcctttccattttattttattacctccaaccaaacgccaccttagtgtttggattttgattttaaaagaacttcttcatttgaagaacttttataagtgtttggtagtaaaatataaaaactcttacaaataatatatatcaaatttgttaataataatataattccttttcttgttttaaaaaattaatcttgaaaaataaaataaaaatatataaataaaataaatcttttatttattacataattattgtttataatgattatgacataattaaaaacaacacttatactcatgtttatcccagcatgagttcggttgcaattttatcacggacaactc

SEQ ID NO: 225555 - DNA, 2079 bp, Cannabis indica
atttttctttttcattattatttattagataaaaatctaattatttaatattttaaagttgatattactagttaattaaaagtaatagtgatataaagaagtattatatgtatatacaatctacataaacaattaaacataatattacatgatgattaattaattataaatgatatgggttttgaagaagaaattaatatctttaattattattacctcaacaatgttaataagaactgagttggtcgaccatgtttggtgagtggtttaatatcatcatctccaaatagatttcttttaggatcatctttgttgttttcatcaccacacaattttacaaaatcatccaaattgcaagtaccacgttgtattactatgtagaagaaatccaagtcttgttccacaccataatatctcacaatattttcgtgttcatccgattttataagactctcaatctctttacgaaccaatttaacattagcttgttgaagtcgttttatggcaacacttcttccctcgtatgaaccctcaaacacaataccgccgtgactttcttgaccgatctttctttctggaaaataggtcaatttctcgctaattactcttggttgatccatatcctaagtagttttacgacgaaatagaattatacttattaattataagaataaatattaaaactacaatctttgaaaatgattcatcatcgtatatataagaattatacaatatcgatatgaaataatattatattatacacataaatgcccattcaaccacaatattatataaaattgcaacatgcttttgcataaacaaatcacaattttttgaaattatattatacttttatttcttttgaaatattattgaattaataatcaaattattctttgcatgctctttaaataatcatcaataacgtaaggtgggcattattattatataacaaagttgttagaagtttgaaaatgtttagtataatatttaatataattatatatagagcctattaagtttgaaaatgttggattttctttttaagtcgtttttgcttgactttgtttttagtaaaataatacatcaatacaacttgttcaaatttataaatatatattaatacgtacaattatataaattctaaactacacatatataaatgtacatatatgtatatataaatataaagtgatatatactaagctacctaatatatttgtctttctctacaaaagtgatatatagtcaaagaacatgcttatatggtcaagagactagaccggttcaaaactttgttaagagaacactagctttttccataaacaaaatacatatgattaataattgcactgcttttacattttagtaattactattttgaacactgtgttttgtaaaagttattaattggaccatttgttttgtcaaatgaccctaagttaaattttcaacaattttattttttaatataaccaactttaagacaatttttaacacgatccgatatagaattgtaatcaaatttgtcataacatctctagattatattattattaagttttattttgataaaaaatcaatttagagtcctatttgtataattttagaaaatacaggatttattttgtcatttaacaaaataaaaggtccaattaataacttttgcaaaacacagggtccaaaatagtatttaccatttacatttaaaaaaaattataaatattttttaataataaaactgttaaatagctactgaaaaataaaacatgaatgatattatcaaataaaatttttaggttgagtcacagactaagtcgctctcttttaaacgtttgtggcactgaccagaattatacaagtagttggaaattgccggtcgtcctcaggtttaaatattctaattgtcgtacgctgtatcaaaacatcactgcaatgtagcgaaccgtcgaatacaccctcaaaataaatatcgcagatgaaaattttatatattgaaaaactgagtttttttttttctcagtatgaaaatatgtgtttctcctattaattcaatcacattatatagactaatggaat

SEQ ID NO: 225556 - DNA, 3422 bp, Cannabis indica
gatcgtgtgcctgataataacgaacggacaattaatgacatctcagaaccattttcagtaaaacccacaattttttcccctctataagagagggaagcattctggccgattgttgattggccaattttctagtgtacactgtgtacagcagatcacaacacaattctcaatcaattggatctggattgaactttacagcttctctccagatgagctccttgatattctcttcagtaaatgatggttgctcaaaatcaaaattgaaaggcatcggacagacgggttcctcattgatatcgtgaagaggtgccaagtatgggtggcaaagtgcctcatccactgcaaaaaccaaggaaggaaaatatcatttattattcttcagggtcctgtagatgaactacacaaaattaactctcttttccttaaggtaccctggaaagaaacccctaaacttttaacaggctcaaagtcaaaccctgcaatatttgggaagcatgaaacttttgtaaccaacaaactgcccgaaaggaattttaatcctggaactacgtgggagcaaaggcctaaccactcaaactaccctcaggttaagcaagcaggactgaaagtctttctttcatttgcaaagtgattgactttgacaagcagggatgtgagcagaaagaaaatttaatgcttatatggagactatgaaagcagacagagtagaaaacttccagccaaaacgagaaggaagaaaaactatgtattccttgtgcatagaagagtcattgttcaacataaatcataacaaaatatacataacaaaataaagaaatttgctttttctttagacttattttcttttattattttagttttggatggaaaataaaaacttgcatgaccatgattcggtatacctgtaatacgcctgtttggatcaaagataagcatcttctctagcaaatcaacagctccagcagacatattaggaaatttaagagaaaactgttgctttgggtactgtggaagctgccggacatatcttcgggcattatcacttcgtaaaaacccaaggctagtatcatcaggtgaaccaatcagctgctcagaataacagaaatgtttaacaggtttgccactaaataaaaatgattaatacagtttcaaacaaaaaagtgtatgtacagaaaaaaaaaaaaaaccattacattaacatccctgcaaagaatttacaagatcatctgaaaagatcgaaacaaacaaatataacaataattgagcagcattttcttgaaaaagaacatatagagtgtgcaagagctatctacaacatttttatacaaagatcaatgggatgaacaaggttaagaagtaaaactgtcattcaaggtgaggctatcttaagtggttgggtcatgggtgggtaaatatgtgttttgagtggtaaggtttcaagtcatcattaatgtatgtttcagtaataatcagcataacggaatatcaaataataatattaaaatatataatttcctaaacctgaaaaaacagatgaaagtaatctagatttcacaaggaagttctagcaaacctataaaccatacctctgttataagtctcagctgatgaacatagtcctttcctggaaacaggggttgtctggtcacaatttcaccaagaatgcagcccactgaccatatatcaattgctgcagtgtattcagaacaattaagaagtaattctggtgctcggtaccatctagtaacaacatactcagtcatgaaatcagtttcagaagtggtccttgctagcccaaaatccccaattttaaggtcacaatttgaattcagaagcaagttactgggctttagatcgcgatgcaaaacgcttgctgaatgtacatacttaagtcctcgtaatagctgatacagaaagtactgcaaagataagataaattcatcagtgccagcttcagatttgcaccacaaaagttgctactatctataagtttcactagtcatttttctatatctgctataatcaataaaactgtaaaagtttccatctaaagcagaacgataaattttctcataagttgtcttaagtgccaaatatcctaaactcatactgctttccgccgcaccagcagaaataaaaatgaaaacatgatcaaattgaaggttatacatgccaatattttataatttatattctctcttatgttggaaatctgtacatgaataatcaaaactgttccagtggctacgaaaaagaggaatactgattttaaatgcaatggtgataatactttatatgcaccaagaaattcatgaaataccaacccgacaatgatcgtctgtcaatgactggttggaacgtattatttgatggagatcagtgtccattaattcatatacaatataaacatcattgaagttctccctctgtggtggtcgtattatgtcttttacagaaacaacctgtgaacaagaaagaacaaaccaacacacataagccccaaaattcagaaggtattaaccataacatacaaacatttaaatacacagcataggtaatttgatggaagatggcctattcatgttaatttttcattttaagaagcagttggggtttgaactttgaaaccccgactttgtactcacaacacacccacccaaacacttgagctagactagtgttaatggcagatatcaatttcaaatgaccatggtaaaaaaaataaaataaaggcaggacacatatcttgaaatccacctttataagcccagaaaaaaagaaagtcttgaaactgcatcatgactggaaatacaagcatgatctttaagattgactagggaaagagcacacgaaaatatctatcaaatttaaatcccaataacaatgcccaaacctcaaactaatctcatgctcactccaacttttacacatttataagcctcaaactaaatgatcaccgagatatgaacctaaaggatgtgtcaaggctgtatgttatgtgaagtatttgcaccaacatgcaccttaagacggtaaaatatattatacacaatcacaaaacagcatcaaagaatgcattatcattgcatgcataggggcaggttcaaacccctaaccccattttgtttctagttgattgaaacaactactttgaggactagattcatcatcagtttttcttcaactgtatcaaaattatggatgatggcatattaccatcaaatatttgtgaagtgaaaacagagtttgaaatgaccattcaaactacatgaaggcaatgccaaccattgccagtactcttgaaacaaaaagaccaagcctatattatctaacactgcataaggatataatatatgtaaagaaactaaatgaatccaagaacaacatttcttagctcataaataccaaaggttcttaagaag

SEQ ID NO: 225557 - DNA, 2208 bp, Cannabis indica
ttattattcaattatttttttaaaaaaaaatattatcgtaaatcgttaataaaataaggtaaaagagtaatatagatttttggccccattatttggatatttaagtgtaaaaacaaatccaaattcatttgcaaactcagtgctctctctttgaggccccttaatggaaaggctttcaacctattggttttgatattataaaattaccaaaagaatcaaaaagatctcacctgaaaaaagaagagaccaaccaaataaacaattaaacttgaaaacaccttgaattccaactctataagaaagagcttagatattttattcaatgaggtagatatgaattatatattgtatattctttacacatactatgtcatgtttcattcaaaatattttattattaggtttaaggtaggaaaacaagtatgtgttgatttaaagttgggtgttggtatgttagaaacacaatataattcaaagtggagtaggagctttgctttgttttgtttagagaattaataatctaatggctgtatttttatcaaacaaataatattgttttgcacctttgcaaggagatctttcaaaaatctttcctttttttaggttgaattattattatttttcctctaccactgtttttaaggatcttcttagaaagtttataaaatttgtaaccaatagttataatacagttgtgattatgatgagagaaatgttaaaagatactcatggtggctaacacttataatgtgtaatattattattggtgcagcttaatatcgggtttcatttactttactttaataaatattattaaaaaattactaacaaataatacggtgatactttatcgtagtactaaacaccatgagtacctcataactcttatgattaagaacgtgaaactatttgattttttcctttttaattagtttttcattttaacagaaaggggaggatgggctcaccaggccgtgcccacgaatatttgccaagacccttttagacagatcgtatatcacatgagccactaagcaccaggtgcatgaatgttcttgaaatagatgtcaaaaatggctaacttgatagatattatcctcacatttaaaacgtcgaacttagggttgtttacaaagtatctaatctaatttaattcgtaggatccaatccaatttaatctgcaaaatatggatatatgtacttgcgcgaatcgaatttgattgaaaaatctaaaatccgtacttgtgtggattggatattgatcgacctcaaaaagtaactgatctaatataatctgcacttaattatatatatttttaaaaaataataatatataatatatattaattttctaataatattataaagatacaaattggagcttctgacacaatatttttctgtaattaccatatcgtgagaaataaaaactcaaagtatacgtagctcaattactgtcgcgatacagggagtgcactactataaattcaatgtgtctctcttataattacttaactacttattcatctagcgagcgagtgtggcttagaagtctagtctagatttctaagtcaccattttggtactttcatttagagtcacatctcaagaaatttaccaacaagatggttgtaaaacgttctataagtgttgacagacagactccaatagatggccaaacaactgagagcatgccagttgttgagatgggaactgagactgctcttgcgccctagataccaagagcaagcctcgaaaccaactcaataccttgtcctccaaggccactgaatgctcctaggactagcaccaacgaccagatcccacctggggagccttatgtggagattgatgaccctgaggaggccatcatcgagtttctcaactcagccaaactgtggctgacctgcaacaacaactgcaagactctctcgataagcaactgaaggaacattgaaagccaacgtattgagcaggaacagcggagggataacatgtctcaacggattagcgaagcttatcgctctaattgcagaactacttccatagaggttttttcaagttggtgtcgaccaactagtcacgtggtaattaatgctcaaggcaaaacccttaatgctcgaaataccaccacacatggaaattgagcaagcactaagcaaaatccaacatggagacttctcagagggaaagtaccttcgagcaaga

SEQ ID NO: 225558 - DNA, 1909 bp, Cannabis indica
gttacaaacatgacagatatatctgtttacaaaaagaaactagagacttctctagttagatattaggattggatggaattaataataattagtagacaacatatatacctatttctaatatagtaatacaagataattaatatcattataccaagtaaaaaaaaaaaaaacaataacatcatcttctatatatgtatttaaaatttggataccagttggtctcttattagcacataggttgagaaataaaaattacttaatttacttgagaaaaaatcttatgagtatgattttgtttatggctcttatattttataatgttaatgcatctaattacggtatgataagtaattaaaataatatgccttatatatatatatctagaaatattacctcatactcctgttaaatatatttacgcatacacaaattatcagactaacaattatttactgataagaatataaaaactatttaattaatttgatttttgttaattgaatccaatctaaaaggtaattatcattcaactagctagtcgtgtttctaagaattcaataatgtcacattttttgtttcgacaattcataatatatatttttcgaacaaacacatttatttatgaggatatctatagactataataataagaaatatgtaatatatgatattctacgacgctttatttatatcataaacaataaaaattgtattcgaattcattaaacaaagatcaacaagcatataattatagaataggttctctagagcctacactctaattaatttatacattatagtgttaagggacgtatcccattatgtaaaaaaagtcttagaaccagttacaaagtcaaaaaatttattttgtggggcttaattattatataaaaaaaaattatacctaattaattgttataaatatttgtggggattttgtatcgttttatttttgttgtaactgtcatcaaaaaataataaaaaaaaattaatacatatttttttgtctctgagcaccccatactttcataagtaggttcgtctctgtttggaacattatatactattattggtgtaaataccaaatctcgcatactttaatttagctaaaattaaatataaaacatattaaggaacatattccatcatgtacaaagaaaaaaaaatgctaacacttaagacgttatatactgttagtataattaaatattaaatctcacatattttaatttaaataaaattaaatataaaatatattatgaaacaaaagagcatagtatcttaatatataaaaagaaaaatgataacaacataccaaatctcgcatactttaatttaaataaattatatataaaatatattataataagtagtatcatgatatgtgaaaagaaaaatactaacaacgctctaaaacattaaatactattattaatgtaaatacgaaaactcgcctactttaatttaaataaaataaaatataaaatatattataaaacaaagtattctaatatgtatttagaaaaatattaacaacatcctaaaacattacatactattattaatgtaaatatcaattaattcttgcatactttaattcaaataaaattaaatataaaatatattatgaaacgttgtatcctaatatgtaaaagaaaaatactagaacattacatactattattaatgtaaataccaaatctcgcatactttaattcaaataaaattaaatacaaaatagtcagtagtcgtaatatcctaatatgtaaaaagaaaatactaacaacgtcctagaacattacatactattattaatgtaaataacaaatcttgcatactttaattcaaataaaattaaatacaaaatggaatgtaatcgtagtattctaatatgtaaaaagaaaaatac

SEQ ID NO: 225559 - DNA, 3203 bp, Cannabis indica
ttttgtttttcttttcttttttattcatacctctaacattccaccctaatatattattaacttccatcaggattagtgtggatttagggaccattacctcttcattagtcgctgcttgtaacgcagcatagccattgctggaataagagtcattcgcatactcctttgcctctttgaattctgtctgctttattgctttcctcttaggagtgatccactcattaccatcatcaacatcatcttttcccctcatctttatctcttttcccagttcaggagcctcttgagtaatagtcatattttcaggtttgtctactgtcacaacagccgcttcccctgtgtctctaactatcatctcttgcaccttcttggcccctttttcagctgctggttttttcttccaaactactttcgtttccttgttacaattttccacaatatgccccaatttatcgcacgctgaacacttcaatggcaaccattcatactccaccccttgttccaccaattgtttctttttattaatataagagattatttttggagggtcattcgaaatctctatatcaacaagaacacggacaaatttgatcataattctttcttgagttaccttgtctatcatgataggtttgccaatggtgctaactaaagcaatctaattcttttttccccaatattgcagccccaagccattcaatcggacccaaactggaactgaattgaccatccttatcgaatcaaggtctgtagtccaaggccgtaacaccaccgatttcttatcgaaatgaataactccaacctctaaaatgagatctcgagtagcttcatctcgaaagttcacaagactaaacccagagtgcattcgcacaaccttctcaatgcccaagttaccctagattctcttgatgaattcttcaaacaccttgaatggggaatgagaacctaaaacaatacaaactatggcatttttccaatatgaagcctctacctcagcctcctctagatcaattttggccacacgttgattaccaacaataatcggttctgtgtaagtaagtttagatgaaggggaaagtacctggtttgtcttgaatttactccaaatatccctagcactggtttggaaatctgcttgttcaacttcctcagcccagctagcttgtctcgttgtctcgagctcagcgtattctgcttcgactccttcaggttcagttccaggttcggtctcgatgatcaaattcttgcaagaatcatgaaattcttctttagcttaaggatggacattcttttcttggatcgaaggtaggtccgcttcaacttctttgttcactgggttagaaatggcaggctttcggccaacccgtttcatcttcaccatgggagaggaaagggagagcttgcacgcctcattagttttttttttgagaaataaaaatgaatacgaagccttgttgactggcttacaaattgccaaaaccttaaaagtcaagtcagttctatatttcaacgattcacagctggtcataaatcaagtttttgggaaagatcaggtaaaaggcacagagatggcgaagtatctagaaaaagtttggaagaacatgaaaaggtttgattactttaaaatttaaaaagttcaagagaatgaaactctaatgctcatgccttagcgaaatatgcatcacagtttgacttagacaaattgaatcagccctagtagaggtgttaagctagttaagtatatgcaaaatagaaaagcaagatgtggaaatgatagatgcgagccccacatggatgacccctattgttaaatacttaccaaatagagaacatccaacagataaaacggaggcatgcaaacttttttacacgatcctgagatacacaatagttgatggaacactttatagaaaaggatactccatgactttattgtcatgtgtacttcccacagaatcctatgatactatcaaagaaattcacgagggcttttgcggagatcacgcaggatggcaaagtctatctaaaaagataatctgacatggttattattggccaacaatccacaaagacacctatgagtttattaaaaagtgtgataagtcttgggactattttaccaggatctagatttactaccatgtatgtttgattaatatcttaaatatgaatatctctaaaataatgaaattaaacacataagagtttagaaaaccttacattcattgcagcagaataatatgactctttccgttcagatctctagcccttgattcctttctgtcgtagagcattatcaagatctaaacatggatctctttcgcttgtttgggtttggttagcaccgtcttccgcactatgattgagtacttaacttgctatatgtgggcatggcactctatcactatgggcaaaatgatgaagaacaatgcaggagggttcgaatcactatagaaggtgtctctcatctactaattgtcagagaatgaaaactacattttgtagcttgaattaggttaagttggatgagatgagagcatcatgttccttatatagtatttcaactagggcttaggtttgaattatatggactaaaaaagaataaaatattaggcaaaaattcactagagtggccggtttaaagacagcttagctttaatttggaaattagcaaataattagggttaattatgaaaattatttattcatgttaatttaattatttatgaaaatttatttggattcagaatgcattttatatgtcagatatagaaatttcataattttgcatgttcagtgcccgacaacattggaacgcggtgtatggctcagtagaatcacatcttagtatttcagtatagcggggcggaatagttagacattgggaatgtaggatttagtcaagaatttagaatttcccaagatacccttagtacccttttatgttgtttttgagtggaggggcaaatggtcattttgccccatatgtattttgtcctctagtggacttagttatattttataatccgatttttatggttatctttagctgatattaagttaataaaacttaatttattcattttattcaaaattagcaaagttagaaaaaaaatcacactttctctctcaatctcactctctctttcggcccccttagagcagctagggttgggagtttttctgtggatttcaagctgttt

SEQ ID NO: 225560 - DNA, 1643 bp, Cannabis indica
atcaaataactttctcatctgacggctgtcgtacatcacggaatgcattccgtgaaagtacaatcacgagacaaaatcatatcactatttatataatagcttttaacacatattcagccaaaattatcaagctagctactactgggcaataaaagaaactaataacattaattataaaaagtttttaagttttaatatcctaattgaatttttacattcaactagtagaggccagagctactcctaagaatctcggtcaagttcttattattaatacatttttcaattgaattttatgtattttaatttaataaataatataaaaaattattaattaattataaaacactatttcaccataatactaacacattaatgtatcaaataacaatgttctaacattttatatgttttgattttgatttggttttgaagtttaacctcactctctttattcctaaaattcataaaggtcatccataaataataaacatggcttttctttgttcattcacctaagccaaaacttaattaaatggatttcttcttactattacaaattcacccttattatataacaacttttaatttatatttttcgttctttaaaagagaatatccatttaaattttttaaaagactatagtaaccttacaaatcaggtaaaaataaagttgcacaaattttatataaaaatgaacaaataaataacacaccaggctgattacaaaagaatgacaaaacctaagaagaacaacacccttataagcaaaggcaaaaagactatccaagataagaaaacagaggtcatgctctaaagacagtcacacaacaaagcaaatggcctttgaaagatcttacaaataagccaatagagctccaaaccacctcggcaaaactaacccgtcaaagttgtagatgaaacaagaaagcactcttgggaagcaacaaaaccacaaccatcattaaaggaagcccatttctctcgaccaagattcgatcgaccagccacctataggtggcgacaatgcttagcgagagacaaaagaagagataaaattctagaccttttagtatttattttattgtagaatttaatattaaattacatcaataacaatattattgaatattactgaaagagaaataaaaagtgtgttcttacattataaggtatgaattatgttcgttcatgtttattttttttattttacaatatgaaatccttacttttatcatttcagtataaattttaaaagtgaaaaatcgtaaaaaaaacaaataaataaaattgttaaaacaataggtaaaaccccttatatcgaaatttagagaaatgggagcaacaattataaaatatacaaatatatatatatatatatttatatgtatataaaattttaaagcaaggaaaaaagaatgcattgattccattattctctgctccactaacatggttggacttgggagctaatccaatgtttttgggggaaaacagttattatttagatattctaatattttgtgttttatttgtaacaaagtctattatatttaaagtattaaatttctatgttcattttacatgagtcaaaaacaaaattcagctttttctgatctcattttttcgagtattttatata

SEQ ID NO: 225561 - DNA, 4445 bp, Cannabis indica
tatatatatatttgtttctcatattcacgtgttggtatgccatttagagatggtgggagtgtactggggggcgttcttaacaggtttgttctcttatgggttggctagatgtgatcagaacctctgtgttccttttcatgataacgttaagctaattacactctctttctctctcttctttctctcaagcccgtggtcatacagttcgtcaagtaataataataataataatagtactatataacactactactactactctcatttttggtagtatcagtggggaaccaattaaagtttttgggaattaactttatttttattttggaaaattaaagaggagaaacaaaagtgggaattttcattaatgttttggtcaaatatttctgaaaaaacaaattgtataatcaggcgtttcaatattacttcttttgcattcaatgcatttagactgtaattaataatgaaatggctatagcttttaattttcatgtgtatatttttaggcttgattgttcacgtttctttgcatatatatatatatatatactacatttctcttattattgcatttattgaacaacttacaggtcctgaaaatggtaagctatatatatttcgttgattgaatcttgttattaaattctatgcatcatgatttagactagtcattaattccaatcacatttctcttattaattcttcctatctttcacaaaatttctcctcaatacatatttattgtttcctcaaatatatatattcacgtgttaccaaaaactcactataacctttgtttcattaatcgtctgcattaaatgtaatacgtatgtacatacatatacttgtatttattttttcttttttccaacttttcgatttatattttcttttacatttgtcggtgaagttgtccaaattaatcaatgaaacatttgaaaattttcacactatatatatacgtccttatttttccttcatcacattcattacaaaaaataataatttaaattgcatattgtgttctattgaattttagaataatgtgggggccagaaattttctgatgagattattattattattattattatttcaatcgtttcctataaataatattcgatcacgagatgagcaaagcaaagctgttctttcttatctctatatactctaataattgtccttctatcaatacaacttttatgtgtcaattttctttagttcatacttattattattattattattattaataatgatattaaaattgaattatgtggtatttttgttttaatattataggagagacagcttcatcacacatagggctttctgcgacgcactggcgcaagagagcgcgagacaccctccaaatttgagcgcaataagtgctaatttgtacggaggaagcaatgcaacaagtttgggattatcacaacttggtcctcatcatcaattctcagctttacaagatcaaactcaccaaactacaggagatatgttacgcctcggaggcggtggggcaggcgcctcccatcatcggtcggctcatttacctcaggccccgtcttcggggcaattcgaacacggccacattctctcgcctacttcgtttcgggctcagcaacagcagcaacagacaccgggtgggttctttatgactgctgaaccgaaccaacagcagcaacagcagcattaccatcatcaagatgatcatcatcatagccatcatcatcatcatcaatctcagcatggtttcttgcctaataagccttttcatggtcttatgcagttctctgaaattcaatctaatgcaaacaacgtcaacccttcttcaggtggtaattatatattatttacttctcttatctttatttttaataataagtttaaatttagtaaatataatttattttgaatggacatatatattgttacttattattttatttaattgatttcaataatacattaatccaattaccaaaactatatccaattgcttaactgcaatttaatatgatcatatatggtattattttgtagagcattaggcaccactcctaattatattactgattttttttatttgctgtagttttataattgtgtaattatattattcaggtctattgatttccaatcatttcaataccgaaaacggcacatctggcggcggcggaagtggtagtggcggcggaagtggtggtgatcagggaacaaatatattctcgggacaaattgtgacaggcgatcaaataaactcaagtccagtctcatcactctacagcaattcagtccagaacaaccacgcagttgcggcggcggctcacatgtcagccacggctttactccaaaaagcggctcaaatgggctcaacatccacaacaaacaacacagcttcgctcctccgaacattcggtacttcctcatcatccgctcaaaataaaccctcaaccatggctcccgcctctttcggcggcagcagtagtagtactacaggaggactattcggttctgatcaaaacgatcagaaccatcttcaagatctaatgaactcgtttgccgccgccggtggaaacaactcaatgttcggcggaaacacctttgttggaggcggcggctacgatcatcaagatcagaagttacatcaggccaatagtagtggcggtggtggcggttctatggccgcaatgaacaatagtatgggcggtggcggtggtggtagcggtggttcggataggcttacgagggactttcttggagtgggacagattgtgagaagcgtaagcggagggttttctaataaacagcgtggaattatcgaaatgggttcgttggattcggaaaacaatgcgccgccgccgccgtcatcagcccaatcctttggaggctcacctgggaattttcagtagttagatttggggatagaaaggaaaagcaagaaaataaagaaaagaaaaaagaaagaagaaaaagaaaataaaagaaaaaaaaggtactatttctactactactacttattctactagattgattactactactaccacttcagaaatgagtacgtaaaaattagtgacgtagttaaaataaatgattatattttgtgataaaagtaagtaagttagtttctttggtaaatgtgcaataattcttttactgttttcttatgtattttttttttatttttattttattaaaaaaaaaagttttaatctgacacattgtcctacattgggacagtcacggtttatgacctggagtacatgtagggtttcgtttgttttttagttttattaattttaattttctttcttgttttaactttttcaaattttcacatttattttttctttttgttttggtattgggagagtcacgagtgctttgacttggtaggaaaaaaaaataatcaacaattaaatatcagaaaaattataaattagagtttttgctatttttgttaagttattttcttctactttaattttctaaatatagattatttttattattattgtttttgcaggaactctgatttgttagatcaaaatctgatttttcatctcaatttctttctgacaagtactacaacaaaagaagaaatattgtctgaagccctaaggagtagtttttgaaaaaatgtgtctaatcagaaatattttggaacacaaatttaaaaaagcttccctttaagctgtgacgacgtcgtatctttcttgctataccacccctcatcatcatcatcatcatcatcatcatcaactctgaaaattggaggttttgaacattggcagctagctacctacaactctttgtagtttaactttttttcttttttgttagagaacaacttttttttttcttcatataattttttttttaaggtttcattgtgaattggtgttactttattatgcactagtttgttacagctaaaatccaagcagataggaagtttcttaaattattccaaacatatccaaaaatgtctcattattttgaatagactcatcacaagtttttgtcaaaataattcaaagcatataaatatacagtcagaaatgaattaataattaatttacctcacacaaaaagaaaaaaataaagagtaaattgttcttataaggtatataaattttaaccgtacacaataatgaagatatatattatttgatcctataatacttacttgtcaagttgtcatgatctagagatgtaaaaaaaaattcatatgtataattaataaatgcatgaatcatgagatcccattccttcaacatatgcagtctgtatcaataatttatatcaaaataatatatatgcaatttgcaggactatatatatatatatatatatatatatatactattattattacttcgttgtactacctatatagtagttgagtactaatttaaagtaatagtaaattaaacaac

SEQ ID NO: 225562 - DNA, 4522 bp, Cannabis indica
agccacatcaaaatctcagagaactgtctatatctgcttatggtggtagtaagtttccgaattggcttccattgcttcaaaagcttgtgaaattatctttatcgagatgcaaccgctgtcactgcctaccaccactgaaccggttgccaaatcttcaagtattggtattagatgagttgatggagcttgaatacattgtggatgaatcaacaacaacaacaacaacatcatcatcattttcgaccttgaaagagcttcggcttactaatttgccaaaactaaaggaatggtggaaaaatgcaggtgatcaaaatgctacatttacttgtctttccaaattggttgttgaggattgcccatgtctcacttccatgcctttgttcccatgtttagaagaattagtactgaaaaacacttgttgggggcctttcaatcagactatggcagctgcaaaagaagagaaaacatctgaatttcaagcatcatcatcaactactactttcacagttgttcctctctctaaattgaagacactacatatcattgccatggatatgtccacaggtgatccaaacatatggcagtctcttccaagcctccgttctgtgacattagatcatatttctgacatacataatcagcttcaaaaacttcagaaagtgactaatctgcagcaactccacatatggcgctgtgatagtttgaaggaaattccaagttggatcagcaatgtcaaatcgcttaagacaatttcgatcaagctatgccccgagttgacaatacctcgcgaaagacttagcctcatagcctctttgaaaaaggttgagattgaggactgccctcaagtttctcacattgaaagcatgcttaaagatcccttatacaactaaatgctctcaatcctctcatctttcaggtattaattattgttgatttgtcattaattacatattatattctcttgtgaagcatgaagatgaaatatggttaatgcttcatcatattatcttactaatctggttttgatgattaattttaaaatatttcatgtatattcaggtggaattgtgtcacgtggttgatgttgttgttgcttctcaggcttgtttttctggattttccaagttattttatgtcaaaattattaattacaaactaaaccatatgttaaaattatgagttgtactttatgacatatatcttataaagaaatgttaaaaaggcattatgcctagcaccctcttcagtgtttggtctcatataacttaagaaaacagttttttaaaaatatcattaactaatcgtggggcgtcatctataaaacgtgctgagcactactaatgcttaataacaatgccgagttccattacattttcctattttcccaacttcttccattcccgattctgcaagtgttatgttgacttttcttccaaaatctgctaaagagtctccccatggacactttcagcctcaatagttaacacttaaagattcttcaatcattttctcatcactcttcatcaaacattcttccatcttttcctactccaaaactatatgattacctaatgggcctaattaggtgatcaatgtaccagatcatgagtccataacaaggtcaatggtgcatgaggcactatgaaagggaggttcctcttctgactgctgattatggatcttctgaatgatggattggagtcaatgtcaatccaagattgcctcctgagttagtaacttatatggttcttcctaacattggatgttgtgagttcattcctataactcgaaatcataacactaatggtacacattcaatacaaccgttttggtacggatacaggttgtgagatgtagtaaaggtaatgggtccctgtcgtagaaatattttgctaatagtcaacattgacaagaacacacaaagatttacagctagttgtggaagaagcaagcaagttattactagctggtgattggatattaggcttcttagaggtggtggaacaaagtagcaaagattttatctgaaaaaatcattggcagtttgtacttgaagaagaagctttatacttgaaggatggatgtgaccaaagaaccgagaaagcacaaaattattctcgagttcgataatgttggtgtcaagatcgaagaggacgaaccatgatatcattcttctttcttctttaccaaaagcctgtgaacattttgttgacactatatgacataccaaagatacccttataatggcagatgtaaaatctacacttgagaaaaaaggtgaaaccagtgatactattgtcattacttaataatttttaatctggtaaatagtacttttcatcatccaaatatttttaaaagagattatatatcaaggtagctcgagatataaacaacttagttttgcttctttaggagactttgcattcaagagaattgagttatacaaatcacaatgcagtattttttttaacattatgactgaaaccagaattaatatagcatcatgccaacacccatttcgtaagagcttacagtttaaagcccccattaaattaagataagattataatgactgcgcattcaaaagggtaagttcaattaacagcaaagagtttgaaaacaaaaccgagaaaaaatatgaaatctgcaaaatgattgcgacgacaaaagtgtaccagaaaggaattcagatgccattaacatccttattatgaacatttttttaagaattaatctaagcagaggcggtcttcttttgctggaaaataacagcgtagactggaacgaaaacaccaatgctaaaggcagtaaagacagcaagaggcatcttcactttctgatacttcatcctgtccaaattgtacatgtgctttgcatgaaggtagtattcgtaatcgtcatgcccgtgtcctcctccacccattctcttcactccggtcgagtgaagacttctagtacctggccacagacaaatattgtagcctattgtggttagtccacacacttagtatttgtattttgtaggaaagaatatcaaggaaattttatcgcataaattatgaaaattctcttgaagagtagtagtagttagcacattttttgccacacgggaaatccttacgggatcaaagccaaatctaacatataaagatacaccaagcaaaaaaaacattctaaaaagaaatgaatactatagaacaattacactgattgaacaaactccatatgcatttactgtcgacgtgtaaaacattctaaagaatttggaatttctacatatgtatcgtctaaaacaacaattttgatcagcaatagcaaggaaataaacttcatagaattcgaatatgaatagccaatgctcaagcaacccttgaaacccaattacaactgtgaaagatttccaaccacagaacaagtcacttaattctgttatgttacacttaattctgctaaattcatttctgagatcgtcattcctgcaaatcctttctaactacactaaaattatataaaattcagttaatttatatcaaatacagtaccaacactcttaaatcataatgcttcttctcttacctttctttacaatctgaatccaccattagacacccaattctacaattttttacaatttgaatttcaaacccatcatagctcactaagcttcctgaaaatatttccacaatcccttcaattgaactcccccgaagaatccataccctaacatctccaaatagaccctaaatcgacaaaacctaaccctaagtccacccctccaaacaatcagataataaataaacccgaaatttcaaagctttaataagattcaaacaagtgatctgaatcaaaagggcaaggagagatttaaaatcaaaattttagcattcctttgtaatcctatcattggaaccaaacaaaacgacatataatttaataaataatactacggaaaaagaagagggtaaaccttgcttgaggaaaagggtggattcggatgaggaagcgataagctgcttggcgatggatctgagaccgttgtttaaggccatggctgctggtaatggtgagcacagaacagaacagggttgaatcgaatgcccactcaaacaattttcttagggctttttcttttatatttttcaagctatatatgacagaagaaagaaagacaccttttttaagagtaatttaataacaaaaattttacattgctaaaattttaaaaaaaaaattacaaaaatacttaccaacaaaaaaaaattatttttacgctttaaatttagataaatatcattttcgatcttgtgttttataaaagttatcaattaaactctctattttattaaataataaaatggatcttgtattttttaaaactgtacaaataggaccctgaactgattttttgtcaaaataaaacttaataataatatgatctagagatgtcatgacaaaattagttatattttctgtatctgttcgtgttagaaattgtctcaaagttggttatattaaaaaa

SEQ ID NO: 225563 - DNA, 2429 bp, Cannabis indica
gaattggtccccaatttttttttaaaaaaattataaccggttttatgaggtattgtgtgttatgaagtattttgttgtggaactagttttgtttttaatttatgtttcagtgtttgaagaactgatcaaagagcgagattgaagtcgcgacgccactgttgaaaattatgatccgaaagaggaagagtaacaagaatgagatctggatgatcgcctgaactgatgaaatgcggattgtgttcgctagccagacgatcgtgagactccgaatgagacatggagatagtagaagtatgacgatgatgagcagcaagattccttgatggagctctaaaagtgacagaagaaggaggaatcgtacggtctggacagtgaccaagatttccaagagaaacatcaccagcgttcattgttgaagaaacagtaggaggagctagtctgaccggtggagcgacagacagaggagctggagcttgctcggagatgattggaggaagatctgaaggttcaatcgtagctacgacatggtctggaatggtcgaggtgcctgcgatcggagaagaaccagcacaaatcacattggcaatgtgcaccggttcttggacagtttcacgaatgggattgggagtggcacgtcgtggaggatcgctggcaagagaaccaaaggtcagagctgacaccggagggaggccactgcgtgtgcgagccatggcaaaaaggcagcgtgaaatgtggatcttggtcgagcaaaaagtggatcttggttagggttttctcactcttagtctgataccatattagagagataaagaaggaagagtaattgtttatatataggggttggatatccaaccctagaatacacactaaacccaactaagaatagccatatctctatacccaaacactaaatattatgtaatatttaatagctcatgaactctacattgacaaggtcatggtataatcaatatgcattaacactgttaactagtgttaccttaccaagttaagtttttttagtctttttgttttgttttaattatgctttgagccattttccctcaaatttttcattactgtttggatgaatattagtttgttgggctaagcttttctcttcttttctcttatcaggtcacttaccaagcagatcattttcttgataaaaataaggactatgtagtagcagaacatcaagctcttttagatgcctcaaggtgctcatttgttgcaaatctattccctccactccctgaagagagttcaaaataatcaaagttctcttctattggtacccccttcaaggtaattctatttccatattgacagtgttcttgtctttaaaattctttagacatggttcctgaatcaacctttaccttcagcaacaactacaatctttaatggaaacgttgaacacaacagaaccacattacattagatgtgtaaaactgaacacagttttgaagccaagaatttttgagaacgacaacgtcttaaaccagttgagatgtgttgtaagtgaaagtctaatattcttacagatcatttgaaatttgaaatatcaaaatcattatagaaggtgataaaattgaaaaatgttacttcgatggatactctactttggcagggtgtactagaggctattaggattagttgtgctgccccttcgattgttacaggtgagatatctattggtggtattatgtttactattttgattgattctggtgccacacattcatatatttctagtagaatcattgagaaatttagtaggccatgtgatatcatgtctagtggatttggtaccttgttacctactacagaagtggtaatctccaggaggtgggtaaggtctctccagtgttattagaagggagagaattttcagtggatctaattgaattagacttagaagtttttgatgcaatcctgtgaatggattagttgactaagtacaatgctaccatagattgtaagagaaagatggtaacttttgaaccagagggtgagatcccatttatttttatggaaaggtgcagggatctcagattccaatgatatcggcaattaggaccagggaattattgcgagaaggatgtacgggatacctggctagtgtgttggataccacaaaagatatacctgaggggaccgaaaaaggttcgagtagtatgtgaattttcaaatatattcccagaagagttactgggattaccaccaaagagagagattgactttgaaattgaattagtaccaggggctgagccagtttctaaggccccatatagaatggcaccggcaaaattgaaggaattgaaagtccaattgaaaaacctacttaatctacgattcacgaggccaagtacctctccttggggtgcatcagttttgtttgtcaagaagaaggatgggtcgttacg

SEQ ID NO: 225564 - DNA, 3667 bp, Cannabis indica
tgcatgtcatgccattgactatatatatattataattttgaaatgtttacaagtatatagttttatattgaagtttcattgaaaaaaataaattacataattttaaaaaggttgaattagtcgatctatatatcgttctatagttttaattatatattataaagtacattaattaattaataaataaataatagttgcatgatgatgatgagttagttaatattatatgagtattgctattaggtactagtagtggtggctagcaccttctcgacatgtcgcattacgattggttagcgatattccctaaaagctattatactaaattatatgggacccaatacttagttaggccaatagcaatattaatacataggagggtgctagaaaccgctgataccctttagcatttctcatattatataaagtagtaataattaagttaataatgaattaattatatattacctgatagggcaactaggtcagttgagtcgagacccttatccatgaatttggacttaagtacgtctagggttacaaaaggagatggaagcaagatgttgggcacctgtctgattttgctattcttccatcccttcttcctaataggttcctccatctcggaccacctgcctatttttatatagccataattatataaaatattattttttatataaaaaaaaataattatttactttttttacactattctatacatacaacaaaaaattttacataacgataacacaaaaataatatccaaacaacaattaaaaagaaaaaaaataacatacaaataataaaaaattaataactaaattaacaagagtacaatataaaaatacatcagaatgtcgtatttttcgtatataaaatcattaaaatcgtaaaaatttaaaattctataaaactgtattttttgtaattcttttattgtttttgtatatttgtgaaataatctccaaaaatattttttttcatttagttatataccaaaatatatttattttaatatataataactaattaagtacacaaaattttaatgtagcaaaaagtaaaactttaatgtgtatgcatatttcaaaagaaaaagagtttatctatataaatagattttttttgggtaattaaggataaatagatcatttaaaaaaaaaaaaggataaatagatattatttattgtgcatacataaaattaagaataaacattgttagttttttataaagtttagattagatataggagtagcagaagtaatttgtttaaattatttctatttcctcatatatgaaatattatttgagttctaattaatagatggctcatgaagacattaatttaattcataataattaataactcaaatagttcaaatatgaacactatttatgtatattatttaattgtaataattgttctaaatatatagctagatatataataaaaagaataaacaagtgggagaggtggaagatttaacttatatatatatatatataataaattaagaaaaagaataatgaattattattatttattaaattataccagaaaaacagatcgttcagaagcaattgtaagaagatcagcacaagaaacagtttgagggcaagcttgttctaaggcagccttgattctatcaacaacctcaaatcctctaattgagttttggtttgggccagcatctttctcactcactatcccatttgttgtgtcattatccaacaacactgatccatcacaaccctgcatatatatatatatttatgtacaaaatataagtgaattatctagtaagagaaatagagaaataatttagttttgtagttatagtagatattctgtacttaaaattgtgtcatgaaaaagggattatatcgctacgacaccacgcacaacgagaaaaactaattcttgcccttaacgaagaaaaattgtagcgttttacttacgtggacgaaacaatcgtggaaatgaagcctgatgaggctggctccgattcgaggatcggaattgttgagaacatcagcaacaatatcttctataatattggtaacatttggacatgtttggtcgtaaaatgttgtgcttaattgaccatatgatattgaactaggtaataatattcctccaataatcaaaactacatacaataaacttgagccactcatcattttcttgtaatttagactagagagaataagatttaatgaagaaaatatcaataattattgctttaatttatagtgacaagattaagtgcatgtgttgaaaagtctttgtctagtaatttaattaatttcctcaattattttttgagaaaaataaaaatttctattaataataaacaaattagacaataatccattatatatattactttagttgaatcaacaataaaagcaaatcaatcatgtcgtttagtcaaacaagaaagaataatctagtagcacctttaactaaaaaataaatatgcagtgaagcatcaaagaaacacaaattaatccaattaatccgaataattaaatatgtgacaaatcacacctattaataactatcaaacaaagaaaatattaattattcaatagtactttaattattaatttcttcctttttttgctccaaaagtcgtttgttattaataattaaacaatacatcgatgctatgattctctaaaaatattccactaggttgaaagggtcttaagagcttattaactataataatttacaatgatttattaatgacatgtgtattaattataattagcgatcaagactataattttaataaagtcttcctttttatataaaaatagtattaagataacctaaatatatcttaattcacatatacccacaccacatcaaccataaatttgtcaatatatatactcttatatttcttgtgtcctacgtaaaataatttaagcctgtttttaaggcccacactcaagacccaaataaaaaataatcttttaaaaaatatacttactttttaaataatttttaaaactaccctttatcttgttgtatagataggttaattagtacaagaaattaacattgttatttcattggcccaagtgttatatatcatcaatatatagtactggaaatcaaattttagtgaaagaagaatcaatatagcgaaaagtacctctagtattttcattattaattaattaatttattggttaaaaaaaaaatataatttcaaatagaaaatgtaaactgaatttttcattaattgtaaaaatatataagctaattaggatttttaccctctaaattttgacatgtaccaaattatgttcctaatttttttgaccgttaaaaattaacacgaaaacacatttgggtaaaaatgaaatcttgtattatttgagataaaagatacagaggtatataaacaaggcttaaacagagaaagaaacaaatcaacaactcagcctgtaattactaaactgcccttaactaatttaactacctaaccaactaaataacagacttcagctgaatataaacaggaggcgaaaatataggaaaatataggaaggtaaatcttgttaccccccccccccccctctcaaggtgggctgtatatgttttgtacaaccatcttgctagtgtgagccgatagtgttgaagcgggt

SEQ ID NO: 225565 - DNA, 3183 bp, Cannabis indica
ttaatatttgtctctcattacttctcagtgttgaagacaaaaaccctcaaaggctctctccctagtcttctaaatataagcgctgcgctcccaagtcattcctcatcgccatcgccatggctaccttgaatcaggttgtctccactcttttcttagccacaatagtcgtgaacttcccaattgcaactttctccgacgaaccatgccagtacccatgctatccgccgccaatcggcaccgtcacgccagccacaccctccacgcagctaccgcctccgtctgcccaaaccggctcatacccacctccggtaacaggcagtggggtcttacctacaccctacccgtacaaccctccgcctaattatggtggtagtgacggcggttctttcggtgctcagccaccgccggatcctatacttccttacttccctttctactacaagcaacctcttcaccagtcaccggacggtgacttatcttcggcgcccgtagctattggaaaatccacttataatctcatcatgattactatcttgttcttctttcattatgtttttgcttaacttatctagctaactagatttggtttttatttttaatgtttgtttaagagttattaattaagtgaatataaaatgttcaattatggttttatgttgcataattgagtttaaattttgcctggttcaatttcattttctttctacttaatgttgtcatgttttatcaaaaaaaattaaaaaattaccatgtgtttaaaaatattggaagaagggtggtctaaaaagatgagttattgctaggtaatattgtaatttatgtttttatggcacactattggttacacatcacaagttatggataagcatacacttggggtagattgaaacttgatgattccgagatattcattcttctaccgtctcccctaaattttggcctacattatatcattatcttttggatataattgaaagagaagagtactagctaagaatgaaaaccaattgttgattttgcatatggactctaataatgttcattaattacttttaattcctggatatggtcttaatatatatatatatatatatatatatatttgttaatgttacattgatagtattcatccaagtgccattataattctacttacgcgtgattgattatgatagagagggaaacactctcttgcttctcaatatacagtaggaatgcctattatctcaaatagtcaaatgtttacaaaactaaggtatgtaaacatttagtttacccatgaagtacccgggtaataatttttctacctaattagaaaaatatctcacttttacattatatagactaagatagactgagattgtttcattagaattaaaaaaaaatagttttaacaaaaaatataaataaataaataaaagttgagtttcattaaatattttatataatataaaaaaatattttttgatattttttattaagtagttaaactaagacaaaaaaattcaaatttatgttttattattcgttattatatcaaaatttgaagatttaatatttttaaaattaacatttatagttaaatctgtttagtaatgatttgggtaatacctattaagaaatgatccgtatatatatatatggataattaacaacacatcaattttgtaaaataattatattcttatgtttaaagtttctttttttatatttttataatattttataaaaatacaataaaacaataaaaaaataacataaaattaataagaaagcatcaaaacaacaataaagtaacatagaaaaatatacaataaccaaaaattaataataaaataacaagaatacaatctaaaaaaccaaaagactgtattttatataaataaaatttcaaaaacgataaaaatattaaaatctaaaacagatagtatttttgaaattttttttatcgtttttgtatttttttttagaattatcccatatggagcaatagaagaggcccaatatgagtagtgggtcgaaagatattgggctgtaaaatggtaaatccaaatagactatggtatttcttctgcaaattaaagacggaaaacatataaacagaaatttgaggatttcggacaataacaagatgacagctattaatcattaatgcgcgccaattgtaggacccccaatgcatctttctgcttcaaacggcgttatgttattggtcaattccaaataaatatatatacatcaaaacttgttcgagtacctcctatatatagttctttcattagtatatatattaattaatttacacttaatatatcatatgttaattgtttgcttttaaaaaagaaaagaagaaactatggataacttaatatattttaatttagagagaagatacgaagaactattaattaatttgctaataagctcccattttgacatgtattattattaaacaaatgcatgacaaatgcatgtgtaatactataacgatatcttataattagattattctagagatatataagtcgcgtttgattaggatgaatgaaaatataagaatatggatagaaataataatagaaatgaaagttaaatagaataaaatttaaattgcaaaaaaaagaatcattaatttttttttcatattacattaaaatagttttcctttcttttaaaaatagaaattataaaatggtagaaatgtcattttattagaataaaaactattctttttcattctatttcatatcattatcttcaaccaaaagcgaccataatttattacattgtactcaaataaatagtatacctagaaaggtaaaagtacaaatttcaattttaatgaaattgatttattggggacaaatgatactcctcgtgattcttgcaaacaaatatgtaaaacaaggttacttcaaattaattagtacaagtcgcacataataagtgtcctttaattcgccattgcccactattaagcttaatactttaataaaatttaatttcaacataattttatttataatcaataaagttataaaataatattttgactttgtcaattactttattcacatattttgttttcataattatgtattatgtttaccgagatattttaaaaataaatttaaaaaaagcttaagaaataataaaagttataaataaaatagacagagtttt

SEQ ID NO: 225566 - DNA, 2347 bp, Cannabis indica
aaaaatgtccaaggacattaataactacttcctagttgcttacatgtagctacttctccgattagtgaattcgagaaagaatatcttttgaccgccacccacaaaaccgtacttcagtagtcacgagccaaaatcgttacgcacgttccccccacccaccccagccattacattacaattagtcttcaaccaatctaggggagggggaccaagcccaagatgtgggaaaataaaaattcatatagaacatatcaatataaaatacagtcaatatgcttaactccaaacactactacgagtttaaaaacaatatatcttgtagaacatccaatccaatccacgtatcttttcgtataataaaagttcatagaacattcttgtatctttacgtataataattgaacattcaatccacgtgatgatgatgacaatatttacactttggttttccatatcaatcttaacactcccggacgagtgtggacacctaggaaaattatgattgattattttgtatcacggtgtgtgcttaactcatgaaacaatgtgatggcaaaaaagagagaaagaaagaacaactatgtatttttttcactgaatttattttatctttatttatttgatcatttaataattaatatcttatcctataacactcaaaaaaaaatattttatcctataaatatttaattaaataattttttatcttaaattatttaaatgataaataatcaatacaaattcctttagctcataggcgtgtgacattattataatacttcaaaattaatttctcaattttagatttattatttattatccaataaataataattgattaaactaatcattatcttatttgtataataataattatttttcactaaaataatatcttgtctctcatcatattattcatctaaatagtattatatttaactaatatatatatatatagttttaacaaataaaactaaatagattactctttgtttgctcgagtgatcacaagtaagaaggtctggctctctacatttcagcgtcaaatggctgatcactggaatgggcgtttcaaggtcaatattaaagagcacttctccggtctctttattctctgttttggttgtgaaggtgatcgattgagggcacttgacaaggaaccatggcattttcaaaatcaccatatagttctctatccgcccacggcaatgcagaatgtatcacctgaatctatggttttttctcctttttgggtccaagcatatcgacttcctttcttaagcaagtcaaggttattggccaaatcgttagggaatttattaggagagtttgtcactgtccatgaggattcttgaatgaaggatggggaccttttttacgatttaaagttcggctggatattacaaaaccattgcttagaggtaaaatgatttctttgccgaaagtccgagatgagttttggtcgagtttcgctatgagcgactacccgagtattgcatggaatgtggtgtgattggccatttgtatcaaaaatgtcctcaatttttagaaaaccttgacaatgacattgaaccagaattagcatatggtccaatgttgaatggatctccccttccctcatcatcatatgatcgttaccgttcagatttttcaaaagggaatgcgtggccattacttactcgattggcaagaagttctttaactgcaaccattccaaggatcaataatcgacccactgcccatccacaacctttgctagttggtgaaggttcaaatacacaagttgttcacccctctcatgctcgtgttcatgcctcatctactgcttcaaatttggttgttccaaatttgtttacacctgatgtcttgactaattccacgttagtccctgcatctgcaacaaacacatcaaaaataccacatcaatctcagcaagtgaatccatctttggttaccacttcctcggctggaacaactactatacatcttgatgatgtatatactcctgatattggacatcactctgctaataattcctctaatccttttccccatccttttgctacttatccaccccatgatactaattgctacaacttggttccatctggtctgtctatgccatctactacagcatattgttctcctactcaaccaattgtccattcctcatttgaagatcaagagaatatacatcctaatcgccaagtcaaaaggcagaatgaatcaatctcgttgagacatcatcttaagagatgtcgtggtaatcaactttttgaagcttcctccttgtcaccggaagtggactcacagttttcagtttttgatgcttctttggattctgaag

SEQ ID NO: 225567 - DNA, 3166 bp, Cannabis indica
aaaatgttactttagaaacacaaggtaaaaattaaaaaaaaaaaataaaaaaaaaaaaaaaaattacgagattagttcatttcaggcatattattttagaattaaggtattttttgatgacgtggcaaggcattattgtaattgagatttgttaagttatttttgtaattattttatattttaagtatatttttgaaaaaatctctatatttaattaattataattttaaaaatataattattgagtattcgggagaaatatctatggagagagaagatatagatatattgttcattttcattatcctttaagctcatatttctattatttttgtttgtataatcaaatattaaggctagaaccccttgtttgagctacaaacataatctatgtattccacttatagcttaaatttagtacgacatacaattgttgttgtgcgtctatatatatacctaacctcttctcagcttttcactcttatacaacctagttgtgcttatgtattttaagtataaatgtaaggctaaaaacttgtgatgcctccagcaactatatacaaaataaacacagatgtactaataactctatatataaaattacaataagatctgagatgaattaacctactttaacaaatcagaaacattcttcctggaactgacaataattggagaagcagaaagtcctttacgcttgtctgagtgctgtgccatgtcaagtttctcatcttcaccagatttagaagaagaagaagaaaaagaccctaatatttgcacggataagcttccacctagacaacaataagaacaaaattaaacaccataacataatatgacataattcagattttgccttaacacttattcgacatgttgggaatataaattaagaattcaagagctagattaggtctcatttttaccagtactgaaaaaagctagtaagagtaagagacactgaaaattactaacccatcagaaggaacgaaattttcactcaaatatttcaattttcactatcatgattaggcataagaaatacagtaaaaatataatgaccatgtaaagtctgtgtctagataagcgtaccaggcagatttggaattttaacaacaaacaaatcctcgagatctcgctataaacatagttttacctagaacaagagcagcaccaacccaacctgcagtaccccacctttcgccaaggagaaaccatgcaaaaacctccacccagactggctctaaggcataaataattgcagtttctgtagctgacacatcacgcattgcagccatctgtacataaaaattacggttggaaacgctacatttggagggtgccaacaagctgtaggtaatctcttataaagatctatatactcgcaagaaaaagcccttaactaaaggcacgaaaagactagagatttatttaacttttatttcatgttccagtcctacagcttcagctttctttcctccggtgaaatggcaccagaagagttgttatttatggacacactaatgaccattggtatacgtattacaatgagagagctcacgacgcttacatagccaaccaattcattcgaatgaagtgaagtgagcattttagaaaccctttccagaaatgaagtaaagtaaatttgaagatttgggactggacaagataagctcactcccgaagtctttcaaatttatttgttttctaaggattgagagtaaatagaatacctctccccataagcataacccagatgagaaaaggccagtgtatatcgcaggtatccaagggaaggcaaccatccaattccaaaagtttgtccaagaccataatgatggatcatactcttgtaagccccctgaccaacctccaacaagataaaatgttgttgacaggatggacacaacacatacctaaatggaccatcagagaattcgaaaaaaattagtgctgcatgaccaatataaaacaagttgcagaatatatatacgatgtacacatatacactaacctggtatccaaggagagctaagaatttgtcctttttggtgcttcgtgctatatgttctgttcttatcatatgcacaccaaaaaacagcgcacttaagaagttcaaaagatctccaacctgaaaaacgttaatcataaattgactcttgagagagagagagagatacagagtaacatgtcacctttaatcaattatgtgcaggcaattttccagtaggatttaactacttcccttctctcacaatttttttaatcacaagtatatccgtacaaactaaatgcacttacacaagggggagatccactggattccagcattgcaactcctatgatagccatgaaagctgcaaaccaagtacgggcaggaactactgctcctagcataccatcaagcaatggaaccacgattacctgatcaatccagccaaagcatccaaattctgtaccttcaggtactcccacagatcaaaaggacttgcaatagtggtaatattattaacattaaaaacttactgtgagcattgatagaaaggatgcacggccggcatcagatgtaagcaaccctactgcctgcatcagatatcctagactgacccaaaaacccaactcaactccagaattgcgggtatcaacgtccttttgtgatactgatagcagtacaaatgggatgaatgggatggcagacaaagcaaatcgtacaacagtgaatgatgctggatcaactattgcttcaacctctttcacaactgggatgctgctggctacaacaagagagttttaaaaatttaaatcatggtatatactttcatagcattatatgaagaattgtctgccacgttttaacaagctcatagctgattagttacagccatcaaataacataactctctatcagttaatcaaaaccatgaaccagacagcaatgaccaagtacaaattatagaaaatctggcctattgttgaacctgcaattactccaaccaccataaatgaaaatgttcaaccacaagcacacgaatagcaaggtcaggcaatgacaaaagaagcaactatccaaatagtgcattcacccttatccaagttcataatcgttagtattataaatgaaggggttttcattcccaattcccctttacttaagaaactatttcat

SEQ ID NO: 225568 - DNA, 2667 bp, Cannabis indica
gcctttagttgaaaatattacaatggtaacagtataggtttctaaaaggtatgccccaatcctacttgactgtaatacccatctagcccaaatagcactaccagaaaactcggttgaatcttcagtctttgtctaatatcatgaagaaaagttcatttttccacccttagaattgaaacaaatatctccaagatatatcaaggcaacaaatcaattctctatctatgctaggagcttccggctacaaaatgttaaaaagaatttgaaacttaaattggaactccaagctaacgaaattattgcaataaacatgcttcaaataatactacttacaaatgacaaaataagaacacaataaagtgattgaaataaccttgtatgaatttactatcaaaagaaaaaaataaaaaaagttagttgagagttttatttgttttagaatatcagtggaaagttacaataaaaaaaaacacaaatacataagtgtgtgacaaaacaaacaatttatcaacagaattatcattaaaagtgttagtaaagtgtaaacatgtaagcaatcctgctaagaggttcgcccaaattatggtaatttcacaatgtaagaaattcccctggccattgacaacacgtcaaggtaattccagtacagatgggcatataaaccagtgctaaatacaccacggattggagtttccatgaaaagaaaatggtggacattatatgaagagtgtttgaagagaatctaacctggactgaacatcctcctttcccctcaatcttttcatgacacatgatatgccagcatttacaccagtcattacagcaaagttgcgagcttgtacaaacgggcctccagaaagagcctgcaatcaaagtaaatcatttgtcaccatacaccaaaaaaaaaaaaatcactaacatataaaaacttgatgcatatcatcaaatacatctttgttgttgttgacacattgttaatagcatacaaccttttcctcgcgttaaatgaaagatcaaagcacataatcaatcttacccaactcaaaatttcaagttcagaatattttttactcaagcattcagcaaatataaaatttgatcagtaaaatgaaaaacaaggtctgtcaatttacaataccaaattataattaggaattcaaacccatgaaagcaaaaaaggaaaaaaaaaatgaaatattactattaggcaccagtggtgccacaaggtgacaccttacgagatgggcctcacaaatgtttaacagttattagataaaaatatatgaattctatattagattacaccaatagcgatataggtggtgccgacaccattggtgaactttagcataaggaagcatccacactgttattctaggattcttcatatcttttgacctttagttggtgttgattttcatgttgtcaaagagttgaacaatgaaaatagatggcgagtgcttgatcaaattgatcggttcatgtaggaacaaggtttaagtctgccggttaattagaatacctcaataactcttcgctctttgcgctttgtaagcagacatagatatatattgtcctcattttggccaaccagctgtggaagctcttactctagcgggtgctcttggcccagtgaatatcgcctattcgtggtgttctttagcataaggaagcatcctaactgttactctagggttctacatatcttttgattaattgaagaggttccagtttcatttttctatctaatttcctaaaccttttaagctacaaaccacagaaccatgaatatactaaaattatgtaaatgatcagattaataactaaaaccctatcttccatttctagaacccctttcctctatccaattactatttcacataatttccaaatgggtatttatacagttcagttacagagacaaataacgccacaaaccacaataaagcaccaaactctcacataatttcgatcaaaatcaccaaaaataccatttctaaaaacaaaaacgaaagagagcagaatttcacctgagcttgtttaagtgaagccatggcttgagggttaaggttagcctgaggaggagtaggaaaaggagagccaccatcgttggttaaagtacccataaaagcaccgatggcagcaccttgagcggcgctagtgatagtgacgatggcagcttcaacaggcaaagattgcttagtcaaccaagttttgaactgagtctccaaaagcttataccgaacttgtaattgctctattgggttctgattaggagacaatttagccaccatgactccttgcttcccttgctccatcgaatcaaaatcaaaaatcttcttctttctcaaatggcgtcttgagtttgaaagttttggttttgaagataacgaaaaagtgtaagaagaagatttgggtgtgtttgtttggttacgagtataattttattcttagtaggaatagcctaaaaccctaatagtttgggctacgatatgggcctagtcactacccattgctacatgtgtctatggttaggcacgtgccaattcatactatattgaagcttttatttatttatttatttattttggcatttaataatttggtgggaaattggaatttgccacaccctattatgtttagggattattttaataaaaaaaaaaa

SEQ ID NO: 225569 - DNA, 2409 bp, Cannabis indica
ctaaatgaagtatgtactcgagtcctgtttttttctggtatttctattcctactctcacagcctgtccatgtggaaaactatggcacgcacatttcttcatagaaatttgtcaaggacataatctttcactctttaatattaaaatactgaagttatggtagtttgatagttttgacattacctttctttggattctttgattcttatataatgtttcattcacagagaatattcaggatagaagtgtgtatattgtcattagtggtgctacagacgggagcgttgccttctgggacataagtgaaagtattgaaacttttatgtgttgggtatcagttcttcatgtggagaagttcattgactgtcagaagcggccacgtactggaaggggaagtcagggtggaagatggtggagatctattggccgtagcatgtcgaaaaatagcacagacagtgaatcaatcactgacaaagctggaccagccgctaatcttgatttcccaaattttgttaaacatgaaataccatcattgaaagatgcttctgaaagtagcacaacaacttcttttgaagctattcatgttgcctccaataagtcagaattggacatagatgattcttcatctgaaatatgcaaaatatgtccttcacatgtttttaaagaaccttcaccaatctggtgttaattgtcttcatgtttcagatgtgaaaggttgtcaaagtcctgacaatggttttgtttacaatgtacttagtggaggtgatgatcaagctctccactatcttagctttgatttagaattttcatcagcagagcggaaaactgaaataataacaccagaagtgataaatcccatcactgggcaaggatgtgctaagaactttgttaaatcttaccaaaatcagaaccacggttataggatcagattcttaaatcgtgataaggttctttctgctcattcctctgctgtaaaaggtaagtaatgtgtttgaactataaatttcattcatgtcgaacaggtcttttattttattttatttttacagcataggtacatacaggagccatagtaagcattcagaatttttcatcacataatttttttgaaaaaaggagaaagagatcacttgtcttagactgatattccctcgatatatattgcaagcctcacttaaggcggaggaaaaccatagtaaataaaacaggaagcaaaaataaaaaatgaaaaaactgtagaaaaaatttgtgacagcaatcacaaaatcccaggattattacaacagcacaccccaattcctgcttaagtctggaaaggagagatcctcgaaatgtttagttcttaagatccaagtgacagtccagaatttgattctttcccaaacatcctccgcagacctttccagtccataaataattctgctatttctctctgtccacaccgcccataacagtgtcgtagtcctccataatttaactttcctttttttcccctatcggtttgcttatgttctctttgtgcgcttcactttatctaaaaagttcgactattccgatgcacatgttccagcccggagagattgccatatatggtcttcttttttgcaatacttcatgcacgcttgctttccttaagaatactaaccatctaaacactttaacttttgctggtactcaacttttccacagggttttagtccactctaggttctttgagctattatctgaagtgaagcaaaggaaagcggacttacaagagaaagagccaccatattttggattccaacccctactgtcaaccgataagttagccaaattcacatgttccacttgctgtaacaaatccatcatacttggaacttgtccaacaggtttcttctgaatttgaagtcccaatttaccaccctgaattcaccttcctccacaatttccatatctttgatgcacatattctttgatctaaccaatgtggctaactccgtgtaggaagtaagtaatgtattctgtccaatccacacatcttccccaaaacgaattcatttcccatttcccaatttgaaggtttccaagtttaagtattcaccataaagtgatgcaattcctttccaaggtcctcgagaagtcattctctcacccgttttagtatcttaaaaattctccgacattccataacgactctttataactctatgccagagcgattttgtttccaacaggaatctccacaaccatttcgtcaacaggctcttattcctcatttctaagttcccaattcccaaacccccgccctttctcggtctacaaacttccttccaatcaatcaaatgttcccctcccgagaggttacctccttcccagaaaaatctcccatcatcttctcaatcaattgcaccaccacctttggtgcttt

SEQ ID NO: 225570 - DNA, 4003 bp, Cannabis indica
ggaaaagattgacaagaacatccaagaggttaaaaagtattgcactgaagtggatgccaaggccgacaagaagtatttgcaaaattttaatgattacgagaaggatttcgagaaccaaatagaggataaatttaaggcccaacatgctaagttagaatctgccaattctactatggcccaagagctcaaggaggccaaaggagccaaggagacccttgagaaccagatgtttgtcaaacttcaagaactttaggacaaaaataatatcataaagggtctgtaagctaaagttgactcagctaaggcacttttttggcttcttaaggaccaggttaccgccttgactgcaggcatcagggagaaggacatgctcattgagacaaggaccaagaccatataggatttgcaagacataaagtctcaatttcaacaaggctaggtccaggccttgaaggaaattgtcgccttgtgcaaggaactcatggacaagaaggaggagcgcgagaaagatcaagagtctcatcatcgagccttagtccccttggtagacctagcccatgtcctcgtgttgacgtgcttattggagagtgttcccaacatcttcagctaccttggtgaagatgcagaggaattttctaatatggtctcgatatacaagatagacatcaacaagtacctcaatccttatgacggggccaaggatgaggcttcagaagatggtgaggctaaaaatgaaactaaggatgttgaggacgataaagctggaggggatcaatctgcagaggtcatggaagtttcctccaaggaaggtgaccatttgcagaaggacaaccctgaaggaaaaatccaaaatcaaaaccttatgtccaatgtccctccctagcagtgatcaggccttactcttattcctttatttttaacttactatcctttgcaagacatactttttaatatttgcaaaagtattttttccatgcttggtctgcatggctatttgtaatattgtaaaagactatctttcctagttttaaggcacgggcctttatctttcgtggagtcattttattatgcatggtatgcggggcgttataatagatataggatttttagttttatttgtttccctttaagcttttattctctttcatttgcatgctagaccattttaaggcctattatcttaggttgtttagagatttttggttccaatggcccaaacttcaaaccttagacttttcttaacttttaatccctctgatgatttaggaagtatttgggggccaaacacttgtttcctattttcaggttggattattcttgctatgtccctttatgcagctgcacttttaagttagctaaacaccctgacagtgcaaataagctattaactcactcccaaaccgttgagtggtcgcagagcttagcatcttttaagtgccttgagtatttaactgcttaaacaaaatgttgcatgaaggatgttggtcggggatggttttctcgtggaagggcaagtttttgcattccaagcgtttcctaactactgctctttataaagttgggctttgggagaggtggctgagaaagttatagatttcaggcattgccccttgtttaaggactaggctaaagtcgtggtaacactcaggggaattttcctagcctagactttgtcaaagagaggcctttgccactatggccatgcataaactaggggcaggctacacacactatggattttaggcactatcctttgaccaagataggcctaaaaatgcataggagttcaggcgaggcttctccgtccactccttgcaaaaaatccaacaaattaaaatttaggcaacacactaaaatttttgagatggaattcgggcgagtttttcctcttgggatatttggctgaaaacacatctcattttaggacttacactaattttaatcttaagaaggaattcaggtgagtctttcccttaggaaatttggctgaaatcacatctcctttttgttaaatgcaagttacactaaaaaatttgacatgtataaataaagtaaataaatatagcacactgtacattttttgggggcatacacagctaggcatagtacccccaattgagctgggaagtttggacgtctccaacttcttggccacttatttaaaacatagcttgtgatctaaaaacaaaaagcataaattttaagtgtaaacttcttctattttcatttcattgtacccgtagctttacataaagaagagaattgttcaaaaatttacaaaaaatttaatagatacatcaaggcttggtcacctaagcctacttttagttacaatgcaagtggtctgcattccagtcatgagggaccctcgatccatccatcctcttaagttgaaaagttccttgacccactttctgaagtatctcatatgggccttcccagtttgggctgagtacccccactcccagttcttacgaagttaggaatactcttttcaagacgaggtctccaacatcaaatgtaggattcttgactttggagttaaagtgtcgggtaatcttgcatttgtacattttgagttgaacttgtgactgttcctagagttcctcgattaggtccaacgattcctagtgcaaggagtgattctaggaagggtcatagatatttcgttgattagaggggatcgtggcctctactgggattactgcttcacacccgtaagccatcacatatggcgtgtgtcccattgaagttctctttatagtcctataggcctaaagaactcgcaaaagctcttctggccaatgagctttgtgatcctggagtttctttttcaatgttattttcacaattttgtttatggtttccacttgtccattggcatgcatccgtgctacagctcagaaacttttcactattccatgctaggcacagaagtcggtgaagtgttcattgtcaaactattttttcgttatcggagacaatcttgtatagaagtccgtaacaacacacgatgttcttatatttatgcgcccatacacctatccagaaggcttaacaaatgattaaaaatgttcttaactaaggcacgacctctgtaccacatgcactacgtacaactactgtaatagtattggtaggatttgaatcgtaccccgagtaccactaagtgttgtaccatatgaactacatatttaattgtactagtgttggtaataccggattttactcctaaacatcatgtgttgtagtacatgcactcagtatcgttaccgtactagtgtttgtagctttagagttagatttttaaaactttattttatctaatgaaacttaagtgtcttttctaatttcaccacttatctcatctaataatttaaaaaaacaattttattttaataattatatataattatcaaataaattacaatttaaatatatttattaattggactcacaaaggggactaattaataaatatactactatacctcttttcgtctcaaaatttcccaaacttggtgaaaattctcaaataagacatagtctatttttaaattctaattgacttattaaatcaattaattgagtctacaacatgatattatctcaaacaatgtgaggactacgagcctatgtaaccaagctcctaataaacagatctttaaatttaccgagtaaatttcctaacttattaattcatcctaactccactataaatttacaattgtactcctaattacatagaacactctgtacaccaagtatagatatgctatgatgtatctattgtttcaatcacgataattattgatcctcaatagatggtctacattgagtagggataaaattactgttttacccttcaatttattgtatccttgaaacacttagctacttgtaaatgatattttgagaaactaatataattaccaaaataaatgttcaatcatttaatgcctttggcaaagctcataagtgttggaaaatattttaccaggat

SEQ ID NO: 225571 - DNA, 3358 bp, Cannabis indica
ttgagtttttgagagaggtatttgtggggttttgaaaaagtagtcatacattttcaatgtaaaaaagtattagtttagggaaaaaattattccctaatgcatgcataaaaattcaaatttcccattagaaatgataaacggttagcctcaaatatcccattattaaattaaaaaataattatttatttatttttctgaataaaacaaataagtatttagtttgtatgtgaaccacaacaatacccacgaagacccacacatctactttttcccatttttaaaaatgaaagaaaatgtaaaatttgatggaaaaacaataataatggcgtttttgagaaagaagagagcaccagagtcatagaaattttattatgatataaaaagattttactcaaaaagcaacaaatcggtgtaaagtcagaagcagtgagcagctccttttggcggttaggggcaaacttctccctttcctttcctttccttgcagtcatttttgtcacatttctcgctccaagaagtagatagagagagagacagagagggatggaggaagagggcatagggttggtactggctagggccactgagctacggctaaagatcgggaactgcatccacaaggcaacctctcctcgcaaatttcaagatgacctattactggagaaagagaatggagtccatggcggagggcttggagaagaagaagaggaagaaggagaagaagaagaagcgcagaggcttttgagtatttgcgatgcccttgaatcccttgagacccagctctcgtccttacaggtttgcttattgaaactccttttcttattagggttttcttcgataagctccaattacgaagtgtgtgtacatatggcaagttatttcggctttagtattgtgtgtgtgtgtgtgtgatgccgtttctcagggttttcgtaaatatgtttggtcattatgctttctttactaatactttccatgattactcaatttttttttaattaaaaaaagcaacagtaaaataatattgaatatgtccatatctggattataaacacatgccttttacatggtaatatcacatagaataaacattacaaacatttttttctagactaagcaaaaatgacttggtgtacctggaaacaataatgaataatgaagttgtaagctaaataatagttttctcgaactcaatgaaaatcctcattttatatctaattgaattagttaagcacacacacttattcgatgatacagtcattggtgattgtctaatcaccctcccattccgggcgacagatgcttggatacatgcccaaaccaagcactagaaatgcaatcacagaatggagtgataggaatctcctatcaattaatttcagaaataaaattaagaagaagaatgagaagaacaatggtttgctattaaaatcccaggtcttctagagcctggtctctccttacagttgctaaagaaatcactcaataccccttaaaatccaccacttacattatttatatcacatacagctataatcccctgtgactcaccccacagccacacactaacccacaaccacaattacacagccaagttatcccctgtggcagcaccacccttaggtcccctagtcctttttctagcatagacaaaagtaatgggaggcttatcaataccgccgacctgaagtttcaccttgtcctcaaggtggaagtgtggaaattgagcttggatgacagcaaaatcttcccaagtagcttcgaattcagggagatgcttccacttgattagagcttgagggctggttttatgagtactaggtcggatggcaagcaatgcttcaggttccaacaaccactcaaggtctgctgtgaggtcagaagtttgtggctgagtgttctgtttgccaacaaaataaatatctggctcaatctccggcggggttgctccaacctctacccattcttgaccaagtatgggaggatatttctatggatttcattgaaggtcttccgcagaattgttgtgttcatcacactttctttcttttactgctttatgatgccttaatagtattataataaaaaaagaactctttctggatctctaaataaagtatctaccatttttttgacttcgttcagcttgggaataaggaatgggatcagtaaaacatcattcttcactctgaatacatgttttgaaagttttatcttactcatttggtgccaatacatattcattgtaacaagtacttgttgagtttttggattttttcagggataacagtgttctagtcctgaacttggtctagctcatattgaacctgttttatatctatatttataaaatcgaacatgctggacttcagcttttcaacttaagaagtgtttgttttatcaccaggctttgcaacagcagcaacggtatgaaagggaagttgcccttactgagattgagcagagccgtaaggcgttacttgataagttgaaggaatacaagggtgacgagttggaagttataaatgaggcttctgcttttgctggtgaaactgtggatcagaacaatgatcttttgcttcctccttatccaactcgtgctccacactctctgcgcagaggaaacagctatttgccccaattctcgtccatgcaaaagtttgttcaaaatggggtagtgtctgttgaaccagaaaatggaggaaagaaaaacacgagtgattcagagcagaataagagttcaagagggcttgggttctttctgggtgcagcagccaaaactgttttcactattgtaggtgtggtatctgtgttgagtctctctggttttgggcctaaatttttttatagagacacttctttgaagatttcaagctctttccatcaaccagtgagtgaagaaaaacgatcaaacgctgattgtcccccggggagaatcctagtagtggaaaatggggaggcacgatgccttgtgaaagagagagttgaagtcccatttcttcagctgctaccaaaccagatgtaaactatgggtgtggttaagtatgtctttgcgttcattttttctttttctttcccctatgtatatcttttgttatttaatattacttgaggtcaagaatttttttaagggctaattttcatttcacaagtaccattaatttttatcacgttcctttttccaggtacggtagagagagattattgtaatctttgttaaaaaaaatagtgtaatgcttagatagatagaggaaatttctattgtttcaaaacattaaccaacaactaataacacccccggcaaaataacttataccaagctataccttaatatgcccattttaacacctctctctct

SEQ ID NO: 225572 - DNA, 5460 bp, Cannabis indica
ctagaaggtgtttgtagcttcgttaggttgctcacttccccttatctcttctatacaagtggttctaggtgacggataaggcaggtgaaagccgcgtaggtcctttggttatcctataatcatggacaaaataaaacagacttgtcatagagcgcctgcatgtgacccctatgtatctagggtggctacagggggttgagtctagattgtagaggaggctacatagcctcatgttaatgttgatgcagatgttgaccaagcagaggtgcgtgaggtcgaccaaggggttgagagccctgatattgtgtttgatcttgatgaggctaccaccagttagaagaaggagatacatgacttgtattattctctccaattccccttttggtcattacgatgctaattgtaatttgctaaataagctgatctgtcttcagtgttaggcttggaccacgtcttgacccactcttctgagcatgagaccttagatgctagattgcagggaaacatgtggatctcacttgtgtctactatctctactgacagtttttataagatactatccaacaggctagtaggtggcctccattgtaggatacatctgtgggataaattagtgcatagaatggccctcaactggacggcgtggttagagtacacatcgagcaacgatctgcgttaccttttcatccatactttcgagacatttttgattacttcgggatgtgtttgacaaaaatcacctcaaaaagtattaagtaccatccggtgatgtttattttatatagggagataggctggccttagtccactccttatgagattggatattactttgatttggagtctatttagaagcaaaaccgatctatatactttactttacccatgttggccatcgatggttaggtaatactgacatcacgcctatgtcgaatgttagtgagtatgctgagaaatacttcattgctagggatgttaaggggttacgtcatcgacgcctttagcgagtgctatttttcaagcgctctatccatgcattacagatgagatacatgacgaaccaaaccctatctattttgacatggaagataaacatactcaagttgaccagtgttgccaacttctagaagtatattttgtatcctcctactcctagagttgtgggagccccaattgcagagagagcttgtcctcgggatggagaagtctgacttgtatgatggcatttctttgtctcatatagctcaaaatctagaggggaaagagagggccctctgccaatgcttggccaatgggggttcagttagtgatgcttctctccagattaggcctcgaggctcgaattctgagggacctacttgccctttgccttcatctagaagtaagggcaaggtggttgttgaggattctgatagttcctcatctgaggatgatggtatttgatagttaatggaaccatctcttacattcttgtctatcattgaatatttatgactttgctttttgactttgctactttcattttgtagatatgtcttccaactttagaggcctcgatgggggaccttctgaagagcacttcctttcatggatgaagagctcaaggagctcagtgatggtgagcaagacagcctttactccactggtcttcgggatctatctgtgataagttgtaattttagcttcgttcacctttttggattttctgtaagcgcactatcaaaggatttaaagcatggggttggccaaccaaggttgtatccttaaggggttggctagccatagcagccttagagaggggcttaccagccaatgttatactttgatattcattttttcttgttttgctttcaggccttcatgaagctgagctcttcaagcgataacttcttgtcctgattgtgtagcttctgagctaacttagtaagtctttgagtttgctcaagtaggccacaattttttcacctcgaactgtgtactcaactaggatttaattcacaactagttgaaaattgttgaatatccagcttgtcaactcgtacttcatatgctagcttgaggccggctattaagcctacatattcagcctcattgtttgaggctttcaagcaaaattttattgctccgtgcagttgctgccccaaagtgttataaaggcaatgcctgtatcagacaattggtcagtgcaacttttgtcaacatggagtttccatgttagttctttagttttccgctattgctctgttctcacttcttttttggctcttacttttctcctgaatcttgagatatttaacgacatgagtttgtgcattcaatcaagaagtctacaagggattgaccctttatgcatattcttatttgatatgttatctcaaactggcgaagctgaatggcccacttgagtagtcggcctgatgcttcaagtttttgtcaaacctgctgcaagggttgattagggtacaccgtttatgggggtgtgccttgaagtaggaccttaactttctgtaagccaatgacaaaatataagtcagcttttccatgagtgtgtatcgactttcagctttgattagtctttttctaatgtagtgtaaaaggtgttgacaccgtcttcttctcttgtgaggacaacactaacaacatgttctgtgactgctaggtacacatctagctcttcatagtctaggggtttggacaacacaggcggttgagccaattgtttctttagctcttggaatgttttttcacattctcttatccactcgagttttttgttgcctctaattatgttgaataagggtacgcatttgtcagtagacttggacacaaatctgcttaatgcagcaatgcatcctattagtctttgcaattctttgatagttgtgggtgacttcacgtccaaaagggcttggatcttgtctgggttttttttttctattcccctagcgttaattatgattgaaaagaattttcaagagtctactccaaaagcacatttcatggggttgagcttcatgtcgtagctgtgaaggattttaaagcatttgtctaggtcctccacatgctcccagcctttttggacttgacaagcatgttatccacatacacctccatgttgctgccaatgagatcatttaacatcatgttcactagcctctgatacgtggcccctgcattttttagcccaaagggcatgactttgtagcagtttaggcctaagtttgtcatgaatctagtgtgctcctagtctggaggatgcatctttattttattgtaacatgaatacatgtccatgaaactcaagatttcatggccaggtctggcatgtaaaacttcgtcaattctcagaagcaaaaagcaataatttggacatgctttcttcaggttggtgaagtcgatgcatactctcaaatttttgttggttagggcaccagtactgggttggatagccatagttgatagaatgcctccattatgaagtcatgggcttatagcctctcgacctcatccttggcgcttgggcgcgctccttgtctaacaacctcctgttgaccatgtctccatgtgaccatgcaaaaaagtctaggtttgcccttacaaatcttatcaatattgatttaatttctagtgctaaacttctcctaatttttagtcttcttgatgggaaagtgggatcaacctctacttcttccaactcttctacaggtttgaagcttcttggaggatccctaaagtgaggatctatgtctgtgtccttgctttggcctggacttcattactttttactagggtcttctttagagttcttggtgagcatcttctctttcttagctttggacaaggccaagttgtaacattaacacgcaaactttggtctcccctcaaactttggacaaggcataggtggtagatggatgtcactgccttctgatcattaagggcaagtcggcttatcatggcattgaaggtcgatagaacattgattatgacaaattgtgccattagagttctagcggttggattttctccaactttgagtggtaatatgatatacctgacaggagcgatgcctttgcaaaagaagccatacatcacttgactgcagggtgtcaggtcgatgagatgtagccccatgtttccatatgttgatttgaaaagattgttgaaggaggctccatcatccaccatgaatcttgctattgtcatattctcgatttgtgcagtaatgaccaaggggtcgttgtgtgggaaactaacttgagaaacgtcttcttatatgaaagaaattgtaggctctataagctttggttacttagagaccttatcttgaacgaccaggatgttgcttttaggctcgtgacggagtgcccgagcatagcgctccctagctttgctagtctcacctacaatgtgccgtctgccatttgacccctaagtgtcctgccataagttgtggcattggatctccattgttatgcacaaaacaacacatgcgaggattgttatgccttatgaggtatttaatctccctcttcaaattcaaccactcattggtgtcatggcaaaagtcattatgaaatcgatagatctttgacatgcccctcttgctcaactcccttttcattggaaagggattcgtgtagaggattgctccctaaatggccgtgaagatggcggtaggtttctctgtcaggagagtgaagtaggtatccttctcctccttattcttttgtggcatggtagaagtgttaaatttctgctttttgccactgtttctcccagagctgttggttttgcattagttactagtgtttttgccactagaagtttgggtggagtttctggtgtctgcctgcgcgcttggtagggcatgagatttcaggatgtctcgtgactgccggttttggcaagccccatctaggcctgtcgtatggcttctgaaagtttgataaagccatcagctctatcatggaactcctttatgttgtgggttaagatccttcaaatgtctttctagaagtcactcagtgggagtatgcccccactatggtcgtatattggactttttctataaggcctttgacttttgtatcctcagccacgaacctctggatgtaatcctttaaaggttctcttagtcgctgcttgactttgacaagatcttctaactgggatgggacaagcctcgaggactagaattgcgtgttaaattctcgaaagaacttgaccctatagtttaatcttcattagttgagtttgaagtacaattattgagctatttttgacaaagaggctggaatatgtgacatcacacatcactagtaaccttcgagagatcgagttacatcttaaagtatttgatgtgcgctaatgggtcttctcgaccagtatacatcttccataatgggatcttgaatttgggcaaggccaaggcatttttgtatgccaagaatggtgatc

SEQ ID NO: 225573 - DNA, 2174 bp, Cannabis indica
ttttttcgggttatttcggtttgtaatttttattgattttttcggttcgatttgggcagtttataaatttttttgtacagccctaagtaaaggtaccaatttttaaatttttgtacatgtaaagtaaactacattagcaaagtaatgtaataggaatatctacaaccattttgtttgaactgaaaatacgacaacggttttcttttcaaaattcagaataagctatgcaaagcaatacaatacaatataatatgtatcttctatagttctatgctgccatggagaaaaatagtagtaactgcttatgatgtatatgcttttgcaaagtagccatactctcaggtgggatttttacttcttgtgagttcggataatttgctgaaaccttccttgattttctcaaaatgtcaaaataacagaggccagagtcaacttaaacaaaaactcttatgccttgatgttcttaattcatgcaaaaatggttcagtttgttacctgcccatgaattaaaacaaaataaaaacatatcagtagtatccttctaaattgattcaaatgcttttacagtatagacacaaaattgtaagtagcattttttctttttttttttttgtcttaaatagaaagaataaatgatatggatatgacaagcaagtaaacacaccttacatgagtcaaaaattgggcgaacttgttcaaatatttcatctacgtttcctactgcattgatctgcaagcatgtatagattagttttagtagtgagcttgagaacaatcaatgtcataaataaacttgaacacgcataagtcttaacataagaacagaaaaatcctgattaaagactaccaaacaaagattagttcttgacagtacaatatggtagtgagtaaaattcttaagcatgtatcagaaggttaggaacagcagtactgacaaaagataatctccaatctttgaatgtgtcatacaccatacatttaccttgaaaacttttcctttctctgagtagtaattgataacgggacgatttaatgcttcaaaaattttaagacgttttttcattgtttcaatgttatcatcaactctgccctgtaataaagtatcattagtacacaatgtactatacattacaacgtgagagaacagaaaattatacagtaaacaataacctgattgcgatttagcactcgtttcaccatctcttcctcaggacagtcaaagaaaagcaccaagtctggttctgctccagtctacaatgggatgggattagttagatttgaaaaacaattccaggaatctacaaaccaaatcattcacatcgaaataatatttattattatagattgaaacatttcaatgaaattaaataagaacttcaaataaatatttacgtatatacatctatattaggatatgaatttagatcttcaaaccagattcttcatttgatatctttaactttttcgttttatataatatgttttatcacatgaattggctgaacctaaaaacgatttagagacttggaattaactttggcagtaaaagttcattgttatctttatatcccttaaaactatcgaatatagaagtacaatatagccttttactccataagagaaaaataaattacagaatcaaactcacaattttttcaaaagctacacggttctcttcacttcgagggaacccgtcgataagaaattttatattgtcacttgattccatctccctctgaataatcttgacagtaacttgagagggaacaattttaccttctctgatagtatttagaatcatagtgctgaaattgaagttggatattaagattacttcaaaacaaatagagaatgttctaattacacatgatcaacaataaacaagaatgagcaatggttacccatattcagtttcagaggcaatttcccttctaagcagatctcctgcactcaaatgattgaacccataggtttcaacgatcttttcacattgtgtaccttttccactacctgggccccctcgagagcacaaaagaacgaaactcccatccataaatacgattacatgaatcatgaatatatatggttgaacctcaaatcatgactaaaacttctaaggcatataaaacgtcacccaaacgaaaagaaaaagaaatattcacagtgaaactgta

SEQ ID NO: 225574 - DNA, 3984 bp, Cannabis indica
aaagattatttagttgaagttcaaccgctttgtaacaagcaatggagttttgatcccttcctttcttccatttcttaatctcagccttacaagctttaatcctcttcccaaaattacctgtgtagtctttcccccattctaacaaaacactaccacaagcttttattttttcagtaataggaaggccgtgggacagctcccaattatcttcaacaactttaaaacaaataggttctttcaactacgaattttcgaacctaaaggtacgttcagggacatgaattggttctgaaactggaaccaaatgtaaagggaaatgatctgaagtggacacttcaaggttatatagcttagccaatggaaacttaccaatccaaccttgagaaacaagggctctgtcaagtctagcttccacccaagaatccgtccctctaccacgtttccatgtataaggatacccattcaactccatatcatacaactcacactcatccaaagtatcacaaaaaccctcaatcaaccaattcaggtaaagattacctccgtttttatcttgctgagaagttacattgttcatatccgccactatacaccacgacaagtcactttccatcttcaaagaccgaattaaatcccaagtacgcttcctcaagcttcgattaggttcaccatataacccagtcaacctccactccccatggtcacggctttggacagaaacatcaatgtaattagaaccaaaccttagtagttgaacctcctcagcatcacgccaaagtaaagccacccctccactctttccttgagcatccacactgaacgcaccttcgaacccaatagacagccgaagcttcttaatcgccttttttttggccaacgtctcacaaagaaacaacacaatgggcttcttttggataacaacatcctttatgaattggatagtccatgggttcccaagcccatggcaattccaagctattagactcataatgttgggtgggcttgggaaccaagacccacctttgataagttttttggcccaacaccaatatcctcttccttatccatcataatacactcatctgatgccacttcagcattctcacaacaatccccaccctccatacgcctcctcttagaatcaagaataattttggaaactatatccccatcatttatttggtcaacacacttcgttaaactatatcctcttaaaaaattaatttaaattataaacttattacgaaaaaaacaaaaatctttcttttcttttccatatgtattcttcttcctttttttttttatctcgagtttatttgctacttcactttaattaggcatttatgaaaatatctcttttgcaaaatcaaattagattagattattagttacgattaaattaagactcaattattagttagaggtcttatatgggctcgtatttgctatgcaaatttagattagacttgattggattattagttaggattaaattacactttattatatgaaaaaaaaaatacactttatttgttagcattggcatagtaaaaaaatctaaataaagtgtaaacactactaaaaaaatcctgaatttgtgtcagttttacattgtcgatcaaagaattcctaacagtccataaaatcgttgcctatacgaacgttgcaaatactgagtagaatcgacgatggttgaaaacagtcggggaaatagtatgggccacaattttaaactgttgcctatactataggtcacgatttaaaactgtcgcctataatgttataggcacggttttaaaccgtcacctatattaaaagttttcagtttgattataattttcgtatttttcagcgacgatttttgccaatcattgggttgcaaaaaaaaaaggaaaaaaaatctactttttcttcccgcattaattaatttttactaatttttatattgtcactactaattagttaggataaagtataaatataaattaaaaatgaacaaaaattaaaatacatacaaactacgtactgaaattgaattgttagttatatgaaagtaattggttatagtgtaaagtataaacaaaaatagaaactgatcatcataatagcccttgtcgcactacatgtctgtagtgttcagacgtatttaatccactgatcacgcaaaatatttatctcgtcatttgagtacagattgctcttactctgaataaaaaatagaaagaaattatatattaattatctttatatattaaaagtgtctatctaacgacaattagtttaacgatattgttttgtttcttccgttaactttaacggaatattcttatttaatttatattatttttttaacaaaaatttatattattttaaactattcgtttaaattgatggattgaattcttctaattaaataattaacactaaaataaataatattaataatagcagatatttaagattttaacaatataatcccgaactctctgtttgaaaaataaaactatataatgtaagatagaaatttcagtctattattctcttcttctatttttatttttgtcggtgaagtgcgattttgggcttcagatctcaatacattctctctcctctccagatcttccgccaccgttgatggcgattcagccatctccaaccagcatctcctccaatagctatgttcgccagcagtaacggtgtagcaccagcaaagcctgttcaaagaatatatatttactatgtatgattactatgtttataaatattatactgtgccaggatataaaatgtcattactaatgtgtcgataataagagtatagacaccctctttcattataaatgtgtattgaataatatgtatgtttttgtagaaagtagaagaggggcaatcttatatttgatcatgtgatgtttcaacatgattttttatgtaagttatgacaacaacagattgcagactctcttttcttattttttttttctaatcaataattttggattttaatgagctctcatttattggtttaaaatgtttttctttttagaaaatagacggagacgttaactttccttctccaaccatttcagatcacagttttctaatctcaaaccaatttgtccctaagtgaatagaatttctcttttttctattcttaatatttccattttaagaaaaaaaatatttattttcaggtaaaaaaaaaagtaattcttaaaataaacaaattcctcttatgatgaaatctataaactttataatgggataatttttaatgtgatcaaagagcatataatttcaattaattacatatatttggtcaatctatcaatacagacggtttgtggataatcttcattactgtaaatttactatcgtaagttaaagatttttatttcactcataaaaacaaattaaaattatgtccatataatttatttaaatttttaaatttggaatcttttattttaaaataatgaaaaataataaatagttaaacctactgaatattaaatgtttttaatttatattcagtttccttctaaataatattatttatttaattaaattatgtacaatactttcaatatctattataacaaataaaaattgtaatacattaagtgtacgtacattacacgtaacttcaacctaatatatatatatgtagctataaatttttagtgcttcttatatttttttttctaaagctttgccaacacataagcataatcattgtccatgcaatttttgagctattaggacatcaacactatgacctaacatagactgaaagcaaccaaataaagaatataaacaagaaactaaaaacagtacactagctaagaaaacattgaaaaagtaaacaaaaactcttttaaaagggtcattactaagaacacttttcaaaagacaacactcaaatactaaaccaaacataattgaaaaaccgtgtttttagcaaatgtcagttgtatataagaa

SEQ ID NO: 225575 - DNA, 2010 bp, Cannabis indica
atggaaatgagatacatatgttgatgctaaaaagtcttctgtcattaatgagataagtatacaactattttatgttgaccttacataaatgccaaaatgaaaaaaaaattaatgtgcaagctgttgatctaaacagtgttttgttggatttttcttccttcttataaaattgactatgttttatcttatctatctattatctccctattccaactcaataactatacttcgttagcaaataataaaaaacattatatactttaaagtgagctggcttgattggtatatgattgtgtataaagcaaaactgttctctttccttatcaagtatcacaaataaaatcaaaatcaactaaatctaaatctaactagcatttacaattttagtcaaaaatggcaaaactatgctacaattttaggagtttggaattgtgggttttaatttaaatgtattattttagattttgagaaaaaaaaaaaagagttggtattaatatttttgcagttgagggcacctgataactccaactagaatataataatagcaaaataatacagtagtaatcataataataatcttacttattaacccaattgaatggtcattatgactgaggaaattttttaaaaaagtacaaaaacactgcacgttgcatcttaatcaagaccgtcagatgagtgcctttttcttacagtgtacggacggtgatgaccatgagcaagagaaatttacacgtacacccctaaaaaagggctcgtgtaaataataaatttcgttgctcaaaatggcaaaacttaaaaataatattagacaaaaagggggacctacaacagtaagtacgaaattacccttatttgttcgatttgataaacaaaagtacagggacaaaatagtcaatttattaagaaagacatactattatggggtttcttacactgactcagcatggactccatggatggacctgtcctttttaatgtcgaaaagctgagattatacctgaactgatccaacggctcagatttacagcttgtaaagggaacatcttgaccgttgaatctttgccgaaggcgtctttatcgatggtaaccattggagcttgtctctactcgtacttcgcttctgagaaggaaaaacaattattatttttttaaaaaaaaacatcaaaaagtgttttaaaaataataataacagtaattaatatagaaataacgctcagaaacttaggtcttgatcagttgattaattaatttttattttcttggttttgaatagttaatagtgagctgagttggcctgcacgtagggttaattgttttattagtgagaaatcgtgattaataattaaataaaaattgtttaaattaataaatcatttttaagtttaaatttaaattaattatattatcaagcccacgcacggttctccgggaatctctcttcccctcgagtggaatagcttggactttgctgtatttataagaagacatataaataaatatttttgggaaaaatataaaatctggggaacctataataaaattaaattaagcaaagaaaattcaatttaataaaaaggaaaaaagaaaaacgtaatctttgccttgtttgatgctaatgcaatataatttaattatatttttcttttttactaggggaattaatattttgtttcattgttaagtaaagaaagaacaaaacaaaattaatgaaataaataaataaatcaaatcaaatggtttttcttagttttttctctttttttttcttcaatttttttttaggtaaattcttgcctagtagaaagtgtacttcatcacttccaatgtcagtcaattataatatattttaaaaaactatattttatttttaaataaaataaaatttaatccgtgacaattgagcgaaatgcaaggcggcacaaagggttttactcatgactgtgaatttttccccatttttctctataaataatcatatgtgaagttttgaattattattattatttt

SEQ ID NO: 225576 - DNA, 3283 bp, Cannabis indica
ccaatctaaagagagttgagagagcgacggaagcccgaactcccaaaaactcgaaagctatcgcagggagttgaagactcaaagatcaatggactggaggtacatcgatccttcattgcatatattattgatatgatttcattatattttccgcattttcatatcattgtatatgctatattatatacactatatatatagtctaacaaaccatccatataccattaactccattttcatgtcccttaagttatggtgtacatcattgttattcactggatttgcgtattgctggggattaaaagagtattcaataccacattgactgaccaagattttcaaagtatgtctgaaaactacttacaccaataccaaaggcctaaaaaaaaaaaaaaaaaaaccaagttacaagtgcctaacacaatgagaaatgctaaagggaaccaatggtgcttagcacctttatgaggtgtaatatcgctattggtacaatacaatatgctctaatacaatgcaatcaaaattttatggttttataatttgtctaattcatctaattatttatggtatcacatatagtccagttattaagttcattctgatatatgtttaattagatatcttaattttgaacaaaaatgcagactttattgaatgaaagttatctgccatcaaaagggcaagaaaatcagtgaaacatcccttcccctaaaaatatgatcagcactagaacaaacactacgaaccaaaaaattggtcaccttattcgcagattgcttaacaaaattagttgcttacattatctaaatcgtgcaatacccatttacagtcagaacaagcaaaccaaaacggcgagctgatcatatcagtaggactatgaacatagcatgcaccaacaccttacaatccaatctccatccccaccttgtaggtgtatcgctgttgtttgtagccaactaacgtgcttctcttactctcattgcttcataacaagcagcagcactctacatcagtatgagtcttcgaagtagcatgatcagagtttgtctatgttcccttgcaagcaagccaaccaaaaccgaaaaatcccaatccctgcgaaaacatatgcatctgcattgaccttaatcttattgacatcataaacagacttcgtctgagcaactctataatctgccaaatagaccaacacaccatagcaactcaaccaactctctccatagactcccactgaacaatagctcctcaaaccaactatgaaggggtgtttgttatgggggtttagattcttggaaatgtgaaaaggaatataaatccacacctatgtctagtatgatttttgtggagggttcatgtttgtgtgagtcccatctttgagtttatttttcgggtaatcttaaactcttctctatatcctctcaacttaaagccacgtacaactcttaccccaaacaccaggagcaaaaatattaacatgaaacacaagacaatccctcaaaacattaacatgtttgagctgaatactaaattaacttgtcatacagatttcattgtttctcttgatatttatataaatttatcaatgatatatgaaatacctactagaagaagtttaaaatgtaaattttcttcagaattttaatacttctctgtatctcaaagaaatcaaacataattgaattgttgctgtttttctctttcactatgccaaaatgacattttttggattatggttttcaatacaaacaaagtccatttggcccatgtggtagagtagagatagagactattaccattaatgtatatatctccttctgtgaatgtaatagccaatcaattcttcacctgtgaagctaaaaaagacatatacagaatatagagacaaatccactacactacaaaaattttagactatctcggcggttccgtgtgtaaccgccgagattggcccattttaaaaaataaaaacacccaaaacacgcccagtctgcctattctctctctctttctctttctctttccctcttcttctttattgttttccttctccgccgcccacccatctttccctcttcttttccttctgcccactcagccctctctctttccttctttccttcttttccacgcgcacgccatgggagcttggtaatgttttcttcatctttcccttttacttaattttttttttcttgtgttggtttgaaattgttatggtaaagtttttttttggtttgaaattgttataggttttgttttgttttttttttaagaaaattaaattcttataaactaacaacaagagtttgatacatgatatcctcaatctataacgattacgatatttttcatattgtataggtgcacttgataatcagcaagattcatttttgaaaaggaaatttaaatctgtttgatggtacaatgacttatttattttatttaataatattatggaaatgttagagaagtttgaatactttagatatttatctatagcgaagtaggttctgagattaaatatgtactgcggtcggatggttggaataatatgcatgttacaagagtttgaatatcttaaatattcatttatagtgaagtaggtcatgcgattaactgcggtcggatggatgatgattttgtatttatcatgcattattttttgttgttaattgatagatgattttggtaaatgttgtataaatagaggaaactctgccaaattttttaaaaatttatgtgtttttaaatacttagtacttaaattgaaaaattagtttgaaaacttgatagattgatcgtttagcttacttataatatgatttaattattttaggtggctttagttagaaatggataagcaatggatgaaacgaaatagattgtctaaggaatatgaagaaggtgttgagtatttcattaaatttgccataaaacatggcaacgaccctaatatgataccttgcccatgtctgaagtgtggaaattttaaaaaattgagtgatgtagaagtaagagaacacctttacagaaatggtatagatcactcatacaaaaattggatttggcatggtgagcgggtgtcccaaccaacttctctaaaaagaactcgaagagagcatgtattgaacaaggattgtgacaatgacatgattagcaatgtagaagaaaattttgcgaaatgctcaaaggacattcttaccgaagcattaggtaaacctgagcaccctggttgtgttcatggtaaaggaatatctgtgtgtcaaagagaggtgttcaaaaa

SEQ ID NO: 225577 - DNA, 2515 bp, Cannabis indica
tacagtatagaaaaaaagatagactactaaaacaaaaattatgaactgaaggattagattgctaaaagcaatttgtagggactaaattataagagagaaatgatttattttgtattaaaattgttgtggttataagaacagtagttggacgttcttgaatgttggcttgtgctggctgttgttattctactatgatgtgggccattgaaattgaaacctagaattttttatacccaaatattcccttgtctttcttaaagttgttattatagcaagaagttgaagaaaaaaagaaggttcacatgacgattactacacagggattttgtattttgttcctcaaaacatagtccaacaatgttgtttgattacaagatttttagtgtattaatatatgaagaaatcagttacaagttgatgcagatttactactggatattaggtgtggtttagttataatcaaatagagtatgcttaatgcattttattagataatattaccgaaagtgattagccaacagaggttgttaggttatgaattagattacgatcatcgaactaatcatttgtatttaaaatagggtgattcactttggttagtttttgtttttttagaaaaggaaattaatggtatattaatataatgaaaagaacattattagtgtagtagaagaacatgtatatgttctttagtaaaaggacaagttataaaagacaaaaattacatcatatgtttattggtcaagatcaatgctaacaataactaagatttacttaaggcagaagatatcattagtttgataggaaaatgtcatgaaaatttaagaaaaaaagtaaataaataacaagtagacaagaaggaatatatgtaatcccttaatttagacacatgaacaaaactaactcgtatatatttataattaagtaacatggatctcacaagcatgatctggtattatacaattcctaaaattgaaactttgattcatgaattgttaaatctattaatcagaatagtgaaatttgtaataaagtaaacgtgtaaaattaagaacgatgtcgtaaaattcatcaaatgctgtataaatagggccaaaattctaaaagcatattgatggtataggtctaattttcaaattcagtaataataatagggctatttgagaaactacaataatatatgtaatggagggccataatgtcagatactttacaattggacaggccatcatattatattcattgggccccatgactgacccactcataatcaccgccgttgattactattttctcaacaaccgatatattattatttctcattttatttctcttcaatttttaaatcttatgttggtcttatttctttttctcttcacatattaaaatcagaaaatcaattttcatagtttcttttatcatctaatctttgtactaacaacacgtttgaaggtttctgaagtaacatcatttgagccaaaactgatggcaagtgaaaataagtattatatatctataattttgtgcttgacctttggagtaactcactgcacaattgactcgtttattaaaataaatatatagatatatatattctttctttctgcatggtattaatttaattgcatatatttcatttttacaaatgaatgcaacttgtaaaatgtaggtccatacctatttgtttttaaggaagaaaaaatttaattaataaaaaaggacttttatagaatttttttatcctggcttatttgtaattcatagttttggaactcttcgaaggtttttcttgtcaattaagtcataattttgggagagaaaaaataataataaaataagtcacactaattgtattatttaatttctcccaatcattgagggtagtagcaaaaaaagaaaggataaggtgaaagttaagagttgaaacctcagataaaaagtaaagttcaagataaagcaaattagtatagtagagtataggttcatgatattttaatttaaaataaaagtatataagataagtatcaaatttaacaaactatttgaggtgtgttagacactaaatgatgaatatctctaaattatacatctattttctcatccccactacttaaaatttgacatcatttatgtatggaagtgtgtatttaaataaagatttatgtgtatgaatttaagtaaatatgtgatatgtcaaactataattaatggtgaaacatagaagaaaaatttttcaaaaaaaaaaaaagaaacatagaagaaaaatgtatttttattcctaaatgatgcccatagttcataaacaatattttacatgctctaataactaatgtcattctgagagagaagatatatgatacccccaaaccaataactagctaggtgtaagccaaagtttttttttttttcagtaacaagttaagccaaagttcatctttccaaaattccagcctttctactagaaataaaaatacccacaaccattcatttgaaaaaatgagatggatagatatat

SEQ ID NO: 225578 - DNA, 3638 bp, Cannabis indica
tgttaatttttagtagttaatgaacatatatgtcaagattatgatgctttattccgctgactgaacatcaggctagtgaacgattgcatgacaaaatgaccaacttcgtatccaagaacaaagctgctcaaatccaacaaagaggaaggttggttcaagtaatgctggtcaaattgtcattgccatttgtgttcagcattgttctttcgtttatgctttgctcagtatgaaacattttttttatttcacgtatttcatttctataattatcttttaagctaataaactgtttgcattaattttgtgcagagacagtagtgagatatctacgcgggaacttacaaaaagatggttcaagcattaccacaatacactgaacaagttgaaaagatttctcttcacgttgaggtttgtttcctttttaccctaagcttttacaaaaatgctaagggaagctgggaaatgggttgtgatctgcaagaatgtggcagcatatgaacttgatataagtataagcagacccaatcaaggaatatacttttacttgtagtgactatgaaatgaatgaatagaatgattaatgttcctgctgatttattctcttcccattcagattgctggaaaaattaacaaaattattagagacatggggctgcgagaacttgggcaactggagcaggaccttgtttttggagatgctggagcgaaggatgtcatcaattttctgaggacaaagcaggtgtcgtataggaatctgtgatttatgtaagctactcggtgaatcttttctagaataaacacatcattatttcatgcagaacacgtccccagaaaacaaattgcgattgttgatgatttatgcatcagtttacccggacaaatttgaaggtgacaaagcctctaagctaatgcaggtgggcacagctaacctatcattctatacaaacttgacacaatcttattattagctattaagactaatctacacttatgtcaacctaagattgaaactgatcatttttttttacatgtacgtatttatcttaattgttctgctatcacgatttgcttaaattactattaaccgtttcctttgcctaatcagctagccaaattatcacacgaggacatgaatgttgtaaagaatatgaaattgcttggaggatcttcaaccaaaaagatatcgactggtggcttctcactgaagttcgacggccagaaggtgagtacatgaacagttttaatagctcaaagaagcatgtgactaagccttgacagttcaacgtgattcttgctatcaatatcagaaaaaccaagcagcaagaaaagatcgcagtggagaggaagaaacatggcagctatttcgattttatcccatgttagaggtatataataattgcaaacaatatatttttattgtaaatctttttcattttaaacagtcttaccctggatactttactaaatctgcatctgcaggagctcattgaaaatatttgcaaaagggaattgccaaagagtgagtattcatgtatgaatgaacctagtgcgactactgttgaccaaggcagcaagaaagttacacagagttcatcagcacagacaactcaatccactgctcctcattcaatgagatcaaggcgaacggccaattgggcaaaagcaggtctttctgatgatggaaactcaaggtgatccaacagctccatttgttgatattatccaatttatcgcaccattctttttttttcacatagataattgaaatctattatgtcatctttaagatcactagtttatattgctgccttttgtagtgactcaactttgaagaatgcgtctactgattttaagaagttaggacaacgtatattcatatttatcgttggcggggcaactcgatctgaggtttgatgtggatcaatttccctaaatattctccatatctctgcttttgtagttcataatttacactcttgggattttttcttctacttaatcttatgatattatctatcagctacgagtctgtcacaagctcacagccaagttgagaagagaagtaatcctgggctcttctagtatttatgatcctccccagtatataacagtaagaatatgagttcatcatttttacattggcaaaattgggttcaattgcttgtaaaacctactgattgattactcttctgtatgtcccagaaattgaagctgctgtcagaaacagatatatcgcttgatggcctcaaattttaaaatcctttctgatgccataaacaccaataaatatgtacttttagtaatctaacggacaactatatactaccacaacagaacaagaaatgcagtcgaggaatgtgaacaataacaaagcaaaaaatttagtttataattaggagttaaacgttttttttttttgtctcttttccatatatttttttaacatcatactaccatcattcttgatctctattcagatcagaaaaggaacaagatttccgccactgcctttactgtctggaggctcataacttagtatgactgaggattattggttaccagctagttaaactatcaacttggtgatacaaataggctggtttacttggaatgagctgtaggtaccagaaaggcatgataataaattatgcattttttctttttttttttttttttttttttattagagagctttgagattcttaaagggaagtcagggcattgtatcgtaaatgaagatagtgaataagctcattatcttcttgtgttatatctgattatgaattttcagatgtatttgtaccgaaccaaattttgtatgatttctcagcttggatgtggtttttggattagaactcgttccagttcaaataaaatacatttttggtacttaatttccattatgatacatttaaaagtaattatgtaattacactattttaaaatataatgggtgtttgaatattagatggtaattgcttaaattattaatgtcttgtttggcaaaatatttagcaattatataggaaaataacaatttttagtacataatatttaaaatagaaagtttttaataattacagtgtaattacaagttatgagaagttgaaagtgaaattaaagtctcttaattatcttcaattatatagttaccgtgtaattatgtggttaaataaatctattaaattgtgtaattatctttcattatactcaattttcaattctctcttgactgcgtccttaagtagggttgggtaattcaatatctcaaaatttaattccattactaattggatttgattttttttaattgaatatttaattacacattcaatttttaatattaacttaatataaagaagaaaaaaataggtaaaaattaaatatcacaatttatttgttctattttattatttagcaatggtgatataaaaaaaaactcactaaaaatatatatagattaatactgttattatatataaataatttttaaatatatagaaatgtaattggattggactgatttttagtagatttttgagattaacatctaatagcctgattcattccaattagaatctaacttttaacatctaatcaaatccaattagaaaactaatttttttgtaattagatta

SEQ ID NO: 225579 - DNA, 2478 bp, Cannabis indica
tttttttcctttttttttttcacaattttcctttaattttattgtgctgtttatttgtattattatttatcgggtaaatagttgcattaagtacccaaagttttgagtttttaagcggcataaacctaaatgatttttttagtggcataagttcccaaattcaaacgttgctatcttaagcatgacacatgttagacccaaattctaaatcattgggtctagacagaaacatgtagtataagaaacttccaaattttcttttaataaattcaaaacagagcctatattgacgaaattgaacgaaaattacagttttactaatattgggtatttatgctgcaaaaaaaaatattgagtttatgctggttacaaacacaaaactttgagtatttatgccacaattatcccttattaatatggagctacttttctatagtttcttttttatatttttttaagtattgtgtaagctttctcagccttctttattattaaactttctaaaataggataagttgttcatattttaatatgacaattattagataaaattattttaagttactatgtaacaagaaaaattatgaatataaatagttatattcatagtttttattttttatttttaaagagaaagggccactagtcttagaccaatcccccctcgagtttattaaaaagccttattcgtggcggaggaaaactatggtaacaaagaaactaaagcgtcattgaaacaaatcaaaaaaaaaaagaaaacaaaaacaaaaaccagaacttcaaatacgctacaatggattatattcatagaatttgtttaactttgattgaagtctatcaaaaaaagaattagtttaactttttttttctgaattatacatatatttaaataaaatatttttctgaaaactaaaaagtatacaaaaatcatgtttactattttattaaaattaattattacaaaagcagaccaaagggactatattgttttggtataacaaattgaataatttaatattattgaaacaattgaagtattatagcggataattatactgaaagaatatatataaagatattgtatatgtgtgcaagatataccctttttgctatcaagtgaatatggaattgactttgtttttcttaatcttttatcaactatatttgtacaacgaaaaaaaaaagaaaaaaaacaacgggtgagacataggcacatctctacaactagtatacatatattatgaacctcctccttctcctttttatacatatatataaatattatatgtatttaaataatgatttccttaacccatcctgttgctgcttttatgaagacctgaaaggacaattatgaatctgccataatttctggtttcccattttttcaggatgcttctattgatccatctgaggttttcaacagaattgtctcatctgtttgtattttattgaccaaagatgaggtaggtatcttgttaaacaaatcagaaaaataattaaaacagatcaatattttatattttgttaatggcttgcagcttgtagctaccctgaatggttgtactgcagctatctgtgataaaagtaagcaatctgccgaagggaccattcaggcagttgttgaatttgttactaagagagggaatgagctaactgaaattgatgtctcaaggtttgcctttcaatggaattgtgaataactaaaagtattttgaaaaatggaagatgaattgtttttctttttgttagctgtctattacttgtctagttagcttaattctggtttcctacttgtatagttttctataatagattccttgctgtgtatatttatttgtaaaacttttcaatgaaaattacaattgatttttcaccagacataacataatattagagcatttagcttataaaattcgaattttgctacaaaattaggtttgttcgtttggggtcttatgtaaacacattttaggctttacttcggaaaccctatttttgttggttttccattctcaccacccacaacaagagagtcccaaccgcctatctacgtgccgccaaagtccagtggtctaactccttgcgtgtgggccccaccacatgctccaccgcttgtgcaggcccccgtcatttcctttgagtttcattcttgcaaacgtactccctaggcggtatacttaacgtgttagctacaacattgcaggtatcgatacacattgcctagcccaccaacgaccgtttttgttttgtttcccctccgtcgtgattctggttgatttgaccacttagttttcgtacttgcgactgcctgtatttgccaaggtttgggctttcgactgattttgcctttgcctcttcactggtataccttgttggattttggttgtcacaatttgtttgctgccttgtcgagtttgttgtttccatacttcgttgtatttgtggcaaggacatagcaatgtttaaaattgcgtt

SEQ ID NO: 225580 - DNA, 1960 bp, Cannabis indica
aaaaaaaaaaaaattgggaaactcttttaatttttttattcttttgagtaaattttgggaaactactctatttaaatttaaaatataatatttgagtcggtaattaaaaatagaaacaatcacctatatatatataaacccattggtaatttttatttgtccaaaaacaaactcacacaagtatagcttttggctgaattgatagattgttagtaaacatgaataataacaacgacgtggtcattcataaaattagtagctatagtaactcaataacagttgagaagattatcaatctaaataaccctaacaacattaacaattaccacaaccaagaagaggagcccattatacaattccaattcaagatcacctaccacacaaaactcactactggctacggccacgtgtcaaacattgatgacaactacaccatcgacggtaccatagtcgatgttcggtatagcccaacatcagaagccatcttctcacgaccgttaggtattgaggaaatccattgtttcgaggcaacctacaataccctttcacccgtattgttaagggttggagttagagaccacagtgccaaaagggacgtgtcacaaaatattaccaagttttgtgagaggtttatcatcaacaacaacaacaattcaagattgattgtttgtgtacttgtggagatggagagagagatagagcaatgggagtgtgtttcgtgtagtatggaattagcaaatattggtgctaatcatgatgaggatgaatcttattggatggctgatagtatggggattgtggatttgcatcttgaagcttataaagttggagaggatgatgagaaattaggagagagttgctcagtgtgtttggaagaatttgaagtgggaacaaaaggtgcaaggatgccaaattgtttacatttgtttcatgtgaattgtattggtaactggcttcgaaggaatcaatcttgtcctatttgtcgatctcaattatatcctacttttcctctctagaaaatatagaagtaagtaatttttttgttattttgtatgtaattttaaagaagttattttaaatattaattatttcgtgtaatcattaattaataattgtaacacaaatttattcatcaaaataattcatatatttattaatagaacaacattcatatacgtattgttgattctagggtttctctctcttgcgcgaaatcttgcgtcgtcgtaagtttttactctttgtttgggttggttggggtctgatcgggaaggtttgctgcttattgagtgacaggtctagtttgttggttaatagtacgaccctgtttgatcttgagttagttttggctttggatgcacaggaagttcctagattggtcgtacaattttttaaactattttattgtttatcgatatttattatcagaaattttgaatatggtttatcatatttttcttttttattctagtttgaataaatgggtaatcctaaccaatttttatttattcaggatgaaaatctagtattctttgtgttactttaatgcttcacagctggcggcttatgaattatttagttaagtcgtgttgttaagatttttatcctttttaatgtgaatgacttagtttgtctgtttttattgattttagagcaatattatatggattatatttggtttatctattaatagaattttcatttatctttaaaaaaagttatttcatgtaatcgaagtaaattttgatatataaaaattaattgttttaatcaaactaagaatatcgatttttttgagaaatatttttaagatcttttaactttatattgatggtgggttagcatctcccatggtcatctattttttttttccattaaaatagcaaaaaaaatatttttattgtctttactctaataatattcccttctttaattagtaattatattttataatttaaat

SEQ ID NO: 225581 - DNA, 1978 bp, Cannabis indica
aatctaaaaggttaatttattcttttatatcttatcatacactttatatatgaatttaaaataaaaaaaattctctacaaacagacccctctatatcgaccaaataatacctttgtttaattagttttttattctttaaattaaaaaataaaaatatttttaaatttatatcctataaaattatttcactttttaattttttaattgagaattaaaaattttaaaaacaaaaaaaaagttacttttaaatttttttaaaacaatatttttttctttatcaacattttgactcccaacccaacttagactttggaatccggaccaacactcgaacttggacccagaccccaaaccgaaatcccgatccagaccccaaactcgaatcttttcctgaaccctgcacccaaactcagatccgaacctcggaccccagattggcctggatcccgactcggacccaaaccctaaccccaaactggtctggatcctgactcaaatccagaccctaactcggacctcgatctagaccctatactagccgggacccaaaccctagtccttggaccccagaccccgaacctcgaatcttgaaccccaaacccctgactcggacccgaaccccgacctcgaaaccactacagaaactaacagaacaacttaaatcacaaccgaaattcgtatagcaactcatatagaagccaccggagcaacccaaaccgtaaatttagaaaaaaaaaaagttaaaaaaataatatatggggtaatctccctaaaaaatttaattattttttatttataaattttgtctttttattttatatacaaattatgcatataatttgtctttttatttttaaataatcaaaataaaataagccaatgaagaaatgtattctttgtaaaatggggagaagtaccttttttcttctttcttaagcttccataggttctcatattccataatttagtaaataaataaatgggaatcaataatatcatacaattaattttcatcttcctatatgtgtttatatttaaatatttaatttttgttgttcaaatataaaatattttaattttatatttattattttaattgtaatttctagttttgtttaaaacaaccgtggagatcagtggcttgcctagttactttacatgtaatttgtagtaatcttattgtaagttcattataggaatataaagttaaaaggatataatttcgttaaattttaaagtatatttaaaatttagtagataaatttacacggttttaaaaaatcctttttagagaatttcttccaccctttccataaataataataataataatgccccttgaacttttaaggttgttaaaaatgcccctgaactattgagattgttagatttaaggactttttcttttccaattttagtaaaaaagtctaatatggatgaaagtttaggagcataatttagtacatgttaaagttcgagggacatgatttggtagatatcaaagtctggggagcatgctttagtacataaacaatcactgaaatagtaaaattgaatgaaattagacaaaagtccttaaatccaacaatctcaatagttcaggggtatttttaacgactttaaaagttcagggacatgatttggtacatgtcaaagttcaagggacaaaaattctaattagccaaataataataataataataataataataataataataatatcttccacgagtaattaataacatatgagttgatcctagtttatgatcgagggtgatcagttgaatttgacttttgaccaacgatagaaataaactagaaaataatagtagtattattagaagtagtaatgaatttcacgggcaagatcaagagcatatatatccctaccttaaattttttaaaaaaaaaactaaataacttcactagctaggaaaactccaagttggaagtagctagcaaaagaatgtgttac

SEQ ID NO: 225582 - DNA, 2672 bp, Cannabis indica
tcgtcgctatatttccatctccatgcatatgcaggccccactgaagttcaatggcatgctaaagcaaggataaatgctggtgcaaatttttacattgtgggtcgggatcctgcaggtatgggtcacccaacagagaacagggatttatatgatcctgatcatgggaaaaaggttctaagtatggctcctggacttgagaagctaaatatattgccattcagagtaagtgaagccatactctccttgtaggcttttactttatagcttcttaaattgggaaagaacttgtaacactgctccaaagaaataattctagcaatgagctgatcacatttaaagtctctgggggggtcatagcagttgcttatattagataaactgtcatataacagttatgatgcccattttttatttgaatcatttttcttgcatcataaaatgcaggttgccgcatatgacactgtacataagaagatggcgtttttcgatccttcacgtgctaaagaatttctatttatctcgggaaccaaggtagaaaatgccaaccatttattagtagagtagtagcttgtaaaacgtaataaaacctcaataaccatccaaaaacttcatcttttgtgtctgtcactgctaagctttctaatccagcttatatcttgtactttcagatgcggaattttgccaagactggggagaacccaccagacggtttcatgtgccctggaggatggaaggttctcgtcaactattacgagagcttgcaaacagaagagggatcacagcaggcagctgttttatctgcttagatattgagagtattggaatttcagttctaataaaataggagagtctaaagcggttaattgaagcaatgaataattaaaggttttgcacaaagccatgttgtaactgagcaagtacaaggatgttgtaacttaaattagttctctgttaggcttttcatatataatgaaaccaggttttgtttggccaatgttgtaaagaaaaaatgtattgaatattttttggttcattatcttagaatattcaatttaattaatgtatgcaatgaaaatgaagctgtgtgttgataaaacttaaaaattgcccagttcttttcagatcatgttggttatagcagcaaccgaacacttccttctctttcacataacttatactgcagtgtttgcaactcctaactgtataatttcatgtcaagaagctctctacatgatggaaagatagaaatattttggattcaaaaagaaaaggagttcatgctagtgagttattacatacctgcaaatttagagatgtggtaacaacggtaaagagttaatgtcatataactataagttgatgggtgagaaagctactaaggctagtttagtggtgagaaagggatggaaaaagggagagatcatggttcgaacccaagacctttaagttacaaggtattaattgattgtaaaataccattacgctacactcaaaaaaaaattgacgggtgagaggcaaagcaggagcccggagcatgtgccagtgagggaatgatggaacaagcaaaatggggctatataaatattttccaaataatagatattaaagaattcttaatgtcattgttgttaaatttggtttagagaaatatatattggttacttggttactctgtatagtaaccttatttattgggtatctagttacggtatttattggatacctatagaatgggtacaaaataatagatattctagataattatcttggttacctagttaccttatatattgtgtagcgttcgtcatacctagtatgatttagtaccttgtttagggtcccggtagagaaaatcatatgattacatgcaaattatactatgattaatttagataatagggtgttttagtaattttaccctattaggatataaatgttaattttatgtatatttcgtctcataggctaactttttttttgacaaagtgattaaatcacttatgaatttacgatgtagacgtccaccaccggcgctggaacttcctcgaactagaatagcttatcgtctaaccacagagcatgctttgccaagtcatggtccgctaaattctcagagcaagccacatgggacaaaactacctccaaaaatttagacaataaagctataacatcttcaaacaacgctcctaactcgttgaaatacatcttcatgttttttatggccatcaccaaagctaagaaatttgaataaactggatgaattgaaagaccacacatacgagcccaattgagtccaactaacaggactaaagtttcagcctgtaacactaaaaattcacctgaaaaaacatcagaaaatcagaaaaaatttataattagaaaattatcaagctaatcaaaatcaatcaaacacaaaaactaaacgactagatcccttataaaattactagaactagccaaagggaataccctttggctagtagcaactaaactctttcattttacttcataatcatcttaggatcactatcacttactaagaccctaagacctaaaaaaatatttgatatgtaatctagtaacaacaaatatgccctccaatgctcccataacctaggatatcaaaaaaatttctttggaaataaacaaaataatgaaataagcaacgaata

SEQ ID NO: 225583 - DNA, 2069 bp, Cannabis indica
ttgtaaaattttccaaaaaataattcttaattttataaatataaaaatacaaatatataaagattaattaaaattaaaaaaaaaaaaagaatatgcaatgtctactacagtgcatggtagacaaaatttcaaaatgctgcagaaatggagcctcgtgggaccctccattcacgccatatatgatatttgacatcacctcggtgttgctctaagtcttgtaaaaaatcaaaaacatttccttttccaacatatttttatatttgatggcatcttcagggcaataccactcatgatcatataataaatccaattcttaccataaattacatagaatattatggtattctataacagtaagattgccttgtttttgatcacgaaggtgagactttatctcaaaaatttgggctgaatttccaaggtctgagtttcactgctgtccataattcgacagcagaaggtaggaagagataagtctgaccaatatcattttccattgagttgatcagccaggccataaccattgagttttctgactcccattgctgataggttggatctgattgagctggagatgtagtttttctagcgagatagcctaactttcctttaccacgaaggtagagagtgtcacagattgtgaccattgaaggaaatttctgccattaagtttatgggaggtgatttgaagagaagaaagatcagaacttaatggtgcaatgcaagagctgctagttgagtgaaggtggcttgtgatgaaacttttgagcctccttcagttgtttcaaaagaagtttttgccatttttttagatgatagattggcccaaattacactttgatgtcatgaaatcagtataaaagaaggaaatatatttatttactgaattgaataatacaaaactgaagagttccttaaataactatacaataagctactatagtttaacgttaacatctcttaaacttagggttgttacaactaagccactattctaggcatacctaatctcatggagatattattaataaacaactaacaataataataaaaataaaactaatacatttgtgacaattaacacaatgtttttcatccgattttgtttttgttaaacaattcgagaataagaaagggattggttggttcgtttttctgattttaattttgatagtgtttctaataggggagatgtggtaatggagttttaagctattattttagccgattggttacaataaaattgcacaatttctttaaaaaaagaaaagaaaagaaaaaaaagtgaaaaaaaaataaaaacaaaaaaaaaataaaaaaaaagaaaaaaaagtgaaaaaaaaataaaaacaaaataaaaattagaaaaagagacgcacggttcaatgaataaatatagatagctatattcaatagagaaatgctaaagggcaccactggtgcctagcaccctcctacgtgtcaatatcgctattggtgcaattaagtatggggtcccatatagtttaatataataatttttatagagtatcgctagccaattgcaagtcgacacatttagaatgtgctaggcaccactggtgcccaatagcaatgctctattcaatatgatgcacttttctcaagtggcaaccttttggaccatctgccaataaagtgtgtgaattgatagctcaacttttcgttttcttgattaattgatcacaagattaataaagcaaatgattatttcttgattaattgatcacaagattaataaagcaaatgattaataagggtgtatttaaaagtaacagtttgattactaaggtgataaattatacagtctaataattatattatattttaaatataatgtgagtttggatataaaatggttttatatatgaatttataatatattgttttacaaaacagataataattatacatcaaaataatattttttagtaattaatatttaaaataaaaagtttatagtaattatactcaattttcatctttatttttatgggatcatgagaattgaaaagtgttaattttttttttttttttttttgaataagtgt

SEQ ID NO: 225584 - DNA, 3120 bp, Cannabis indica
aaaaaaatatcatataaataaagaatatccctaactaaatcaaaccgtatgcatcaaaatagaactctaaaacaacttttcaaaaataaatacatatataaaagtgaatcagtacaacaattataagagtctcttcctcaactcctaaatctcaatcccaatcccttgaatcttttactatcatgacaccaatgttggtggatggttgtgataatgacagaatttcgaaacttcctgatgcatgatccatcacattctctcgtttctaccaactaaagatgtggttcgtacatgcattctttcaaagcgctggaaacccatctggtattcggaccccacactctatttttcaatttatgataataatcatactaattatgatcatgattatattgaaaacttttacaattttctcaataattgtttagaacaacgcaaagctatgtatcataatactgatgatgtttcggccataactagttttaagctttacatatattgggattatcaaaaaagtaaggctaccattatagataaatggctagactttgctattgataataatgttaaggtaataagtcttatgataggccctgaggaaattggtaacatgtttaagttcgattattgcttacctaaaataatagacaaggcaagatatttgactattttggagttggatggagtagagttggatactaattcttgttcatttagttttccatttttaaaaactttgtcattgaatgatggttggaattcagagaatgcaaaggaggatggggtagttaaatttttgttgaattgcccatctattgagaaattggagttaagagattatagtttcttaggtaataatcataatgtttgcttggagagtttgagcctcaaattcttgggacttgtatttgaaaatgaggaacataatcatttacaaattcaagttgacgccataaaccttgaatctttggtactagaaaatgttttattggacaaaatttactttaggaacaatgacatgttgtcatttgatgctctcatttcaaatattcctccaattgagaatttgactctaagaagttgcaatacaaagaagaagcaccttcaaatctcgagtcaacacttgaagtttttccattttcaccaaagttgctctaatgattgtcacttgaacaaggtcacaattgaatctgctccaaaattagcttacatttgttatgagggcagtcccaatttttgcatatcaatgaagtcatctagttcgataaatggaaaaattgaaattcgcggctactggcagggaaactatggcataaaagagtttattggtgtgctgaattttcttgtgaatctcagttactcttggaatattgtggaattgtttgttggcacagaaaaggtatgtttgttacttagtattgtgtatttgttttcatattgttaaggctatttatatgttttcataaatttgtaggcactcatttggccaataaacttgcccaaaaatttgaagaacctatttcgttatcctttgcttaattggaagcgtcttagagttattacttattttatgcctgagaacgagtcagacttgaaggaagccttgatgtggatttcaccctctttagaatcattatcttttaacaaaaaggtcatattttagtttattgagatcaatgagattaaacctttgttatattttcttctgaagtagctgatattgctctatttattaatgttggaagattactttttatacctttgctgaatttaaacttcaatgaggaataatccaagaattgttgttggaatattctaagggctgaataaagagagagatgagtttatttgattagatttaatagcttgaaaagaaaagttaatgtggagaaattgtgggctaaatgctttgagtaactgctcttgtatggcttatacaaactcggatatcagtggagaaggcagtggctggatgaatagtttggttcagagatctttttcgatgatattcgatgatttcgatcgtgggagtcaaactagctcttgacatggccatttctatggctgatgtagaagctttggagtaaaagaagcaaggagtgtgcagttgaaatcagtgcttttacttcagtcaggaaaaagaaaattttcaaccttttttctccctttggatcagaagggttataggcaatcaaagccatcacatatatatgatccaaaaaattgactcaaagtctatactattttttaaatttgtcgttgttaggaaaaacaataaacttaaagtgcagcgaagtaataaagaaacgaaacaaaacaatttactctgtttgttaaaactactaccaaactcacaaagagatatttcaccgtttgctttttcttcctcactctcaccacataataagctcacacacactttaatttttactgtgaagtggcctagccacttgccacttgctcctattgattacagagaactttctgttaagttagttaccccagtctggtattgttgtccatttatcttggtcaaaggttgttcttgtttgtgattttctatctagtacaaacaaaacagaaccaacaagcaacaggtcaattatggtgtgaaaattcatctaacttgacaaatttgcctaattccatattctcaagaagaattggtttgtgtaagacattatatagccacatcaacttgacacataatacaaaaacaccattatcgcttgatgcacaaatgataaaatcttttttatttcaagaacatattagatgacaaacaaaaaagaggtttattagtctttgactatctgtactgaaagaactgattcatttttgagcacaaagtcatatatgtgacttcactctctttttcaaaaggtggtcaaagtagtgatttataactaattcttggtatggatagaatcaatgaaatatttgaaagagatcgagagaaggagaaagatggattcattagattttctaattttataggatgtttactaataagtaatgagaattaatgataaggtagttatttttgttggagatacaatcaggatcaaaattagaaaaacgagtcaaataattaatgacctaattctcaaatcgtttgac

SEQ ID NO: 225585 - DNA, 1388 bp, Cannabis indica
ttttttttttttaattcttttttgtaatttgctctacaaaataccccaaaaaaatctttttccacttattatatatagtggagaacgactcttttcacttaaatataaatgtgcaagattttttatttttcttttgcaatgactttaaatataagagtgatgtgaacatgttttggaataattataatagaatttataaagattctattcacaagtaattaataagtataattaaagtttatttattacgaggactaattcgcgttgtcctttattttattttgtgatgtgtgactttcggcaacataaaattaagtttttttgtgtacagtacatttttttttattttattaaatagaattcgagattatataatagtgaagttttgaattgtaaaactacttaaacctcattcccacatgctaatccttaatttattttgtgtaacatgtgactcaaaccccaactttgaaaactccacctaattcagatctatctaagtataacttatcaattattgtttttgctgaattatatgaataacccaattttatggtgattccttaaatacatcggctgttggtatcttatatatatctctctcactgaaaaggaaagcaaaaaaacaaaactttagaatgcccatatcacaaataataatatttaatttgaaactaaaattttaaaatagaattattgtctgtatttttgaaaagaaaaatgattcgttattgattaaacttgttgaaaagcatccattagagaagcataaatcatcgtagagattgcaaattgtaatatgcaacacattagcgaatattataacacaattataagtttcagccaaaaaaaacaataataataataagtatggaggattgaggtttaaaagatactaattttgtcaattttgaagaaaattgacaaaatttgtaaaaaaaattatgtgaggtgaaaaatgtaatactagtaaaatgcatatgacatcttgggatttgaattggtttgtattgtcttggttttctcttaatatacgtggtaaatcccattataggacacgtggtaggttaggctcgagtattcagagataattaaaggagagtcattacaaaggtcaaatcccctcaggacaaccaatagctactccaggagccatgaccaagtctggagagatctgacttgaactcgtctacgggagcagaatagtgtctaggtcctccgaattgagagtaccggagatgtactgtcagctagcatttaatgcagtatggaggaagcgttgataaacacatatgaaaggacgtgtcagacgccataaaaccatccttcggcaattatgcgataatcaagggtatagtgacgaatccatatgaacaatcacatcaatc

SEQ ID NO: 225586 - DNA, 3549 bp, Cannabis indica
agagagagagagattagatttctttaatttttgtttgtaaaatcgctaagtatgacttagttacatacttatctcacattaattcacctcataaagataaaaaagaatattaaaaactctattaagttactaaagacaagaaaaaagttaaagacccttttacccttttcttcactagaagcaatctacacacttaagggtaaaattgtctaaaattataacctcgagtaattctgacattccaaatgtcccactatttataaagtactaaactattactaagtaactctataggtcaaacgttgcattccactgttaccgggcataacatatgaaaatcataaaatttcatacttattataattaaacacctagaattcaaatatatctccataattgcaaaaatagtaattaaaagcctacctctgaatataagctataacttttagaagaaagctaagcagtcattacaaacgatatggatctcggaggtctacaaggtggcttttcgtttaggtgagaatggggtctgggttgggtgcttggtggctcgacgtggtgtcgtttggtggggagtcgcgatcggggaagagagaacgagcgagagaaaaatagagaccgagcgactgggaaggttttttgaataagaagagtactgggtatatacaaaaataggctcaccttactaatttttacaaacttttatctagtttattatttttttactctaatatatgtatgtttagacaaatttcccatatatataccaaaattaaaggtaaaaaaggataacaatatacaaatcaagttgaactatataaatgtttcttccaaaaaaaaaaaaaacatacaatgttgagagcatcacttttgctgtcataagtgaaggtatattatgacatttaatctttgattatgagagtaacatcaatgttctcacctaaaaaaaatcatataaataatatagatataaacaatcgaacgtatacgtacacttgtctttattcatgacctgtaagtgtaatagaaatgaaataactattaaagaaaattttcaggtaagatttctaagtctgatattttatgaaagatcaaaaacagattctccccaatcaaatgcagatttgaaggctgatattaaagattttggctacatgttgaaattgcactcttctcttctctcatctcatctcatctcatctcatctaatttatataaatatatatattatatctatttattcatttcatatgtatttacaaacaattttcaatatgcttctattttatttattaaatcttgcattgaatattttatactcttctttcttatgagcattaaatactgaatattccctagtttatatagtatatataatatctaactattacaatatagggttggctagtcaccaaacaatatataatattaattagcatttttttggttgggaataatgtgttgttttttcaataaaatttgctaacttagtagactattggagaacattcattatctactttaagggtgttgtagttgtccataaataatttttatgtgtaaatacttggtatgtcagccaatatttatttatttatttttaaaattaaggtagccaatatttaatttacaacgtttgatatttattcagtgtgttatcaattcatgatttataagtttgataaattttgacaattcaatatttgaaattaataccttacaaaacaaaaatatatatttgaaattactaatatttatatttaatatatattcatttttaccgattgtgtcttgtcttttgacatggtaatgttgttttctctctagtactgctcttgtttatcgtctttgtgtattcggtctattgggattgtaagtgttatggcttccacaagtgcttcgcttaaagatgtggaagagcaatatgctaacatactgcttgaaggagaagatgatgggaatactgtgtatgacatatttgaggattcagatcaaagtggtgaagatcggtggtgcattgtcgggaagttcttaactgagagggctattgattttgatgcaatgagacatatgatggcatctttgtttcaaccaggacgcggtatgtacgtcaaggaactcgagccaaataggtatttgttccaattctaccatgagattgatcttgaaagggttatcgaaggaagtccttggactttcaatcgcactcagtttgtctttgaaaaacttcaacggggacaagatcctcgctctgttattatctccaaactagatatgtgggttcaagttcatggcttgcaacccggtttcaaaaccgagagaactcttcgtgagttaggaaactttattggcacgtatgtaaagacggacccaaagaacttccaaggtatttggcgtgattacttgcgagttcgtgttacactcgacatcaacgtcccattgaaaaggaggaagaagcttcgtcgtattgcgactgaggaaggattctgggctactttcaagtatgaatatgtccctaccttttgttttatttgtggcatattgggtcattcggataggttctgcccccaattgtttgttgtgcccgctgaaaaaatcgtcaaaccttatggggctggtatgcgtgcccaaccacgacgacggaatcacttgatcggctcgaaatggctcagaaccggcgatgaggacgttgactccttccatggtggtgcgactggtccaggttcactgccctcaattaacgttgaagatcaatcttcacatttaggtggagttatgaccaccaatcaagggataccaacaggtaaattacctgttattatttcaaataaacatgaaggagtgaatattggtaagtcaaatattcaagatattgatgttaatgctgatcctattcacgtggaaaccattatggaaacaattgaggcctctcctttgattgttattgattctaaaagaagaaggaaaaatgaaatgagctctaatgggccggctggagtgggcttgggaaatagtgacaatatggacattttagttggagaaaatgatactgaagagggctcaaaaaatgggctgttggtgggtactggtccccaggcccaccgctcattatgaatattctaagctggaattgccgagggcttgggaacccacgggcttttcaattcatttcggatcttgttatccaaaagcggcccaatattgtctttctttgtgaaacattatgtcggaagaatttggtggaaaaacttagagtctctatcgggtttgagggtatgatagctagtgatgctcgtggtcatagcggtggtgttgcggtgttgtggcggtttagtgatgaagttgtcttattgggttactctttgaattatattgacttaaaggttaccacggctagagaagctccttggagacttacggggttttatggtgaacctaatcgttcgttagtgctagaacttgggatcaaatctgcgctttaaagtctgactctcctttaccttggtgcatcatcggcgacttgaacaatgtaacgtcccaagcggataa

SEQ ID NO: 225587 - DNA, 4007 bp, Cannabis indica
tgctattgcctgtttcactttattttaacagaaatttgacagtttcaatatatataggagaacttctagccttaagaaaaaactcagatcgtttgttttgtattcaacatttgtttcaataaaatcttcctgggggcttattttgtttttgtaaggatacttttgctttctttttgcttcataagatctggtgttagaatctatgggatttacatagcaattaggtgtagctcactgtggagcgtagaatgtatgatcttaaatatcagtttcatttcattttttaggctagatcaagtggtagggtttctttctttgtccttttttttttggtgtgtggttgtggggtgtcgggtgggagaataatggtttgggttcaaatcttcatgatgaaacccaaatatgttgaatttaaggtacaggtgtatgttttttctccaagtaaattaatcatgtcttgacatatgatttatcgattcatgtatctcttgtgcttattgtttaacgttgaccttgaagattgtcaatggaccacgtggagctgttgaatctcttacggacaagttcgaagtgttctacattgactatggtaatcaagaggttgttacctacaagcaattacggcctgttgatgcttcagtgtctgctgcacctggccttgctcagctctgtaaccttgcctacatcaaagttccaggcttggaggatgattttggtgaagaagcagctgagtatttaagcgagctgactctaagtagctctaaagagtttagagccaagattgaggaaagggatgcttcagggggaaaagtgaaaggtcagggaaccggaccaatcattagtgttactctcgtcgctgttgatgctgagatcagcgtaaacgctgccatgcttcaagtaataatctttcctttccacttggtcttttttattgtagttattgtttccatattttggtgcactgctgtttctatgtcataatcatatcataaactgaaaaactgctgatgtttgtgagttgttttggaaattgtgaatcttaatatttgccacaatgaaactttcaggatggacttgctagactagagaaaaggaggagatggggctcaaaggacaaacaattggcctttgagaacctggagaaattccaggaagaagctcgaactggtaggcgcggaatgtggcgctacggggacattgagtctgacgatgaggacgctccccctcttagaaaagctgctggcggccggcggtaaatgtaattttaagacctgaagaggtatagctgaaacttagaaaagaaagttgtgtggcctaaagttaagttatagtcataattattcacacatggagtcagctaatcgcacatggaatagagaaaataaaacatatataaaaggtggttgaagcatggacctgctttaagttttgttttagttttgcgaatttgtttttgttagatgagaacaattttttttgccatcgtgtcataataaaggtgacaattttttttggttggttctttaaataaaacattgtgctttttagtatgttgttttgtacagagttattcggtttactagagattgaaaatagacaaaaatagtaagtctcacttaaaaaggcatttttaatgtcgtttttgtgactataattgttacagaacggtagaacgtagtaaattgtggtctaattattcatattcgatagaatgaaccgaaccgtgcatttcacagaatcagagtgtctgctgaaaatcttttccttcagaaccagtaaggttttgttttcaattaacaagagaactggttttttctttcacatcaacacatcatatttcgaagaataactgaaaagtgaaagtttcacaaagaatgtggaatttgcgttcgacatgtctaatcctattatcattcaaggataaaaccacagccatcacattcattaaaatcccaaattgactgctagaataattaaaaataaataattatttggcagctaaatctcctattttcttgttgtgttaaaaataaataaataaattcaaaatcagtacaataataattttcaaaatcaatacaataataatccgtgtataaaaaataattgataatatattttgactaaaataattttattctttttattataaaattatattttgacttaatatttttttttttcttataatagagtgtaattgtaatgaaatagagtgtaattgtaatgaaaattgcattgattttagtattggttacattgattttggtaatggtatgtaatcaacattacaaataggttaaaaaagttaaaaaagaaaataggaaatggacctattcattacttacagcaaaccaaactatcacctaaattggacgaagaccctggtttagtttaaaatttatcaaaaatcataatatccaaccaaaacagtggagactcttagaataaaaataaaaaaaattcttttggtcgtttattattcaatcgctcatcaaccctcatgatcaacattggttcgcaatcacccacctgggcttggtcaaccaccaccaccatggtattctaaaatcataacagcaaatgggttttgggagaattcaacaaactatcccacaaatccaacatataaccaagatagaaacaaatatgtacatacatacattattactgaaaaagaaaatgaaagcccaaaatcccaaagcggcattaaatcaaactccaacagacttgagagtctcagcacgtggagtgtgagcataagcatctcccctagtaccatctttaatggagtaattcgcttggggatcttgaacatgcgccactctcctaaaaaacgacttgtgcaagaacctgtcagcgcattccatcacgtactccggctccgccacctccggcaaactctctcgacgcttctttttcacgaacacgttcggactatgcatcagttgttgcttggccgtgtgtagcccgatcatcaaggccaccccaatcatccctaccgccacgtaaaccggcacaaagtccccttttggccctgctggtactggcttcgatgcttgcttgtagtcaccgctgagctcggctgggttggcataagccttcatctttggtggggttgaggtagctagtcctctcagtcccttagccatggatttccaatgaccctgcacattttgagtaaacttcatagtcaaaaacacacataacacacataaacatattcaacaacaccaatgcgtaccattgctctaagcgccatgatctaacaataaagtaaacaaaaacagagtacaagtgtcacaatctgtcagttgttgcaaatgtaagtttcttaagaaagctttggaatattgcaatgtttctttctttctttgtgttcagattttttcaagtgggcatacacttgtacttataccaatttaaggttatatggggttgaaaaagagcaacgacttgtctgtaactgttaagaatcaaagcaaagcaatggaaagaggaagagggttctggagccacgtagtccaatatagaagcaacgggacacgtgtcacatcacaaaggtgtacagcgtcacattggaagtctcaagaagcagcacgtcgcatcttgtaactattttcttccttatccacttcttcactcagtttcatttttttttagtactttcttacaagaaaaggtggaagattgaaataaccttgaaatctctcatgaattagctgaatataagaacgcaggattttttctttttcttagttaaacaaattagtaaaagcattttcttcgttttcattatttttcccattacctttaataaagtccataaatatattttgtgctcaataaattttataatatacatattttgatagagatagaaatagaaatacatataaaaagataccctatatattatgagcaatactatcatctactttttcatttttctatataaacttttctttaagttttaggtgagagtgagattcgttattcgctactta

SEQ ID NO: 225588 - DNA, 1333 bp, Cannabis indica
gaagttgtagctcctaaagtggtgtacaattcctctctttgggagatggaacggttcaccaataaattctgaaattatgacaattctaagaagtaggagatgaatcatggtctcaaattgctctaggtttgtgttagaacatgctcttcgtctttagggagtcaccttgtaaatgtgcaatgtcttcgtctctggagcttggcccatttggaaatgggagcacaacttttgctcaggagctattttgccaaattttgtgcgttggtaggcattgcccttttcaattcattctccaagtgtacagactgcttgcgggctggtttgtgctatgcaaagccaagaagatggaggtccctactgtagaagatgttttttttatatttatttttatcaaataaagcctcgacctatgcggaagaacaaaaataaaataggttctcatggcttgagaagaaattcaagtccttgatctgtccaaccagctcaatgaagtacacgcacgacttcaaggactactagtttttcaccacaggttccccattgaagagggttacgaccctttctttagatttttgtattgtaagtaagcggacttactctttcttatttaattactttcccgcctttcttttagtctctaataattaggatctgtttgctttttttttaaaaaaaaaaaacgagataaaattatgtgttcggcagccactcctttcttggaggccaaacaaggtttatatcagagctttcctccttaagacttacaggtggaaaagcttgttactacagccagccttaggcaagttggtttgcttgctcctcattagagcattgatgcctttcatgtcaaagactcccctcacggtgactcccagacctcaaagaggttatttcggagatagacattgatgaagcacgaaaagccatcaagaaagaccaaatatggttggaagactgggcccgacttcatccagagtccatgaccaaagaaacgaaggttgaggtctgttttaaggcggctattcagtatgggggcactataggagtgagtacgtctagaagaagtaattctcccttcagttcaatttatgctccaagtcttgtaaacatgaattgagttgactatggggctttgacccgtacttcttggagttaaatcaacatagatagcttgtattgatacatagataggatagatgagatagtcaggagcctaaatcatttccttccgcctacgcagagtgtttgtgaacactcggtttgactcagtcaaaccgagtatatatatataataaataaattaaatataatataatatatatgtgtatataaa

SEQ ID NO: 225589 - DNA, 1824 bp, Cannabis indica
ttaaggaggtacattgtagaatcttcctatagttgtagtgctcattaatcagtgttctcccagactcactaattattcaactaataatcccttgagtcaattgagtggtttttactattcacaacacagaaaattaattaacttcttgcaagtaataataagtacactcattataatcaaaaacttataattattaaaggtgaataaaaataaagggaaaatgtagataaaaacaaaattaataagaaaaggagaggtggagtgaaattggtaagatattaatatagggaagggcagaagtgacctagctatattattaaaataaaaggtagaccaagctgaggaagctgtgacgcggatttcaccagcgctcactttcattgaatagagacaatgacgacaaattccaagcttcttggtgcagatgcacttgcaggaggagagccccattttacatatattatttaattaattaattcaaacttacttaaataattgagagtttaagatactgattattaggagtacagtacagctttaatgttaggtccttccttatatataaatataaatatatatattattgatttaataatataagaaaagcaaaagtaaaatacccaactaaagctggcattttctatgctgtatttacactttagggctttgttcccatttgaacgatttattgcataaaaaatgccacttggctagttgaagtacttaattattagatgtatatgttacaataatactgggttatactatttaaggaaattggtccaatgaatttgccttgcattgtatttaatggagcatagtaaagaatactgcttcgtgatcaatttcctactaagtgtaaagttacttgatagggccttgtaaggaaaaatagtactcgttagctattaatacttcttattattatgttttttttttgacagagaatagcttaattattttatagcaagcaatttgcttataattattgctaaaaaaaatgcctattattattattgttgttgttattatgttttgcatgtagttatccacgtaaatcgaaaaaacaggtcaagagttttataatttatgtcgaccaattaagtaccaaaaaagagtaacaaatatatttttttttgacaaaaatataatctaaattaattagtactgacgtgtatttaagcaatatgataattgatatattagtccactcagaatataaaatgtattatttctaaaattcaataattgcttccaaaattaatattttagtaccaaagacatttatcatgctaataatacagggacggatggaggtagagccattttttcaggatgattaaacaatgaagatataataatatatgtatatatacactagaaatatctatttgattataatacatttaaattttttaaaaaataatattatttaattaaatgctaattattaaagaaaatttacatgatttactaactttttctattttattctaaaaatattgccacacgcgaatttttacttttatactgtgtattaattttttattatacggcagtatactgttattattggttcaaagttcattatcactttgtggcttacacatgtcttcagggagttttgctacttcatttttgaaattttttctttaataaaactttgatttgacgtggggtatcactgcttgtgacagtttgcttcccttttgggttttaacttattttaaaattatttctaaatatttttaaatgttaaataattattactaaaattccactccctcatgttccctgttcatcatcttcttctaatatccattt

SEQ ID NO: 225590 - DNA, 4720 bp, Cannabis indica
caagatgaataaatatggcgacagaggattgccttgcctgagcccacgacctggagagaacacatttccaggagcaccattaaccagaatagagaaggaaacacttgtaacacattgcataatcagattgcatacatgagtgttgaatccatttgccttgagcaccgcagcaagaaacccccattcaattcggtcatatgccttatgcatatccgtcttgacacccataaaacccttccttcctttcaatttcctcatggtatccaacacttccgaagctaaaaccgaacattcagcaatccaccgcccttttaagaaagcgctctgaaaagggctaatgatcttgtcaaaaatcggcttcaaccgatccgtaaggatcctagcaatgaccttatacccgaagttgcacaagcttatgggacgaaattgatcaaaagaggagggattatcacatttcggtataaggcaaataaaagtatgattgagttccttgacgaaccttcctgaaacaaagaattcttgaaccatatcacaaatgtcacccccaactatattccaataattgcgatagaaaatcccagagaacccatccggtcctgggcttttcaaaggatgtaagctccatacagcattttttatttccattgcagtgggaactcgacccacctctaaattctcagaatttgtcacttccgcagcaaaaagcgactcaaactcccttccaaaactaggatcagaggtagtgaacaagcctttaaagttatcttcaaagtaccggcaaatctcgtccctgttagtgatccaattttggggtgtatccttgatcgctccaatgtgattcctacgtcttcgcacaattgttgctgtgtggaagaactttgtattgctatccccttttgccacccacaactccctggacttttgtttccagattctctccactttagattccaaatccaagatctccaattggattgacgcttcctttgcgcagttcacagcattaataggcgcctcctgaatttgactaagttgccgatgaagtgtacgaagcttcctatcgcagaacccgaagcattcacgattccaggtcttcagagctttcttcgtccacgacagtttcctcataacacgatagctttgtcttcccatacatggttggttccatgccttgtcaatcgtagtgccacaagaagggtcagaggcccaaacctcgaaaaatcggaagggatacttgagtctatcctcattcggtctagtgtccaacaataaaggagcatgatcagaactgagtatcggatggtgattaactctagcagaagggaacttcacacaccaatccggactagcaatggccctatcaagtcttttgcgaactctagcccgatcttctctagcattgtgccaagtaaaggcagacccaatacacccaagatcaattcccccacaatcattaacaaagtttcccaaaaaggctccttcatgagcagtaaactcccgtcctccctgcttttcatttgcattaagaatagcattaaggtcaccaataactagccaaggcccctcacaatccagaatgatacctgtgatccactcccaaaattcagccttcttatttccataaggcgttccataaatacagaaaaggaaccaaggttgtcctccatccaaagaatcaacccgaagacaaaaaccggtctcgtacacctctttcacgttaattcccattccttgtctccacgcaacacaaaatcctcctccaataccaacagagttaatacaattaacaattgggaaacccaaacgattcatacaacttatcatagccatactgtccaccttcgtctcagctaaaaaaaccatatccactctttctctttgagcaaggccacgaatagcccgctctgccgccggtctccgaagaccgcgacaattccaagcaaggcacctcatggcgtaggtgggggcatgaatctggccgcctcctcgccatccccaaaattttgggcatatgtaatcggaacttcaacaaaattctcaagcatcccaactggattcccttcaatctcacccgcttccactcttctccttcttcttgttttgactccagagccacgattggaagttcttttgccatctttcttcttttttccactccgaccacgcgaagattcaccaacttcacacgtcccaggcctgtactttaaatttcccaggatctctgtttcacttccactcgcatcagtcgcctcaggacatggcagatttgcatctgagcttgaatttcctttgaacaaaggagtctgaaactcgtccgggttcgggctgtaccacacgtgggctttcctcttttttgtacccagtagatgaacaatcagctcagatatattaggtggatttgaaataatagaaggttgggctttatagagatccagcacttctgggccaattaattggttatataagctttgtaactcaggttcattactgggccatcgcaggggggtgggctcaggaaagttgtggaagttgtggggttgttgagacctacaggtccatatgtgaggtatttctagactttgggtcaaagtaggcccaatatcaggtattgtttctccgtccaggttcggcccaacaggaaaggcaaagtcaggattaggaagcacgtgtaaaacatttctggagggaatattcaaaaattgatgatcctccgaggtaggtagagaaccttggaccacatcatcctttcccaagggaattatccccctgccatctgtcccttccgtaccattctcatgcacaccatgcaccgtaccttcatgtacgacgtcctttcccttatccaaattaccggtcaggcctttgccgtctccttccccatcatcaacgttccgatcatggttccgacgcctccacagccccctggttctgcttccgttttttgcgaattcatccttattgccaataatgatttccctttgggtgcccttgctagtgaagcaattaccatgtgctccatctactttaatccatggcccgtacattctcactgctccccccactgcaagagtcacccacgccgtcggagcgagacattccctgttcaggtgggccaattttccacagttaaaacatagataaggtagcttttcgtacttgaattgcacccatgactccggattagcaccagctttgagaaaaaagcccgcagggaatggatgaatgatccaaacgtcaatccagcagcggaggaaaccccttcgcacgacttcttccttcgttttccatccgttttaatgaagtgacctattttcttagccacaataggagcatttacctccgataaacatctcgttggcaaaccatgaatttccacccagaaccgtgccacttcgaactccgacagtcgcgcttctccttcaataggccaaggctttaagtttaacagtactccattaactagccagggacgcttgctcatgatcatttcacagtcctcctccgattcaaagaaaaaacccaggacaccttcctcacatttctgcataaaacccaacagttgagtcttccaaattccacttagaatctttcgaaccaccgacgcaggcattgttttgcaccccatgacttttcccacgcaagctttcttaacaacaatgtcttccaaagttaggtcctcaaacagctcaagcatttctatttccatctcactatctcactgtagaagttcaccagcttgtttatccatcgagactacctcaacaatcacttcggagtctgaaacttctgttactatcaccatatcgactcagataagagcctcaaaagtaggaaaaaaaccccaaacagtccaccaagagactagactctacacaggagccatattatctattttttatttactttccgtttaattttactagtattttagtatttaattttactttttatattcaaaaaaatttgatttaatttaattaaattaataacgaattagtagaacataaattcaatttatattttattatatattctattttttgcaaaaaaaaaaaataatattatatatataaaaatgtgtttaacatccacccgacttaaaatatttttctagtccaattttagttgactagaaaaatactcattttatgtccgaggataccatgtccaacataaaaatggactaaaaagacatatcatgtccaacttttatagacataaaagagattttttgtagtagtgagtagacatagttttaatcaacgacaactgtatataatttagatatcggtgacatatgttattgcactaacacactctcaaagacccaccataattatattgacgaccgtgcatgtctcttaattgttaatatttaaatttagagaaaaatttagattttctaatatttataaattaaaaattacaacatgttaaaatatttatttttaaaattatataacagaaactatctcagttctaataaggtaatgtaactaatacaatatagttatgtaacaactaaaacaacacttgtttctttatttattctcatttattttttaccatgcaagatgataaataaaccttagcatctagtagaagagatttaccaaaaatacctttgttttttccaattttaattgtttaaaaattaaagccggtattattaaaataggattactgtgtaaaaaggtaccttatactgtagctatatata

SEQ ID NO: 225591 - DNA, 2998 bp, Cannabis indica
aaatttttaaaatattatttttttatatctaaatagatttttcaataaaaaaaaaaaaattaattgcttaattagttttaaaattttaatttcctttttaatttttttaattgttcaaatgatttttttaacatctaaattaatttttgaagatttattgaaaaaaaatattgaatctttctcatttttagttttagggtgtacgatttgatagtttttaaaattgagggagcaaagttgttaatttacaaagacacattaacatttaaacggaataatacgatggaacctacaaaaaaggttacatatgtttgaaaaagttaataaatgaagtagaaaaaatcaaaatgggtggcaattattaattgagcattgctattaggtactagtggtacttagtactttctagacatgtcgagttgcgattggctggcgatactctctaaaaactattatattaaattatatggtaccaaatacttaattgaattaataatagtaatattgacacataagagacttgtgcctttatccatttctcttattaatttgagggacaggtttgtataaaaaaattggcgacagttgacgtttttcctatcttatgtagtctgtttattatgatttggtgcaggttgggtggatgtatgggtcaacgacagaagatatgaatactgggctttgtatccataagaaaggttggagatctgctttttgtgtaccagatccaccagcttttcttggatgcacacctactaatgggcctggttctatgatccaacagaaaagatgggccacaggccttctagaaatactagtagggagaaactgccccattttcttcactatattcgacaaacttcaattcagacaatgcttggcctatctttgggttctcctttgggggttctgctccattcctgagctttgctattctcttctactagcctattctattattaccaactcccagttatatcctcaggtaaccacaatgctctttcatatttcaagttataattataacaagctaaatctattaagacatgttacaattatagatatttgttctatttattactagttctgaatgtgtgaaattaaatgtagagccaagaaccaacgttcatcattccaatatcgatatttgtggtgtacaatctatacacaatatcagagtacattgccactggacaatcaatcaaagcgtggtggaacaatcagaaaatgacaagaataatctcaatgggcccttggattttaggagtaattggtgtgatactaaagcttataggaatttcagagacagtatttgaagtgaccaaaaaagaccaatcaacttcaggtactattactgatcgtgatgatcatataaattctggggttggcacattcacctttgacgagtcaccagtctttgtgccggtcacaaccttattattggtccaactcatagcgttggctatggcatttctaaggttgaaaccgccagttcgcagtggtgcaggtcacggctcaggggctttggaggtcttttgtagtttgtggttggtattgtgcttgtggaatatcttgaaagggttatttgggaaaggaaagtatggcattcccttctccaccatttttaagtctgcagctttggcattgctttttgtagccttctgtaatagaaggaacaacatatagattgttggtttaattcaaccacctttcttacttatatgtgtgttgtcttttcctaagatgttatctataatattcatggttaattttatataatgactgagaaataattcatttgtagaagaataatttgtaagtataaataatattatttcagaattttccgatataaatatccattgattcaaggattacaactataatttggagaggaaatgagtgaaatttttgtagtgtttatataatctaaatatttaagtgtcacaaaataatatttttgtcaaaaagtaacacataagaggttacatcatagaggaattgtaaattcttgagaaatgatgatcgcaaacttgtgtaactcaacattccattatcacttttaaattagtaaaagatattactaattttgtttgaatgtgaatgaatgatagttattaaaaatataactattgtagacttgatttttttatttataaggtgtataattgatccggaatctagtgagagtagtttggaatattttgaagaaaaaataacaaaagttgaaaaatatactaaccaattttttgaatgtttgagatgtttctaacagctaaaaaacccctaaattacctaattaatttcatgaatgcccagtttatgattcgtaatagtcaagggctttatgatggtcattcatgttcaaataggagtgaattctctataaatagtgaccacttgttcacttgtgagacacttgttgaaatcacttgtttggttagaaccttgtgatgatatgctcatttatagaaactacacagagcatatgaagcttgataaattctaaaaaatattcttaaattttccaaagtgtccacacaaaggaagaaatgacttttaggacaaaagtccttaaccttgtttaagcctttgagaattttttttctcttctttgtggtcatatatatagtgtgatgtattattgcaatgagttgtaatctatttttcttctactaatgtaatcatgatgttatacgtttagtgtatttgattataatcctcatattccctcttgtaaaaaaattctcgcaacaaaatttttaggtattgtaagaaaattaggaaaatgatttagctagagataagtacattaagtctattatacatttcttaccgcgcaaaattctattatgaattaagttagctttcagtcgtaaaattccttatcaagtccatgtatataaataaagaatttcaactcaactgagttagtttagcagcttaaaccatttccacaattcattctactattggaagttattttaccaggatctta

SEQ ID NO: 225592 - DNA, 2133 bp, Cannabis indica
gaccagacctatctttcctaaagtaaaagcttcaatcattcaaccagtattgtccctggctaagcatcccaaaccaaaacgtccttcttgagcaaacaaggctcgatctacatttaccttgatcttattcccattgggtctctcccattgctcatatttaaccccatccgtagcaagatgagatagagaaaaacctctacgttcttgagcaatcttatattgatctaggcaagatcttggagacgcaacaatacttgctgcattagagactttctactgccaaacgacttcattacgtgctctccaaatcgtccatgccaccatcgccagcttctccaattcatcaaccttcccccggtttactgccccctacaaccaactataaaaatcagcatcagctgcgctaccaacgtccaccagagatcttttccagcatgatctcgcaacaagacaagccacaagcacatgaaaaatagtttcattatccaaattacagacaggaccaattgcacttattggaacatgtctcttttgcaattgaacacagcttggcaaacaaccagatgctgccctccgcaaaaaattatagaccttagggggcactttaagatcccagatagtacgccataggttcgatggttgaacagcaggccaagctcccttgagcacttggagatgtttatacgcactattaaccgtgtaacctccatgtttctcaaacttccagcaccatcgatcctccaagacattatcactgagctgaattgaaaaaataagagcctcgtctctatcctgaaaaatatcacgaatgatatcttcatcccaccctctagaatcaattctcataaggctgctaacaggttagttaattaaagcaggatgattggagagaacaaatggattttcatcagggagccatggatcatttagaatagagacggattcccctgatccaaccgatcgacaaacacaagaaaccagcaattccttcgcttcaactttactacgccacacaaaacttgggttatcacccaactcagctttcagaattgttgttgtagagtaatatttggctttaaacacacgccccacaagagaagagtcatgagttaacagtctccaaccctgcttcccaagaagagccaaattaaaatctcgtaggtcccggaatcccaaaccccctgcatgtttgtgacgacacatacgattccaactcatccagcttgtacctttagtttgagttgaacccgtactccaccaaaacttggccattagtctttcaagctctttgcaagtatcaactggcagtaaaaatacattcatagcataattaggaagtgcttgagcaatagattttaataatacctctttgccagcccttgaaagcatcctcccttcccaaccattaattctcttccttagcttgtctttaagaaagtcaagaatggcattttatttttaccaatcgaatatggaaggcccaagtaagaaccattttcatctgcttcaaagatccccaacaagtcacagattgtatcacgaagaccaacagcagtgttgcagctgtaaaaaacagatgattttgagaaatttatcttttgtccagatgccaattcaaaagtatgtagcagctccttgatgttatatgcttcctcctccgttgctttgcaatatatataactatcatccgcgaacaacatgtgagaaatatttggagcatggcgagcaatcttacaccccgtaagtagtccactatgctcataactgcgtaaaaagcacgagaacccctccgcacaaagaataaacagataaggagataatggatctccttgtctgatcccacgagaagcaacaatagggcccatttcttggcctccatgagcaatgtagaatgacacggaactaacacaaacatcactaattaatccatctgccatcgaatcccatcctctctaacatagctctgatataatctcattccaatctatcataagctttactcatgtctaattttgagccatgaacccatctctccctctcctttcctcttcaagtaatgcataatctcataagagatcatgatattgtctgaaattaatcggccttgcaagaaggcactttgcgtctcagata

SEQ ID NO: 225593 - DNA, 3722 bp, Cannabis indica
atgaggttcattcatgttcatttgtagctttaggaaattgaatttgtggttttgtttgtttataatgattcttccaatctagttttcttttgattttcaacatattaacattattcatattttgattttctgtttgaaagtcttgctctttttgtaagaaagtcttgtttgagttgtagtgtggtgcattgtttgatatggtaatacatttggttaaaacgggtttggaaagataaaggaaaaagatgaatttgctgttgaatatttttttttttttttgagtatctgataatttataagattatttatgctatgagtaataaaaaaaaagttataaagaagaaacatgagtgagctattgtgtttgttgttgttgttttctcatactagctagggaaaaagctgaaactaagtgagtgtgcaaggttattgctgttgcagtatatatttgtttttgaaaaagagaaagaagccattgtcttagactagcctccccccgatatatattgatatatgctcacttgtagcggaggaaaatcttggtaaacatttagaatgagaataacatgaaaattagacagagagaaataaatacatcgaacaaaccagcagccaacttttaaacctaatacatccaagatttctttcagatctaaaaacgtcaaatgctcaaaatgcttggttttgtagacccaagtggcaatccaaaatttaatcttctcccatacctcttctaatgagcattcagtcccttcgaaaactctgttgtttctttccaaccacactgcccatatattggccatagctgcagtctccatagcaaattcctacgcttgctgactaacattagccaaatcaggtattacccactgaacctcaaactcgttcagcaggaacagccaaattctaaatgagtaactacagaccaaagctacaaggttattgttttttcatactagctagggaactgaaatttgcctcttttttgcaagattggcaagattttaagtgttgtggttgtgtattgatagtagttattttctttatttactttcgttattttattttgtgggtggatgtaagttttcttgttttgtgattgttctgaaaagctgaacaattttttttattaaatcaatgctcgctttctataagaattgtttacaggatttttgtttacttctctattgcaattttatgaagagtaaaaggtaatagtttttctttctctcttttagtcattttgtttttcatttttactatggtccttatggcaattgctcaaaaggaaataaagaagagattctatacattaatctgtatgtattatcttgattttatcattttttgggctattcccatatggaccatagtgaaaataaaaaacaaaatgactaaaacagagaaagaaaagtaatacttaataaaattgatatagcaaattaaacaaaatcacgttaacacttcttatagacctgtaattgcaataaatgtaagcatttctctcaccttatgttttgattttcatttctgacttatagaagtaaataatatccataagtttgaataaataaaccaatggagaaattgtgctcctacataactctaagtatggcatttaagtacatatattttttggttgctataagaaatttttcctttatatatatatatcaagtcatccaacaaataggatatacaataagaactatttaaactaggaagaagaagaagaatacatacctaggttagaaagcttggtgatcttcaaggctcatccctagttagacaagaaccaaagagaaccttaaaaaaaggatattttgtttaacacttcggatttaattttgtcattttgctgctttaaaattttcaaggtccctctttaattccttttcctctttgtttctttccttagtttttataatacttttccgatatactcatatttttttgtttggaaattagtatttggtgtagtgagagtgacagagctgtcctgtaggtatttgggagagaagtaaagaatgaacgcacctgatcgatacgaacgtttcgtcgtccctgaaggaaccaaaaagttggttttttgctatctagatttattatttgaaaattataataggtatagggttttgttgtaacttgtaagttttgacatgatgatgatgcagggtttcctatgagagggacactaagatcatcaatgccgcttccttcaccattgagagagaggaccacaccgtcggcaacatcctccgcatgtattaatcatcttttttattctatctctctctctctctccatgtcttttcttagtacaacattcattattgttttttttttcttataatcgaatcaggcagttgcacagggacgaaagtgtgctttttgctggttacaagcttccccaccctcttcagtacaagataattgttagggttagtcattgttatattcactctttcttcctctactccctgttaaagcttatggtatatttaatttggttttaatttatctactctacaaattttcttagtagtttcctgaataaattgaagctaaaacttagagctcaaaatgttccacttagccttgggttaaatagttgatatttactatatatacatacaatttgtaaggtggtaatgtaagtcttgtaatgtgataagaccatgctgccaaattcttaaaccagtagcaaagtagccgaaatatcaatgaaacagtagtagaacaatggattagactgtgggagttgatattgaatatatgagaaaaccaattactagtactacaaactatgggagcccttaggcccctttgatgcaaaaagttttactcgatacattgcataacccccaattctccttagtatcctatatgtatatactattactaacttgggttctaacataatatgtgatcttgtcatttttatgtgaagattcatacaaccagccagtcttcacctatgcaagcatataaccaggctatcaatgatctcgataaggaacttgaccatctcaggagcacttttgaggtatgcaatcttggtccatacatcttttgttacttgcaagtttctcttctaattggttagctgcctcggtcgagcctcacactgtcaagtttatcaatagttggtttataggtgatgaaaatgtgaattcatgatatgcataaaattttcccatgcaggcagaggttgctaataaggaacaaagagagtattaacatgcatcctattcctatctgaagttttttcttatggaatttagatattttcatctttttgagaccttttgcttctactatggtattaaattccatgtatgtaattaattgactttattatgacctttctactagggtatcaatgtttgtttgtaattctccacaagagtagttaaagactaatagactattaaaaatgtaagccatgacagtttgtggagtgacatttgccgaactaagaatgtgaaatactaaaattcacaaaataacctcacttaatttgctttatggtatggtcgcaacagtgtaaatctatagtcgtttttggtcgcatagtgtaattcatggtcatctctgcggctataaaaggctaaaaaaattcataaagactattgataatactcgtttgtagagtaattttgataatactgtctatgaatgacgttgtacttagcattggtgactagagatggaaatttata

SEQ ID NO: 225594 - DNA, 4904 bp, Cannabis indica
taatactatacacccaacaaaaataaggatattcatatctagctaaacaagttaattacatttgatatacaaatctttccctttcaaattatttaagcaaaggctaagaaaccgatattttatagcaagtttaatttccctgctcacagaagcaggaacattgcagtacaatttaaaactacaacagtttatattctgccacaggaagtaaatgacaacagtcattatagaattcataagtttgtcctgcaatctgttcatagaatttgaacacaaatccttccattgtgtgaaatcaatcggccagtaagtcagaccaaaccagttgccaatttcaaccatcacctttttggcaaacaaatccaaacaacaacaatactagaaagaaagaatgaaaaataataatataagagtaaagaaagtctaacttcgatacgaaaagagtttaccttgtattaggatacaagggatagttagttaggagatagtcagttagacagttattactgttttctgttgtttctgttattgatttctttcttcttctcttgtattcctactcaattgtacatatataaatagtagagcctcaacgccaatcactttgattgagcttttccactttttcacttgtccatcttctctctactgctctttctttaactctgtttttcacagagtctttcatggtatcagagccatgtctgaaccaccaagacccaccccacctgaaccagaaagaagacaacaacaacaatccaatgttcaagcacagatcgccttccccaacaacaatctgcttccattaaacctgaggttggatcgcaccaattacacgatatggaggtctctcgttttggcagccactcgtgcctatgatcttgatgggtatattctgggttcacgtcctccaccaccaaacacacttacaggtaacctccccaacccagaatttcaacaatggatgagatttgaccaatttttaatgcactggctaatgaattcaatctctgaaaacatgctgggacatgtgattcactgccgcacttctgctgagatttggactaccttctctcaactctttgcaaccagatccagggctaggattctccaacttcgtgggttgcaacagtcgacgaagaagggttctctgaccattgaagattacattttgaagatgaaaatgtttgctgatagtctcactggtgctggacaacccataaaagataacgatatgattttatacattcttggaggacttggagctgagtatgagtcggttgtagttaatctcacctccaaatctaaagatctcactctacaagaagtccaattcttgcttcaaaatcaagaaatgcgaatacaacaacttttcgcagaatccgtagtcaacgttcaggccaatcttgctaatatgcaatgcaacaaaggaggcagaggctctcaagctaaccgtggttaccgtggttcaaatcgagtgggaagaggccattacaggggcggtcatggtggtaacaatggcaacagacccatttgccaactgtgtggaaggtctgggcacacagtcattaagtgcttccacagatttgatattaacttcactggcagtcaatccaattctacaccttccccatccaatgatgactcaccacaagccaatatcacccaaaccgactcatcatcaaaccaaactcaagcttggttcttggacataagggcaactcataacatggccaatgacactcacaatttcaaccatgcctctgattataaagggaaagctaaggtgattgtaggtaatagttcttctcttcctatccattccattggtcaaggttatatcaattctttttcttcaacacatccattagtgttacaagatatcttacatgtgccaagtttaactaaaaatcttttaagcatttcccaattcaccaaaaattacaatgttattcttgaatttgatgatgtttgttgtctcattaaggacaagaaaacaaagcaagtaattcttcggggtgacctttgtgaaggtttgtacaagctttaagtccatcctaccaaaactccaaactagcctgttcacattcctcaacccagtgccaacaatcatacaaccacaagcaatcctatccacaacaagtccaacatctctactatttggcatcactgactcgggcaccctgctcctgtcattctaaatagatttctatctttagttgttcccaactctacatgtaataaagtttctttttgtaatgtctgtcaaataggcaaattacaccaatttagctttaaaagcaccagcaataaaaccaagatgccctttgaattagttcttaccgatgtttggggaccgtctttctatagctctaatgatggctacaaatattatgtcagttttttagatgatttcacacgtttttcttggttgtttcctatgaaaaaaaaaccgaagtcacaaacatcttcaaacagttcaatacctttgttgaaaggttttttaacaccaaaatcaaaagcatccaatcggatctaggaaaagagtatgaacccttaaataaagtataccaagatcttggcattctaaaaaagaaattcttgccctcatactcatcaacaacaaggttgtgttgagagaaaatatcgtcatgttgttgatattgacttaactcttcttgcccaagctgaaatgcctctcacattttggtgggaagcattctcttctgctgcttatttatttaatagactgccaaaccagatgcttcaaaacaaatctccatatgaaacactttttcagcattcacccgattataacatgttaagagtctttggttgttcttattttccgttgctaagaccctatgaaactcacaaagtctccttccgatctgctaaatgccttttcattggctatactatgtcctcaaaagaatatagatgcctaaacccaagtggaaggatttatgttgcttgaaatgtaacttttaatgaagaagaatttccttttcagcaactttttcctactacagcctacactcaacaaaccagtcccacaaatattaatcatgtctggtttcctctccctcataccacatcccaaacatctcatcataatacctctggctctactgattcttcccataacattaacattccacactccccacatcattccagtagtgagtcgaccaaccaatcttttccctcacccgaaaatgcatcccctacggctactaacaacagctcttcccataacattaatactcataataatcatccaatggtgaccagatctaaacttggcatatacaaacctaaagtatatcttgcaacacaattggatactattgaaccaaaaagcatcaaagaagccttagctaaccctcattggaatagggccatgaatactgaatatgttgctctcaagaacaagaaaacatggattcttgttccccccacttctaatatgaaaataatccacaacaaatggatattcagagtaaagtacaacaaagatcgctcagttgagagacgtaaagctcagttagtggctaaaggtttccaacaagtgccaggagtagacttctttgaaacctacaacccagttatcaagccttgtaccattcggataatctttactcttgctgtcacatatgggtggaaaattcagcaaatcgacatcaacaacgccttcttgaatgatgagttacaagaagatgtctacatgcatcaacctaaaagatttattgatcctcaattccccaatcatgtctgcaagttgcagaaggccatatatggcctaaagcaggctccccacacctggtttgatcaactcaccaactctttaaaataatggggtttcaccaacagcaaggctaactcaagtttcttttttaagaaattcaacaataagatgcttctcatactgctctacgtcgaccatattcttatcacaggagaagatcctcatcaagttcaacaattaatttctctcctccactctcagtatgctgtcaaagttctcggccctgtcaactattttctcgggttcgaagttattagagatggctccagtctctatcttactcaacaaaagtatattgaggatcttcttatttcaactcaacttttggattccaagccccaatccacccctatgtgctccactagcaaactgtcccagcacaatggtactccattaccaaacccaactcaatatagaagcgtctttggggccggctctacagtaactcactttaactagacccgacattgctttttcagtcaataaattaagccaatttcagcaacaacctacatctaaacattggggagcatgaaagcgaatcttgcgatacttggctggcactattggcattggtttacagttcactccagctcccagacttgacatacaagggttcacggatgctgattgggcagggagtttcgatgataggaagtcaacgtcgggttactgcatctttcttggaggaaacctcatcagttggtgctctaaaaagaaaatcgttgttgcctggtctagtaccgaatctgaatatcatgctcttgctttagctacaactgaagtggtgtggatcaatctcagctatctgaacttgacattcaaaataccccaaaaactccaattctctggtgcgacaacttaggggcaggttccttggccactaattcggtgtttcctgcccgcaccaaacataccgaagtagatctccattttgttcgagcaaagtaattgctcgtcaacttgaagtcgttaatgtcgacaccttaaatcagctggctgatgtcttcacaaagcctctaccgatgtcttcctttgtatatctgagggacaagattacacatggtattatcagtgtatcttgaggggagtatta

SEQ ID NO: 225595 - DNA, 2086 bp, Cannabis indica
ataaataaatgacagtgacaagagaaaatgctagttcaatacatatctagaattttaatgcttaccaatttttgtgcctgttgaagaagataaaaaaacggttgcatttgattcttgagaagcaaaactaaccatatcatattctttgcctgagaaatgacaaaagaacgggtaatgacaccggaaatcataaattgcaaaatagcttcactgaagtttagcctagtgtcactgcagaagaaatataattaccagatgaacccttgaagctagacaggttcccgtcatggtcaagcttgagcgtcagttcttgtccatcaaaatcggggtcctgaaaaaccaacaaagtaatttgtcaacttacttaatagctggtgaaggtggctttaccagaaggtaatccaatttccactccctagaaactagtttttttattgcaaaacttgtagtaactagtttttgccatagggcagagaataaatactgtaagtgctttttttattatagggaagaaaaaaaaaagagaagttctcacattattcttaggccattgaatgagccaaagctcagttgaatcggtcccactaagatcgacaagtggatccttaacatcttgcagaaattcaggtgcaggaacgtaacattcttttaaatcagcagattcagaagccattcccttttgctccacaaaagtcagaagcttaattatacatgtaaaagaaaaaaaaaaacaatttagacgttttgtcaaacaatttgaataactgaatccagctgatttgttcaaagatgaaaatgtagattactatcaatcaaaacaagaaaaactctgattactatatatcaactaacaacgaaagaacaaaatcaaataaacagaagacaatgaaactagaaggaggaaaagaaaacttgaaagaattgaagtctgcattcatatatagataatgatatttcaaccattttctaataacaacgttcaagatttagaggagtaacatgttcaaatactaagagcaacacctgcacttacattgcaatgtttcaattcagataaagcacagagtatcatattattttctatctctcctctcaaaatttatcagcattagaaattcaaatgtaaaagaatcctaaagcaactactaataataataacaaatagcacaaaagccggatacaacaatcaaaagaatcccaaatataaaacataccaaaaatccaaaaaaaaagagctaaggcaatagaaaacaaacaccgaaattcacttcggactttattggggagcctcgattatggcagcggacgaaaattgtgataacaaacaactaacaacattaagaaagctacaaattaaaacataaaacatgaaaccatagtctataattccagtacagcaaaacaaacacaaaaacacagttattgaatcagagtaagaggaggatctctcagtgcttttttccaagatataatgcagtcaaaatatgcattacaataacaaagatgaaaatgaatacataagtaaactaatcaagtaattaaaaatgtcacccaaaaaaaaaatcaattgcacaaggaattgaagttaaaagcaatatgaaatagacataaaggacagtgtaccgtctcgtaataagaaaaaccttgtctttttttccattagtaccttttttaagctaaagaattcaaatattggttgaaggaaaacgatttccactcaaaaactacttgagatttttaaatttgagatcaaaataagcttaatatgctcaaaaacttcttgcaactaaataacccaagaagaaaataaaaagtatattggatgatatagacagttctgttttctgtatatgaaaatcgaagatgagaagcatgaaaatgctgacctgctggactgggcgtggtgcttgtagcggacaaccggagaaaggggagggaccgaggtgcgtgctgtcggcgccggcgtggtgttgtcgagagagaagaaggggagacgagagagagcgcgcggaatcggagaagcagtttagggttttagcttttatttttgaaatataaattaagtataaaaatgttaataaaaata

SEQ ID NO: 225596 - DNA, 4286 bp, Cannabis indica
taggagcatgtatgaattgactaagcttgttgacaataaaggctatatcgggtcgagtcaaggttagatattgtagggcccctaaggtactcttgtaaagtgtttgatcaggaaaaggatcaccaatggatagagagagtttgtgagcagaactagtagggcttggactaggctttgctccatccattttcaaccgactaagtaaagtggctatgtattttgattgagagagatacattccagcaggtgttcttacaacttcaatacccagaaagtagtgaagagagcctagatttttgacatcaaactccttgtttagatcatgaatgagggtagaaatttgatgagtattgggtcctgtaatcaagatatcatccacatacacaagcaatagaatttgagaatcacccgagcctgaaatgaagagtgagttgtcggatttagagcaggtaaatcctttgttgtacagtgtgagtttgagtttctcattccatgctctaggggcctgctttagaccataaagagccttgtttagcttacacatatgtgtaggatatttgggatccacaaatcctggaggctgaaccataaaaacatcttatttaagtgtgccatttaagaaggcatttgaaatatctaactgtgtaatcggccaggagtttgacacagcaagagttagcaatattctcacagtagctggcttcacaactggactgaaggtatctgtgtaatctattccaggtgtttgagagtacccttttgccactaatcttgatttcagcttgtcaaccgaaccatcagcctttaactttatccgatgtacccacttgttgcctacaatatgcatgtcagaagagtatggaacaagagtccatgtattatttttctttaaagcataattctcttactgcatagacttgtaccagagaggatcatgcaaagcttgctttaatgttgttggttcgtttggtaaaatggattcaggaagagggtgttgggtcgacagatatgctttgggtttatgaataccagatttagatctggtttgcataggatggttatttgtggtactggtggtgggtggcaaatctggtgtaaaaatggatggtactgtgggaatttctggtgtaatattggttgtgggaggtgctgaaatggtcatttctggtgtaatattggttgtgggaggtgctgaaatgggcatttctggtgtagtatttgttgtggagggtacggaagtgggtatatttgtggtggggcatagaggatgagttcgtgaatccatttcttgcatagaggagacagcaggggctatatcagtagcaaggcgtgaatcagagagatgaatggcaggtgtgttgtcctcagcagtaggcacacaagcgggtactatattagtaagagaaggagtaataaatgagccagtaggaacacaaattggcgtagaaaaatgtaccttactagctgtggccatttgatgagttgggaactcttcctcattaaaaataacattccttgctatgtaaaccttgccatcttggttttcacataagtaacccttgtgatttatagaataaccaacaaaaatgcacttttcagatcttaaagcaagtttgtgagtattgtaaggcctgatatgaggatagcaagcacatccaaaaggctttagaaaggagtaatcagggctgctatgaaataaacattcatatggagagacatctctaatgaccttagtaggcaatctgttgattaagtacacaacattttgaaaggcaagccaccaatatgacatgggtaaaccggcttgagcaagtaatgtgagccctgtttctgtgatgtggcgatgctttctttcagcacgaccatttgctcatggtcatggggacatggatgctggaaatggacaccatgttgagtaagaaaagatgctaaggatctatactcccctccccaatcggactggacagatttgataggtaaggcaaattgtttttcagcaaaagctttgaattggaggaaggtactataggcttgggattttagggataagggatagatccatgtgtacctgctataatcatcaatgaattgtatataatatctatgaccttctttagatggtgtatgagagggtccccacaagtcagtgtggaccaattcaaggggttgggaagctcttgaggtagagatagaatatgggagtttatggctctttcctcttttgcatgcctcacaaaattttaaatctttgagattaacagaaagatttaatgcagcaagtatcttggctagtatttggggggcaggatgtcctaacttagaatgccaaagatttatattcaatttttcagcaacataaagaactgaattatgaacaacttcagtaggaaaagtatcatttttaataatgtggaaatcattacatgaaggagctgttgtaacagcagtgttattacattgatctatagtggaagaaatagattctatgggattgacatctacagaagttgaaggcagagatgaagtttctgtcttggcttgagttgtggcaaggtggcattctaactggactcttgatgaagggaaggaactgtgagatagtgtgtataagccatttttaagcctccctttgagcaagactctccaggttactttgtccttgacaaaacaacattttgagtgaaattcaagaaaaacattattgtcctcagtaagtttagacacgctaattaggttctttgttatttgagggactttaatgacattattaagatgtaaagggttattagaggaagggagagaggaattaccaacatgacttatgggtaggcgtttaccatttccaacagcaagagtgtccgaacctgagtaaggtatttcggattcaaggtgatccattccttgagcaatatggtttgtggctcccgtgtcagcataccagtcgaaatcatccattaattcagggaggacagagctagagtacacttgagggtcatcatcttcatctatctcagcaagataggctcttggctcactgattttgggtgtaacaaagcctttatcgaaccggtaatggcagatggcagcagtatgtccagctttgtggcatacttgacaaagcaatcttggaatggaggggtgaccacggccaaaggatcgaccctgagatctgttgttggtagcagtaccacggccttgaggagcataagaacgataaccaggagtgtatcgagagagatttgctgtcatcttggatgaagaatcactcaaggtatagtgtctttcaagcctgctctcatgggttagcaacaaagattgaatagattctaaggacaaattatccacaagacttgtaacatgaaccacaacaggatcatattcgggtcccaaaccatttaaaagatgcattatcaaatcactatcatcaagagggtgaccagcagttgataaagaatcagcaagaatcttcactttgtcacaataatcagtaatggatagattacctttctgaattgtggataattgggacttgatttgaagtagtcgggccttggattgacttgcaaatcgttgttctagggcacgccaggcttcataggaggagttatattgagcagatgacccaagaattgtctcagtcattgaagatcgaagccagctgaggagtaattgatcttttctcttccaccgtgtactctggattgatgttgccattgacgagggttcgaacaggagcaactccggcgagaagaatttcgtcaaggccatgaccgatgacggtggggatgacttgcgccttccacgcaagataattggttcgatcgagtcgaacagtaagagaagaattcagagaattctggaaaggattccattggtgaactggtggagctgccgaaatcggagcagcagaagcaggggcggcagaagcaggggcggtggattcagggtgacgagaatccattaacaatgttgatcaaaggcttactgataccatgtaaaatgtgaactcatctatacaattctacaaggattctgtctaagagaagaatcacaagacttgtaaaagttaaccaagtcttggatgagagcagctttatatagagaggcatatagtttgttacagagtttgaaaaggaaacagcacagagaaaagaaaagataacagccaaacaagtggcagaaaaactgttacattagttaactaacagaaaaattaactaactattaacaaactctgaactgaggttaacacaaacatatatattgtttctctttgaaccttttca

SEQ ID NO: 225597 - DNA, 3799 bp, Cannabis indica
ttcttatatttattatataatgatgaacgctgaataatgttttagtctaaatactgactacgtgggagaatattacaatattttctaattatgaaataaaataaaggaattaatatttaaataaataaatagttttatattcatttgaatctacacaaaattaattacgtgatattctatatatggtcagattttgatatacccgaattgatttttcaattaattatcaaaatattctaattactaatgtggcgcagatactgatggagtatttcaactataaatatagagtctcggtccccgatctcttcactcattctgtgcaaacagtaaatttccatataaagagagttgagagagcgaggaagcccgaattctcatactgaagctatcgcaaggattgaagctaaacatcaatgggtagagttatttcgatctgtttattacatatacaacttcgatatatttatagtttatttcgcattagatatagtttattattattattattccgctaaaaataaacattgggtttatgccgcttacaaatttaaaattggagtacttatgacaccctttacccttattattattattattattattattattttacataaaaaagatctataatattacgccaccattttgaatttgtgaacagtattccgccaaatatggcatgcccgtgccgcatccctttctctctcttttttattttttcgttatttttctacttattcttgtacataaaataatttacattagtacttttttttaagtatttaacaataatgataataatttaccttttttaattagtattgtatcaaaccttacccttttcttctctaaaaaaacaaaagaaaccttactcgagaaagaaccaataattccactatacaaatgtaacacaccaatttaaacagttaatcaataaatgaaaacagtttaactgtcgtattgaattttaaaatgaaaaatgaaaatgctgcagatatcattttcacgaaggagaaaaaaaaagactaataatgaattagacatataattttaattttaatttagttggacttcaattgtgttatccactggcttacacaatattgaggttgagtcacattctcaagcttttgagtaagaaggatttttgtatggcaattatggtttccttttgagtgatattagtttcatttgtacaaatctctcttcatagtttatgtaagtccttttgacttgtttttgtcgttagataattatatttcattccaccccccaaaaaaaaacaacaataaagcccttagattagaacaaaagagcactaagaaaatcagaatcagaatcagtgtatactaaaactttgtgttaattgacacaaataataataataataaacaacaaaaaaaatcagttcaagagaggaaccgtacaaccttcccctactccaggatgtgcgtaaaaatcagagtccaaaccatcttcgatctcaccatcgtcaccacaatcgtacatagatccaaccagaacaagctgatcttccaaatacctctgcagaagccctactccttctccctcgcccggcccatacccgccgcagcatccctcctcgcatcgccggagccgatcatcctcctccaactcgtcggcaatcttcctccgattccggcggcggctgcagatgcggaggcagagttcggcggcacagaggaaggggaaactggcgcaaaggaaaggaagaaggatcggtgagcagagtaatagaaataggtagcggatcctacgactgtggagccaggaagagatagaagtggcggcggcagagacggaagctagcatgatcggcgacaataagagtatgtgagcggtcggatgagagagagatcgacggaggtcatcgctcggttggttatggtggtcttggatgattgatgatgatgagagctttggtttagaaagtctgtaaagaaagtagtgggcacatgagaaggggaattttataatatgaagaagaagaagagcatgtgattttccaactttttttctaattataatttttttaataatataatggcgggggacagagagtttgttgtgattttctttttgggtggaaaactctagtaggtgacttagatcatatcctaggtggattcattgattaatggtacaccattattattagagtaacaaattgactaaatgacttctcttcttttttcttttttgatactatttcacaaaaatgattattccaaaaatcaataaatcaattaaacaaataacttttttccccaataactactattatattatgtttttctaccactaaaatcaaactcaaagtgttgttaaggataagtggcacaatatttttctttttgcttatcttttctatttagatttttatgagtctgaccaaaggactattaaatttgttttatctgaacaagttttagttaatagtaggagggttaatagattgggaaatttttataattgcactaaattaggaaaagtttaacaaatatacgctcatttcaacttatcacttgaaacaacaaaaaaacaaagcagcaatgtaagagatgaaataacatgaaaataataaaaataaaatagaaaagaatcaattttaattcatacttatccacttgttcagaaagtacttcagcattgacaatagggaaaggtgcaacaggattcacagatgctggtaaaactactttctataacgtcatttctaaagtcttagctaataggcttaagttgatccttcccaagatcaattctccttttcagagtgcttttatttttaggagagttatttttgataatatctttttggctaatgagcttattcatgccattaacaatcgaagagtttgcaagagagggtgggcaactctaaagcttgatatgacgaaagcttttgatacagttgactcgcaacatagttataaactcgcaacaaagtcataaactcgcaacatagtcataaactcgcaatcctcgtttcaagaatacagttattgcatgagcacatgagatttcatcttgctggaattgattacattcacatgttttgtccagtaaattgacaaaagattttccctttttctagcacattcacttggtggagtattgttgtgactggtgtaacctgttattttaaacagaaaaaattaatttataaccggttattttatactactattgaatatttttaatatatactgtctatatatatatatatgtttagtgttttacctcatattttcttgcttgaataaagttgtctctgagtattttttctgtcactgttgaaacttttgtgaatgttccatgtgcttcattgtcgtttgtccaaacccatttttgtaccaaacttcgaagactctccatcattatagtgatgggcagtgttcttgtagcaagaattgctgaatttatcgactcagctatgttagatgtcatcattgtgtaccttctggtcgggcagtggcatctactccaatatttgtatcctattctttgaagataaggtctgattcttttgtctattttgtcaagttctgacatgtatccttcaaatgattttatgttgtatgttttagcggctttaacaaagtttattgtaagatcttccctatgtactccaaaattgaccttaatgttgttaagcaagtggagtatgcatgctccatagaatatgtttggctagactgttgctactgctttctctatacttttgtgctagtctgagatgattgtcgtgcctgcaagtcaatatttgtcaaat

SEQ ID NO: 225598 - DNA, 1719 bp, Cannabis indica
aataatcagaagaagaagaagagagtgtaccagctccttttgcgccagctccgtgaatgagggtaagaccaaccattaaagggttgtaacctgccttagagactccaaagccttccattaaggatatctcagtttcattcagactaaattccacaaagccattaacccatttggctaaaacaactacaaaagcaataccaacccacaaaagcttcatactaaccctcctctgtttcaaactctgccaccaagttttctaaaattattgtatttttcagcaccccaaaagtaaaaaggaacaaactttgaaataaccttggattgctagcttaagctgacagaaaatgcagaaacatatataggaagaaaaataaaaataaaaaaaattgttcaagaatccagctttagaggagctatatatagaatgaaaatatgaaacaaatctgagaaaaatggaaagaaagagagagaaagaaagaaaaaaaaacaagtctttttactctctctctctatttagcacagatgagtgtttgccgggtctttttaagattttatgacaagggtcaagtttagaatcttattatatcgttgtttttaagaaaaaaaaatatacatatatataatttacaaagatatacgagtctgtgtttgtcaaaaagaatcaaactaaagctacggccaaaaatggttagctgatctcacagacaatttctgaccgttagatttgattttggagtaagaataaagttattataaaacaaacgacattaattagtaaacggacatttgtgaaacgagagcggtgtagcactgaaaacataacagttcacaaagctgttgttaataataataaataaatagtatgtggtgaggtttatggttcttggggtggaacccataaacgagaggtttgtttacagctgttttttatttttatttttatttttttgaattttgtattagatgcaaactcgttttcgatttaattcatgagaacatgcatgtttgatattttctagatactaaagcagaacccattaaaagttcacacagtcccattaaatctttttattcttatttgaatatttggtttggtgtgtaataaataataatactaacaccacacagcttattaaaatacttccaaaaccaaatttttgtactaactctaaactgagattttgggtacgggagaaaccaccgttgttgccggttaccaactaaacttatatttcaaatttgatatttacacattaaggtcaaatggactacactttaatttttggaataacgtttaaatccatgcccaacacgtgtataggcaaaaaaaaaaacatacaatcaaattaaaatttagggtgttctaccattaaacgggatatgcatcttgttttgatatccaaaagaattttttagtctattttttttattatgatatcctacaaattttaaaaaattcgaaataatttacaatacagaaaataatgtccaaacagtctatttacacgagtaataaaataaaataagtcacgcgtgcaacatactatttgaacgcaatttttgacgtgttaaacatttccaaaattcttaaaattttgttgaatgtcttaaataactataattcacaggaccataaaaaaaaaatttgaacaaaaaattattcgaatataaacagatagaggatgtattggtgtatcttttaagggtaatgtattagaa

SEQ ID NO: 225599 - DNA, 5426 bp, Cannabis indica
atctcgctggaactagcaatagtgcccaaaaaggtatataaaccaagtaagaaatcaagagttaatatatatatataaattgaataaagaaatagtttagcacaaaatactaatattaagtaggctaataaggattttttcccccgaactttaacatgtaccaaattatgccccctgaacttttacggtcgttaaaaatgccccctgaattattgagattattgaatttaaggacttttgtccaattttagtaaaaaaattctaacatggatgaaagttcaagagacatgatttagtacctattaaagttcgacggacatgatttggtagatatcaaagtctggggagcatagtttagtatataaacaatcactgaaatagtaaaattgaatgacattagacaaaagtccttaaatctaacaatctcaatagttcaggaagaatttttaacgactaaaaaatttaggagcataatttagtacatatcaaagtttgggttgaaaaaaaattcaaattagcctactcagtattacctagttttgatattcatgttgaccatgaatattggtacaaattctaatatgtaactataataatatagtatatatgcagtcgatccttttcaagacactactgttggtccatttagatatttttaatatcacgtacggaatatattttctaattaaatgaacccatacctccattctccaaaaagaaaagaaaaaaaaacccataaccttctcacatcataccatagaagataaaaagatgagaagcttatatctatatatttttataatttttatgtatatatattattccatatatattatgatgatagttgtaaagctttagataagattctttttgctatcaattccatataaatatataagtttttataatggggcaataatctgtaagagtattaatgtttttggccaaaagaattttaattcaaaacaacttatttcatgagcctataaattcaaccctaattttgaccttcgtttgggtttgggatcggatccgagatttgagattgggttcgggatcagatccgagatttgagattgggttcgagtttcggtccggagtttgggactaggtcggggtcagggtctggtccgagtctagggccgaattcaggtttgggtcaagatccagggctggggctgcattcgaggtccggggccggattatttcggttcgggtcctagttcagaaatggagtcggggtctccaatcccgaaccctttataaatattataatacaaagctaataagaatcatttattcatattgtattaaaatttatggtcgtaataatcattaaaacaatacaatattttattcaaaataatacgattcttatatagcgtactaaaagagcccataatgtactactttaatggtatttacggtgcactttctaaaactaggagtatctatgcaactttttcgtgtttctgatatttgatttataatcttaattttttatatgatgtgtatattatagttatttaatatatatatatatatatatatatcttgtaaagttttaaaaaaattcataaaatgtgcaataagaaattaggatttaaactgtctatttcacacgggtataaaataaaagagacacatgtataatatactgtttgaacattatcttcaacgcgttaaattattctaaattcctttaaaaaattataaaatttcttaaataactataatgtatgcattttcatattaaaaaattaaaattaaaattattttaacctggaaaacaagaaaaaaaacatatactagatatgtaccttaatatcgattaaggaaggtagcggagagttgataacaacagcatgaacaggaatttttttttttttttctttttgagaatgtgaagtggattttgttcgttatatattatttatattcttttaatgtgctaaaaaatataaataatatataatgaacaaataaataatcaagaaacggatataataagcatatacttttgtaagttatttctctaggaattattagacgttcaataatcaaattaaggtagtgttataaattggtgttccatttatattttttttatgtttttttatatataaatcatgtcctgttaataatttcgaggaattaatccaacacgattagtacgctcagtatttttatgttgcactcagatttgtattgtcttttacgtagacatacatttttttagccatatcaagcccttttcatatttggagtcaaattcatgttttacttttctacatttttttacaattaatgtgctagttactagctatatgtatttttttatattatttttcaactatgttttataaacaattgtgttaaaaaattattaaaatttaaaaacttacttataaattcttaaaatttaattagttacaccttacaaataaatcaatatataattataatattcactattatatttaagttttattattattttacttatttataattgacaaacatacattttttttattattataattattacaataatgtgtaatgtaataacgtgttgtgtcgatactttttgtgtgtaatgtcttttaaattagtctattcgtgcttatatattgtgttatgttgtgtcaaatatttataccatcgtgttatgatgcgctcaagtctataattttttcatgtcatattcgtgtcatgtcataaaaaccccactttatatttacaattagaaattacttatactgttgttattttgagtgtgtgagaggagagttagttagctggacatgtgagctaaactaacttatttaaatacatgatttctcttgtattatgtaacaattataagagagaaaagaagtaagttatagagaaagaaagacagagagatagagagtccaagaacagaagaagataaaagatgaactatggtgtaatatttcgataagcttaataataaataattaggatttatatttatattatgggttaattaggtaataagtgagattatgatcctactaatctattttagcataaaatttaaattttgctataagtgagtaaaaagcataatttataaattacggagatttatatagtatgtgagaatgtaatatgagttatatgtagaattaaaatatttttaggtttggcgatcctgaagaattgataagtggataaataagcgtaatttgttaattacagagatttatttgaagtacgtggatacaataaaataaaaatatttttaggtttgatgactttagagatccgattggaggctaaaaatgtcataacaattttaattaaaaatgttaatgcgattattgagatcagtaaacataaacgaaacgaatgaacaaaattcttcttctccgtcttttgacaaaaccttctccttttatatttatttttttgtaattttcaaccaaaacctagcaatctaagctccggtagtagcaggatagcaaatctttgaagagtaaaagcttaaggtatggtttatttaattcgttttaagtttaaaaacaataggttttgtatagaagtttcatgaattagaatagttatggagattctgacttcgtagaattgttctttggtagctatgagattagtatcgatgtttacttattgaatttgaggtgattttgagttagaaatggagtttgtaactttttaaagcttagtccgaacgttaatggtatttttcacttaagggctcgattttaatttctgttctagatgcccttgcctgaaggctagcatggagatggggtcttcctcagtggaagattgacaatcaccggctgactagccgttgcaggacccggaggagggggaggtagtgaagaccctgtagcatcactaggtcgggtggtctaggccaccttggccctaggacgacctaaagctctaccagagggctttctagcaagatctctcagcctagaagccatatctgcaaaaaaaaaaaagtaacaaagttagagtacatgttactaatattcaatacaagaaaaaagtagaaaggttggtgctatcaactatcaactaccaccatcctcggaagaggagtcatctgaactactagtagccgccttgcccttacctctaaacgtaggcaaggggtgagcagacctagcagaaccctggcctctaggcctaatgaaaaaagtggcatcatcaataatgcctccgtgagccaagtgttggtagaaggctttttctcttctctccaagttctttgcaattctagagagggggatatcgtcatccatgtgaagagtacgtccacctcttaggcaagcctcctcagctgctggggatccgtctggacctcttgatgggccctcaacccccacaatgccagactttgggggatatagaccatatctctgaaagttagctagacaggctggcctcaatatatcctcctatcaatcgggagggacaaaatatgattagctctatcctgcatctagagggtggggatggaacgtttatagcttggcactttttgaaagtggtgatgaggaacttgctggatttcccaagcaataaaatagttcttggcatatcctcataccttcgataagggcgcgatgttagtatctcccagccattgataaccgatctagctaaagtagaagtatcttgtctggttctgtttcaagatagactttaactcaaagaagtaccttatctcataaggggaaggctgaggccagcctaactcgacgtagagaatcaacatagctgaaaggtactttatacatttcgaggtgatttaagacgtgcacactctgaagtatgcggtgatgtctctaaagtaggagcagtactgctccctgctctatgtggcgctctgactatgacatccagctgagggccaactgatgctctcgttggtcccttaatggctggtcacactggacatctcccactactccactctccttgatcttgtcaagtgtcttggtgctgatagtgtatggaggagagatccaccgatcccgctgctccccctgatcaagaacctgaggctcgcagcctcccttaaaacatggtccactccaacctctgaaggctaaccaagcctattcaatggatgaacaccctcatcgtacgagactagagtgttatagaggaaaatagaacatgtcttgtactgtctcttcttgacaggtacaatctcctcaacctcaaactcactatctaagctctccgcatcctggtcagccacaggcgcatctgcctggccaacctttggctctctaccatctagaggttgtgcagcctcctaaactatactggctctacctctgtttgccagcctagcaatgtgagggtcgtaaggatgtgccctggagcatgtctgtttgatccttgccataatggac

SEQ ID NO: 225600 - DNA, 4088 bp, Cannabis indica
aatgacatcaagtccaccaaattaccacacataaaattagatagatgtataaaataacatagttaatgttcatatgttaatttggcataaagttcaccaaattgcaacaaaatgcttaaaacaagaatccctaactattggcattagctgagatcccagcatcagtatccctttgcctttgcttcatcaacctcgccttgttttcttagttgcatcagttgggttggcagatggtggtctcccccttttcttttgttgagcagactgtaaaaataaataataagttagtactatattaaactaaacacgaattgactagaagtgttgatgtatcacttagttttatatttctaagcataattaattaggtaataataatagaaaagtacaagtctgcaatattttcttatcagtatgttagctttgacaagttaatacaagacaaagactgtagtgacttcatacactacactaatatatttatccaaatacaaccctttacttaagaaacttacttagaagtcaaaaacgaattataaagtaattttaatcctaaaattgttcaatttacatgtgatccctatccttgcatataaatatacagtttttccactttcctactttgcatttttgcaactcttttaaccgtggcaagcatttcataaaatgcttactgtaaaattttcacgtgaatcatatataacccttttcaactattaatttggtcaaacttataaaaattaggataaacccctttttaaaatttaatatataaccttgcacttacttagtttcagctttattctgagctggtatgaaaagaaatacaataaggaacctcactagtggtgtcaataactaagctagatgaaacgatgtctctaattatttcttctttataaccttttaattgatactgtcacatataggtctttttatcatagtgtttgactctaaaatctattggattataacaagttggaacaaagaattttataaattatcagttactaaaaaaaataacagcaaactcttccttagaatctttctaataatagacaatttatagttagagaattgttaattcataagcaatcaaaattgaggtccatactctaagctaaaaaagtagcaattagtaaacctttacagtctacaccattcatttaaactaaaacttaaggttgttaaaagtcattaattagcacaaatggcaaaaactaatctgtggagttggatctttttaacacttttttgcattgtgcccacgaacgccgcacctactacatttgtgaaattgtccaaatcttttgatatttgttgcatttgctagtgatggttcatcaacatctctcttctcttcttttttggtcttcctagtagatttgtctcagctggtgcttgaattggactgagaccagatcctggccaaaactttggacctggaattgggtgtatgaaatcttcgtaggccttctccatcacccctttcttgtaaaagtgtgagacataatctttcacttgatgccctaattgccatatggttctaatgcatgaccacaaggtatcccactcagctggtaccttttgtagctgaaggttatataaattaagtccactgcataactaactgtactaggacagtccacttggaaatttacttctgttgacagtattactagacaatttgaagcaattttcttattttgctcaatgttcttccatatgtttctcccatattcctctctcaacttcttcacactctctcttttattttgaaacctacacatgatccaatatcttaacttctccaaaagggttactattggcttgtctctagcatcaagtactgcattgttgaaagattcacaaacgttattcaagaggacatcacacttgacgccttttgagaaataggcctttctccactctgttggcggccttgcaactaaccaattgtatgcaccctgattaacttctttgatttctgccattttcctctaaaactatagtatagtggctgctcttgtagctgcccccaacatctacttcatcaacaaaccaggatggtccttcttaaaatttgaattaaggtgcttcacaaaaatgccttagagtagaatttgtggaaaccctccccatagcattctccaaatcgttctgcttgtcactagtaagtgtgcacaaatctgtcctttcactttctagatcttggtttaggagttcacaaaaccaagtccatgaattacttgtttccttctcacaaataacataggcaattgggtagatggcattctcaggatgtatcccaacagaaaccagcaacaaatccttgcaatatcctttcaagaaattaccatccaaacaaattagaggcctacaccatttttgaacccatccttgtaagttttgaagcaaatatacacccttttaaacatccttttatcaccttctagcttagtctagatcttagtagtactacaaggattagttactagtatttacttgcaatagtcatccaaaatagcatactggtgagccacagatcctttcaacatctctggggcaatgttcttagccctgtaaaaagtccatttgctaaccctagaagatttagtgtttgacaccatctccttgaaggctgagaagtgcaaatttgggtttaatctgaagctctccaagaaatgtttggcaaagaactttgaatttgcaagcctattgtctctgaattaactataggtgtaaaaattagccacttacacccattcactttacatgtggccctcacccttcctttaccattactaatgtacttgaagtccttgttatttgcaataaagtattctctaagggcctttcaaaaaacttcaatagtagcaagaatcgtccctttcttcaactcaaaagtggtcttgtcccattgttgattatactcatgtcttgcatttttcctaacctcaccttcctcatcatcactttctaaactttgcaagtcatccttactttcaaccccatctccttcacactcattaccctgaccaccttgattgcaaacattagtgacacttgaccattgctaggattcgttggtttcgctatattcctctcagcttgtacatcttgctctatattcctcatgaaattcaaagtcttcttcattattgtcctgttgtgtcccaactctagtttggtgttgtgatgttgttgggtcaattacaaagagttaagatggtatttggtcaacaatattgggatggtttggtgattggtcatttgtagttggttggtttagtattgttaggtcaattatagtgggatggtctggtgtttggtcaaatgtagtgggttcaggtggtattgggtcaattgtattgggtttgtttggtgtgggatcaattatagtgggctggatttgtgttgggtcaaatgtattggactcataaagcattgtgtcatttatggtaggttgctgcaattttggctcgtctgtagtggtttgggtatattattgggtcttcatcttctctacctggttgagtatcaacttaaggagtgtcttcctctgcatcttgaatctcagggcccattctagtccttgaccttcaaagatgacatagtaattagtacaataacaatcgaattctaaatcaaatagttcctctcctaatttttctaggtcatcctcatcatcctcatcatctgattcttcagaggagctacttatttcaaccacctcaatttgtttacttggagtgtctcttgttaggttttgtgccctaaataaaacccatttcaatataatcagatttactaattaataaagaccagaaatcgtattttatgttgcatggttcacatgatttatttcatgattatatttaataaataaattatattaagtccagaacatatagttattcacaataacagtgatgtcaacacagtggattgtgattgtgattatatgcttcaaaagataatgtccctgattcatcagtgcactagatttacactcatgtgataatcagcgataaagtatacttataccttggataagtgttatgttctttccagaacattggcaaagt

SEQ ID NO: 225601 - DNA, 2007 bp, Cannabis indica
ttattttaaaattttaaatttttactaatagttatgatatataattatatcataaatgatttattttagattattaatgtaagttatataaaatgcgagatttattaagtaaatatatttatttaataaaatatttggtatgaattattagaattgttgcacaaaatataaaagattttacactaaattggtatagattttacaccaaattaagtgtaaataagtgtaaattctatactaaattggtgtaattattggaattgatctccgatagtaatgtttgtattaattaagtacaaatttaatttcacccaatgaaatttataatgaaagtatgttattaaaaaatgaattggaatgggatagagtgaagaaaataatattttttcttatatgtaattttttggtataaaatcagtgttaaatttagcttaaaaaataagttaatataatatttgatttaaattttataattgtactttaatacattaggggtaaaaagttattaatatttattgtggtgtaaaatttaatccatattttatactatattttatgtcaaatttaacataatttttactttgtgttaaatttaaaccacattatatacaattattagaggtaagtattataaatattggctgagaaatgcatatacaagtgaactatacgaacacttatttacatctaactagtcatgtaatggccacttattttttatttgttttttattggagagaagtaataagtgagttggtagatatacatacatcatactcaaaatgttctttccccaaattctttttatttatttattgagagattcctaaatttgattttggatgtttgttacttttaatatgtgtatgagtagaaatgcaatattcccttgtttctgaggttaaataattgacataatatgtcggagtataatccacttgtactccactccttatattcattcattgttcctaaaatatctattactattattataaaggaactcaaacaaatcacacaaggaaagacaagtctattcatatttcatagggcaaaggccccattctaaatagcaaataatgctttagtattcaaactatacttggcaacacaatatgagcaagaaggttctctacactaaaaacaaaaattaatgactcaaattacaacaagtagactcaatatcacctaaaatactaatccacatctctaatctctattatgttttgagttaatctctattcaccctcttcaacttggataagccaattttaatggctaatagaggaaagaggcagttggaagaacaccctttttgtaaaatatatatatatatcttattcctttcaatattctaattatatatataaacaacaaatatatattttggtaataatataaatgtttaaaattcttgtccaatttagttaatcaagaagagcgtgtgaagattttacagaaaatatactttttttttatggaatcttaagaaaatatttactttaacatcttttttattattttttcagtaactaccacaagattagtccggaaaaaaattaaatgttaatcaaattatattttgtcgactattaattttataaattttattaaacatgtacaattttaatacatattgggcttgtttggtaggtcgtataatgatcaggttcgaatccagactcatacacaaacctcgacccaaatccaaaccgagacccgaatcctgactcggacccggactcagacccaaactccaactcagaacaggactcgaacctgacttgacccaaaccggttcaggggttcaaggttgggtcgagagtcgagattgggtcgagtttatgacaaatattgtgtaactttaaacaatttattaatacaagtcaatataaaatatagtcttgtattaaataatactaatacaatacaatataatctaatacaatattatacaatacagtacaatacggtataccaaacaagctccaggccgaaatcacccta

SEQ ID NO: 225602 - DNA, 2092 bp, Cannabis indica
gttccatctcaaaaccaattggctatgagtggagtagctcatgttcttatatatggctcaattctctaccatttattccatgtgggacattgtccacaatacgagcataacccgatacaaaaaattataggtttaggcgacacaatatgataataaaattagcatagcatgacacaaaaaaaaaataagcttaaacatgaaacaacaagctcgaaacacaatacttaattaaacaggaatagactaacctaaaaacacaacaaataaaaatttcttataataataataatacatatatatatttattaataaatatttatatattttagtcatttttattaattatttatataattatgtgtaaaatattattaaaaaattatataaaacaattaatcttataaaaaaaatacatatgattaaactcttttaaaaaaaaaattaagaaacaacaaaataaattaataaatatatagcaaatttatgacctaaaatatttcaattgttgacactactgcattgatagaccactcccacacaacacaatctaagtccgaaaagatctaatacaagagtccgcgctttggattcaaacagagctacactcaggggcggacgtacatgtatatgtactgtggccttggccacccccaagataaattcatggctccgcccctggctacactatcgtcgactttgcaaaaatccacatcactattccgaatttgccaacaccactcctaattcgaagcacaaaacctcgaaaagactataaaatctttaatagagtgacacaaagatcccacaaacagttgaaacaaaaaaagaagagaagaaagtcatggcaagccgagaaaggattaagaggcttttgtgcacacaaacacagccaaagtctaaggatgattagattggggggaaaattaaaagaattccccattataatacaaacttactacgtatgtattattatttatttgtcaatttggggtataaatttcataattgttgggttcaaatgtagatctcattttcagttcctttgtatgattattattttgaacaacagctcctttgtattattgaccattgatacattcatatataatgtgaaaatttatacattatatatatgttattgattattggcagtatttaagtttaggcattttttttttttgctttaatgattattttttaaattttaactgttgaactaattaagtagatgaacatagtttaatctcataatacttataatctttggcattaatttttagctaaggtggaatttttatatcattaaatattgcatcgtaaataccggttaataatatttaagttattattcacacgtcactttcttattagtgtatttaaattttttaaataaaaaataaaaatttaatgacctgaatcaaccagagactatcacgtgattattgactcacttaatcggcaggtgcttacgaaagttctagaaacataactttaagtattattatcgtcaaaatttaaatttatgaattcatctacaatcaagagttaaacttagatatttataccgtaaattactcttaaaagttttacatatgcaaaactaattaagggaattgggatctacaaaatgtatacgtatatgtccaaagattagactattagtgtttaattaattagcatagatttgagtacttggtataaatgaattcatgcattacatacaaatttctttaattaaggctactgaatttaatcataattaagaattaattaatcaagaaaagtagatgtgaagactgatttcactttctttttttttctctgtcttgtcttctttttattttcctttttggtgtaattttttcacgcgtcaattttcgtcaatcatacatatgatatatgtaataataaaaaaacatacatataatatattgtggctagaaaaatttacaattgcaatcattatgggctttgtgtttatttagtagaggtatattgagaaataccttttttatttatcaattaaccaaaactacctctaattttatatttaattgaaacatacttctttttatatgtattgtacccaaaa

SEQ ID NO: 225603 - DNA, 2324 bp, Cannabis indica
aaaaaaaaaaaaacaattaatagaaaactgaaagtgcatgtgttacaattgatttggtctatattatttagtgacaaatgacaattcagtaatattcatttaaaacataactcaaattgccctaaataaaaaaataaattgataatatacatcctcttttgtaaattgtaagtgcctccataacttaacatctctatttttggcctatttagataggatacattcatttaacccactttttaaataaggtaaaaaagtaggaaacgaaaaagaaaaggtgaaaaaacaaaacatttcttcattaaaaaaagaaaaagaaaagaacagaatgatataagacattggcaaaagaagttcctcacacgcgacacttactcattacgtgttggggggcttaagattaagaatagactaaaataaaaaaggaaaagaagaaggaaaatgaaaatgttggtttgttccctcaaagattttccctttcaccaaacacaaaaaggaaaatcttctctctatagtctctactgtgttcggtagacaacatgaaacttagtacgtacccttttctttctttacatatatacacctcttttgctctctatgctacccacccaaccaccactctcaccttcaaagcgcgtgtgataaatatggtagcaaaaaccaaacatatattatcaaatattcttccctaaataagtccctttcaccttacaaaaataaataagtccctttcattttgtggcccattgataataacaataatatttcttttttttcatatgtggggctatcttgggcattaaattttgtatttaagtttaggattgaaattcaaatttggttggttttgtttttgcaacttatggttttagattgggatgaggtcaatgctcttgaatattgttgatgctattgtttcatataatcaagaaaaatcaatatggaaaaggaatatagtaaatgcatatgaaaggcatgtatcatcaattcatataaatatatataaataaatataatttattttaaatcttaatccctcactataaaaatatatataatataaaatagtactcataattgacctttgatgttctaccattttttttctatgcatgatgcatgcaagcaaaccttctttttggacatatcaataataatgatataaataattatatatttatgttttcaaataatcattcaatcatattttatgaggaaattatatgagtatatagaaaacattgatatcaaatatttattatcaacaataatttgcaatatttcttagaaataaagactcacattacaaggggtccatcttgttctgaatctaaccatacaaatttataattatgaataataaaaaaagtctgaagcacatatgtcatctctcatatatatctctaaaactaaataaataaatatgtcataattaatatatcttataaaatataataacaacttccctagatccacacctaagtccaatgcatctagcaataaaataaatataacacaaaaccaaatgaaattcaaataaatctcttataatccttaattattctactaaattcaaaaatacaaatggattatatcattttatacccataaattttagctaaacataagataacttcataatttttaaaacgcgtcagaaataatctgagactaatttttgtccatttatttttttataaagcttttattaaaatctcaaactatgctttaaatgaattataacttcttgtgcgaaacaaaaacaacttacgatttagtataccaaaccaataaatatgcaacacaatcaaaaaacaataaattaagagatctcagaatttaagtaatgaattaagcagtaaaacaaaaaagaataaaactacgtttaacgagtttcagccatgtgcaatgatcaccatttcggtcagaacaacaacaatcgtatctttattgatatcaatatttatgtaaagtccttttttaacaagttagatggcaaaatattttttcttttatagtaagatatttttgcattcatacccgatggtattaccttgtatattcagttttaattgctcttttctatattaggaaagatgcattttacagctgatcttttcttgtatggaaacttcttgtaagagaagcaattctcttatggaaagttagttcttaaaggaaactttgatacttatcactttccttgttaagtttgattttgtcttgattatatcagatcatatttgctgtttatagcaggtatcaagacccaatagaagatcagacccgattatagcaagttttctttttctggtatgatttgc

SEQ ID NO: 225604 - DNA, 3809 bp, Cannabis indica
ctctctctctctctctccttttattgtgtagatgactgcccaaacagcagttcttgagaaagcgacgacagaggaagaaggatcttggagcttggaggttagggatagaggacgacgaagacaaagaaagagaaaaataagagtggaatgggggttctcggacttggagatttctggtcttaggtaaccgaggtggggttttagctagccgggaggcaatttgtggcttttgtttggctcactgacatcgagcaatgaccattcatggtcgccgtagttactggttgagatctcctacctccattttttttttcaaatttattgatttttattatttttaaaaaagattttttatattgtttaaatagtttagatcatttggaccattaaatacatgtcacgtgcaaataagtgtaaaaatggcagtcttagttggcagttaacgtacaataaaatttaactgatatttcaaatgtgcaaataaaagtaaacttaaggtaatttacattagagaatttaaccacaaatttcttattgcacactatccaaacatgataaacaagagcaagcaacacaaataataaggtacacctctctgaaaggggatagtcctttgccacggcccaataaaaatgatacatttagttacaaaatatttatggtttttttttcttgggagagagaattcgaatttaagaccttaactttgtaacaaaaaatctatattatattatgattaaaagttatcattaggaaaatgatctatatcataaaaatctatcatgatattgtatcacgatgatatgtaaatttataattattattttattaatttatgttttaatattttaggtgttaatattgccacattattcaagatactaatttatgataatttatcaaaatgtatatagtattgctcttatcagtaaagatagtgttattttttttttgaggaaagcataattttataatcaaaccaaattaactgttataagaacactaataaatctaaaacaagtattagtccaaatattaactcctatcgatctagtaacaaatttttggtagtacttacgtaggccacactatttgcattctcgcaaaataacataacacgtaccaccaccaacaaaagctaaaaaaaaaaacaatctcaacaataatttgttacctttacattatagtttagacaattcatactcaaaaatttcatgataatattttttttattataattattattgggaggtgccatattggcttgttgttgctcgtactcacaactactctttttcttttttgaaaaatttatttatttatttatttcaaaaaaatagtatccaatattattaaaagtgtactttcatcactatctataaactatcatgaatgataatttaaacccaatccatttattaattgtatcaaaaatcaaaactaaaactcaaatccaacccttttatgtaaatgggttcacctaatgcgatctgcgtgctactaattaactcgtttatataaagaattatgcttaattttaattaacttatcaactcatattaatatgtttataacaaagtttaacaagtttacaatttttttttttttaaatggaacatgtttacaaccttataatgacacatttatgaacgtaatttaacatgtttatcatatttatctaaacaaatttaatttacatttatagatatataatatatttgtgtatactttacataggttattatcgtattatttttggattaaacgtgtcaacttgaaaatgaatcatttaataaacggattagtcgtattagcccgaaaataacctaaacctatttatttcgtgtagattttgagtcgtattatcgtgacctaaattaccactcataccaacaggtactcctaattgttaattaagaaattaaatcatgcatacaaattattttgataaagatattatgctgatattttaattcttagctaggatctgatctataatagcatgtatagaaccgtttttataaatatattttttgagttacacgtagggacgcacacgagtaggcttaaggtgggctaggtcgatacttagggtccacccaaactcagggcctaaaaactcaacagacatatatattacccttgtattttttttttaaaaattttttaaaaaaattataagaatttaggcccaatccaagtggcccaataccctatttatttagaaaaaattatattgtatagtcactttttattttttattttagtttttacctttattttattattcttaaatttatatccagttttttaggtcttattcccattatgtgcatactctaattttggtaaattatatgaggttatatttggtactttgattataaaagaaggtatttatcaatttaatttttttttttggagttagatttgattaatgtgtaatataaaaaggtagttttcaacttatctcatttatttaccaaacttaaagcttcagccaaaaaaaattgaagaaattgcattgtatacccactttatttcatttgttttaaattttaccttcatttctatattcttttacccatttttatagatgatgtctccattatacctcttaggttaatgtaaatcatgtgctacacttaagtggagggcgatggtatattaggcaacccactcacaaaagtggatagatttttataaaatatagggtaaatagtggcataagtacctaaagttttaagtttgtaagtggcataatcccaatgtttatttttagcggcataagtacccaatgtttgtgaaactgtaatttttctctaatttcgtcattacaagctctattatttttttaaacaggccacatgtaaggtccaaattttttatcattgggtctagagagaaacatgtagtatcagttactttcaaaagttcttttaataaattcaaaacggagtctgtagtgacaaaattggaggaaaattacagttttacaaacattaggtacttatgcccctaaaaataaacattgggtttatgccacttacaaacttaaaactttgggtacttatgccgactatttaccctaaaatataatattaagggaatttttaattaatgaaatacaaaaaaaaaaaaaatatttactcaacttatctcaaaaaaattacactaaaaaaaatacatataaaagggccaatttttttaaaaaatttattaaagtatgggcacatttctttccagggctggccttggacacggggcgagaaatttgatgagttaatcgggtctccatcggggcagggagtgtgatctctatccccgtcccatttaacattcggagacgaaaaacaattcctgctcctaccctgtttcttatttagacggaaaatcaccaccccattaaggacggatccctgcagggtccatctccatgaaaaaaatgtgcacccctaattacgctcttgagattagatccatgaatacaaaatggcctctgaaaaattctagactgataaatataccgatcgattaaattcctgacaataaaaaaatatcaataaataatatgcagttacatatgctgtagtagttagctatatagtatatattaattaattctttattttccaaagtgaagaaatatgacacttttaaattaattaaacatgtattatattataagtagctatagtattctatgatttatatataactatatattaatcttttggcttttattgaactgagagattacaaaataatcaacttggtcttttgtttttttttattaattaattattgta

SEQ ID NO: 225605 - DNA, 1702 bp, Cannabis indica
aagaaaaagaagattgaagaaaaaaatgacagcgattacagatacagaacatgattaagctggaaaaacaacaacaacaaaattagacactaaaccagataaatatctcaacaaaataacttggatgattactagtcttccaactattttcaatttccgttacatgaaaaatcgaaacttacctatatggtggaacgaagaagcttctttggctgataattttcgaaccacagagagaaatttcaaatagccaaaggaaaagaaaaaaagaaaaacagagagagagaaaatattggagtatgaaatggtggagttacacctttacattaattttctcataaaaagttgctaatttaattattaatttatatttatttatttatttatttatgcggtgatacttggaccagactggagctgtccctcacaagatctggacttagtgggcctgaccgtaaatgtatgagcccattccatggaacgtactacggtgtaagcaaacactttttttaggaatttcaacacagttgctacttagtcactaacgttcttccacgtgtcagtaaataaatccaacggcctcgatccggtcctaccaaataattatttatacattttcatttgaaccaatataatttgttgttttctttttttcgaaagcaatataatttgttgttattattattatttttttttggacaatttcaatgtaaatatctttatatttggcattaaaaaaatctataagtgatatgtttggtataatttatttaatatatatgtgaggtatacatagatataaattttgatacctctattataatttatgttttgttatatgagaatgtatattataggagtatgtttaatagatatataaataagtggtaaaaagttaaaatatagtttatttaataaaaaaatatgctctaatagtatatcaaaaaataatataaatttagcccatagtaaattttgcaccaaatttgacacaatattttttatgatataaaatttacattataataaactactacttttttatttatatttatgacacttgtattattttattagtatatttaactatagtaataacttataaaaaatttatatatatattttttaatatcttacatattgaagtaataataaaattgataataaagttattagttttttatttttattaataaaaacagtaattaggtaataaagtttacattaaaattttataattgtacattagagtacaatgataaaatttaatataaatctaccacaaaactattttttgtgacaaatgtaacacaatttttacatctatcattagggatgatttaagacatcttgttgtttatattttttgttgctcaattagttggacccactttattaactttaaatttttaagccaattagaatttattttgttttcttttaatagaactagtaagagcactagtgatgatcataattttttctcactcttttctcttctatgtcacatcatctagggtagcccattatattttttgacaacacatgggcaacgcccacgggaggtgctctaattatagcatgtatccgcctgttttttttttaactttaaaaaataaaaaaaaaaaattaataagtgtcaaaaataaaattaattaaatagctaagtcgcatacgtgttagtatttttaatttattttta

SEQ ID NO: 225606 - DNA, 1620 bp, Cannabis indica
tagtataattttataaaatttagaagacttgcaaataaatctatatatcaaatttatgtaaaacactctttactatttttcgtcataaaaattgaacattgctattgggcaccagtggtgactagcaccttctaaatgtgtcgacttgcaattggctagcgatactctataaaaattattatattaaactatatgggacccgatacttaattgcaccaatagcgatattgacacgtaggagggtactagcaccagtggtgccctttagcatttcttataattctccaaatttcaataaagatctttcacatcaacaagaaaaatccttgattagagattatagaggagagttgggagagaataatataaatcatttacttattcgacagaactgttcgaacaacgaagcatatatcgcgcatgcacgtcacatttattccttcccatataaatctttaatggttctgtgcaacggcatgcattattaatattgatgatcattaaggaagagaataatattgactctaaatcagatttctatacaaacatttatgtgttaaaagaaactcttcccattaattaaatataaataataataataataataataaaaaacttacttttattctcgtcaatcgatatcggcggcagccgagccaccttaactcctcccttcacaggccataaagaaaagagataattaatttgaatccaaacatgcatttgctgttatctctcattctctttggaacttggagcttcgataatctttcacactccaatataaatatttatacttatatctgtaaaaagagtggaaattaataactaaaatctatgagttacatataacattgcattgtatatacacaaatcacaacaacaaaacttattataacggactccttctgttgcggaacaaaaacttgagtcatgagtaattttcttatgaatagaacataggtaaatataatgagaaaaatttaattttagagctgaatatttttttagggtataaaagattcgaagttggtgttgggaaacagtatagaggaattcaacgcgtggatgagtgttgattgtgaagtcagagccatgacctatataaagccaattgtaaaatataagattactcgtggaagatgatggtgtgctcccaatacataattaattacccaatttttaatttctgtttttgttttttgtttttattcttttcgatcattgaaatcatcgttcttttggcgacaaatatttattttgaaattatattaatatatatatatgtaacaatgttatgtataactaagagtcacgggttcgtacgtaatgttttatataaagatatataattatgtacatatatcgttcttagttggttcacttcacattttccttcacgtcaaatgcatcctaacctccacctctcatcattctcagataaagaatctcacattattaatttgtactcatgttcaatagtatatatatgtgaattgttaattttttttttaattattatatgtataaatttatgattatataaattaaaaatgaggtgatttgtaactttttttcaaaatataaattttttaacttcttaattttttttttttaaaa

SEQ ID NO: 225607 - DNA, 2083 bp, Cannabis indica
  modified_base (1380)..(1380): a, c, t, g, unknown or other
ctcgtctccgttcgagtacacgtcagcaacattgttgcaaaatttgtttgagtgtgaaactacagctactactactacttgtacagcaacagcaacaaatcaattggcagcacacgaacaatcttttggaaatagcaatattaaccgattatcagtgaacatcactaacagtaattatgctaacaataataatatttggccaagattctctcccttaatcctaagctctcgtccttcggcgccgattccttctccttcagaagcttctggcttgcacttctccaacaatacacccttttggaatgcctcttctttgcctgctactgctgctccaaacgacggcgtttttccaaattctacacaacaatcccaggcccaggcacagcagctacgatacgttacaccaaagtttgaggaaaagaaccataaatgtaacaattatgtcacaaataataaggtattatatgaatcatttatatatagcattaataattatattagattgatatatatagaggagttatgtatattattatcaattgatatgtgttaatttttggtttaaatattaattacaggctaattctaatatggaagatattcgtcatgagtcggcaggatcagtttcaaagaaaagtagtaatagtactactgggaatgaccaacccatggtgaagagacctagaattgaaacgccgtcaccgttacctacttttaaggtacgacatatatacatatatatttattattcatttaagctttttcctccattattattgctatttattatttttcttggttcttcgaaagagagaaggataagaattctaacttttgatatattaattttaggtccggaaagagaagttgggggaccgaatcactgctcttcagcaactcgtttcacctttcggaaaggtgaaattttggagttttcttcccgtacaacttttttttttttttggattaacacaataaatatgtttggtatttttttttttttaaaagggttgtttatagctaaattaaccttgaatcattattatgtgtttgttacagacggatacagcttcagtactacatgaagccatcgaatacatcaagtttctgcacgatcaagtcagtgtatgtttgatcagtagttgctacaaattattattttacattatatgatattgaaaagttatatatattaatgcaaaagcattgaacaaataaaaatattaattaaaaatgaatataaataaatgagtgctaataaattgttaatttatgggatctttttcaggttttaagtactccatatatgaagaataatggagctgccgttcaagcacaccaacaggtggttttagttattaagatggagcaattttttcngttttaatatttttttcttatttattcaaaaaaaaataacttttactttatatatagcaatgtcactaattaaaaattaattactattttatgtgtgtatatagggatccaataaactagtgaagaagcaagatgagttaagcccaaaacaagatttaaaaagtcgtggactatgtttggttccaatttcaagcacatttccagttgccaatgaaacaacagctgatttttggacacccacatcgtcatttggaggagccttcatcaggtgatgataatcatcatcacacaaattagcggccgcaaaggcaatttcaacggaaacgtttatctactaattattataattattaagtattttggataagtgatcataattagtatgtcttctaattattacaagtcttaattaacagtactatttgattatttggttagagtagtaaatggtactgtttggtgacttggattaaattagctagacagagggcaaaggaaaggagtatagtaagtactatatacttgatgatgatgatggtcatcgaaaaggtagataagcgcccacaattgctgtgctgtgccagtcgtgaaagaaaaggctttacaattaaaagaaaaagagctcataagaaaagacaatgatttttcttagagggacagaatgctgggccagctgcaagcagaatgatatatatatatatat

SEQ ID NO: 225608 - DNA, 2675 bp, Cannabis indica
gatttttggctcttaaatcctggaattctattttatagccaaagacgttggagggcttgggtttacgaaagtttgaagaaatgaataaagcccttttgtcaaaattagcttggagattgcaaaaaaatgagtaatgcctccatcataatttctggtcaatttctcaaaaaggtagtgattcacctctttggaagtgtattttggagccaaggaaaaccattagaaaaggctcatttactttggttgctaagggtgattccatagatttctggaatcaacctttgattccttggctaagttttggggaattcaaggagattatggagagtttgtttactgtgaaaatagtggcagatatttcaatcaataatgaatggaaaaatgagatggttttgcagattttgaggaggaacttggtaatagaattattaatatgcatgcctagaattcctagccctcataatgatcaactcatttggaagggttggaaaaatgaccaattttcagttaaagatgcatacatggtgctgatcaagagcataaattcgatcccaaaagatatatggaaatggatttggcatcctaaacttcatccaagggtatcaattatgctttagagagctttgaacgaggctcttcctacttgttcaagactcctttttctggtagacaaggacatgcagttctttttgtgaagcatgtagagactagagagtacttgtcttcatatcttctgggattgtcattttgttgaagctctcaactaagcaatgtcactctcaatagacaagtttttttgaactatgttggctgcttatttcaagagacatggcagtagagaaattctttaagttttaaacaccagctaatgccattacctctactgcaagaattgtcagctagctcctttgaattttcctctatagggaaaactcatattaatcatatcccttagtagagaatgggaaattcttggagtttatatcactcagcagacaaagacaaagttacctatggaactcttggagtaaaatccatttattatctgattgttttggtgtggtgagtgcctaattggctcagcaaagatgtccccctcactgggatttttctttatcttttctgttcgtattttagattgtaattttttctttgttaagtgttgtttgaattcttttgtgaatggactagcaaaaagaggtagagtctctaaccaaggggctggtttgttttaagcaaacatgtttgttctttaaaaaaaaataaaaaaaaaacataaataatatcttagctagtttagaatttcaaaattcaagattacatagccctgaatactttattacactactgaatcaatcaaaaaatatagagattaacaattgattaacaagaacttatttgcatatagaagcttattatatttgatcccaaaactttattatatttcaatactttaaattataacaattaatatatatatagaaagagttgaactactctttattaataattctaaatttattataattaataaagacatatatttatatatgagatatattattaataattaatagcataagtccaatgaaagagaataatgttttgggtaatgatgatgattaagaggaattaggtaaaacaatggttggcttgtagtcaaaaactagaaatttgtcaagggtgtgaaaatacaaatttcttaagtgaagatgagcaggatgatctgcatactcagctacaccttccatactctcaaatgtagactcaaatatatgagtgtaccctccatttccaagcttattattcacctctaattttcccctatataccaaataaataaaaacataatgagtcaattaataataaccataagtaatagaataaatattaatcaaatatatatatatatatatatttaccattgtagggctttcatggatggaactagattaacgagattggcataatccttgttcatttgttcaatttggtcatttgataatccttctttcattttcaatatgaacacatgtttcaccactcccttatttgcttcccccatattaattaatagctatatataatctttctctctttctccctcaaaagttaatcacattatattacaatccaccacttcaaatctatatatatagcaaaaaaatattattagtcatgtgctgcctaacaattagtaagatgtgtactaagtttttactattagtcatgtgctgcctaacaattattggaatcaaatatactttatatatggaatatatgactaacaattagtaagatgtagtataataaggttttacttttagagaagtttggtacaatgtgtgctgtgttaggttgtaggactagtactgaaaactcagtactggagcaaaaagaaaaactatgttgagagagagagaaatggaagaagatgaaatgtgaaaagaatgctcaactgaactcagttggctttagacttgctatttatttgtgaagaaccagattacaggtatattgtaacagaaaagaaaaacaactaactaactctttaacaacctctaactaacttagtgtacagtaaaagagaaatgaaacagtgaaaaataacagagtaaatcttttaaccattttcagttctaacacaccccctcaagtagagatagaaatttata

SEQ ID NO: 225609 - DNA, 2496 bp, Cannabis indica
taaactataaaaatcgtatttgcaaatgtctttcatgcaattactttttgatcatttatttaaataatgtggcagcttgatattttaccttatcgtacaaaaatatcattttaatgtacatataacttgaaaagattcaaaattacttgaaatacaataatgagaaaatcaaaatgcaacagaaaaagatctttcaatatataaatgaaatataataagcaaataattttaaataatacatttcttctatgtttagaaataaccaacattaaataaaactaaagcaccaccgacattttagatcgcttgcctgtacatagctcatcgcagtatacatagcagaacttccctatctaagtgtaaggggacagtaaatgagtgagctaaaagcccacgaagaatatgcttgtcatgcaaccatacaataacatataacattaatgcgctaattaaattttaacaatatcatatacattatcttatgtaaatttttatcatatatgtccatgctaactttttatactatacatgtatagagattccaatatcgtactcatataaaaactataaaataatcatgtcgttaccataacattgacatatcataggtattgcatgcataatctgggcctaacttggccctacaataacctatgcatacgtagccctaccattattataggatatgctatcttttacattcaacaacaacatcgttgtatcataccccactgtaacaatcttgtatacaacttagaaaaatataaagtagagtatctcattcaacgaccttaccccgtatcatacctcaccatggtcttgatttatttataatattaattttttggattcattcaagtagtatttatatactaaacaaaactatatcaaactgcaaacaaataatattgattaattaaaatactttatcacaaattatctatcttataaacaattttctttcaaatatatatattttataaaaataaataataatttaactatatataaattaataatttcaataatatattagatataagtgagtcaattcaatttcgtattacatgcgttaaccttaagtactcaacccaaatatcatgtcgttcaagttcgacccactcacgtatttttcataaccctaatctacaataatttatatcgtgttaattatcttgtctcataacatgaattgtcacccctatataaccaaagcataaataagtagtgtaatctctcattttgttagaataattgcatatgcgcataaatacatttgagttacaaaaatataccaagctcaagttttattacaaaaatataaaatttcaactttagactatcaaaataccgattttgttttcatatctaatactctgaaacaatacaaaatagcagaccaaaattttagaatgaaaaaaaaactacaaaaatacttcaacatatatagaatcaagaaactgaatctaattattatatataagagtagaatttatatacaaatttttaagattttatggtgttccttcttacttatgataatttttatcccatattttttttaaacaaatatcatatttggggcaattaattaagtttgtatgctgtatattttaaaactttcatttttcttatatttttgtaaatagcctaaatttagaagctatcaatctgaattagtctttaatcatgatatagaattaatttacacttagaaattttaaaagatttttaatatgacaaatttaactttactcattttatgatattttattatttttgagtctttttgtgggcttaagtttgccatattattgtaacagaaaccagtttcttaaactgaaaaatcaatttcatgacaaacaaatcttaaacataagcatataacaataaaaaagatttaatatataacattaacaagtttttgatcaattttcttaaaaaaaaaaacaagttattattgaatttaagtatatgagtatatacatcaaattttactataatttttagacctatgtaaataactattttcgtatgctatttatattatattttataatgattcagttaagaagcaggttattggatattattttcttcatatatgcatcaattgctggttatacttatatatctattttatataaaatgtggctatataaccgaattcttggtttatgagaaattattgggttactttttttcaaaatattattaacaatttaacagtatattttttattaattttatattaatatcatatatctattaataaaaattatgtatatattttaaaatacggtagatattattaacaatttaaccacccatattttattcgactccaaccattcgactaaagaaagagaaagtggaatcctcactccaaacgaaagagaacgagttgttaatcaacattaccaaatgtagattggaggtcagaacaatttgataatgatggttcagatgttagataaattaacaattaacccaaga

SEQ ID NO: 225610 - DNA, 1593 bp, Cannabis indica
tttggcttgttctctggtgttatcctcttttatctggttgtttcccctttgtctttgagtggggtgattgtgtttccttgttgctttttttcattttttttctaagtcctgttgggtggttggtaagattcggtgggtgagtgagttattgtcttttggagttcatttattcttgtccttttctgtttacttatggcgtcaatcattgcatgcaaatctcctctgaaaggtaaaagcttttcatgcatcgaaaccactgtaaagctttccccgtgtgcatcatctgttaaggtactttcttcttgttgtttgtatgggagagtaatagctccaatgaatgtggatgaggctacggttgtggaatttgtggctaaaacttggaagaagcagttatcggtggtgcctatggtggatattatgaagactgctaatattttcaagtttggtttcgactcagctgaagacagagattgggcactcgttaatggcccctggtgtatccgcggatataccttggttctgcatgcttggtctccaagcgtggaagggtcgattactctcaatatgctccgtgtatggattcaaatccataacctgccccatgaatacttctcgcgtgacaatggctatctactaggggggttggttgggaaggttgtgaggctagacttggaggaggacaaaccagcaacttggaccacttaccttatggttcaggtggatattgatgtgcaaaaaccgctggtttctgggtgctttttcgatttaatctctggggagaaacaatggttgcaagtgaaatatgtcaagattggaattttttgttacaactgtggctgtctcggtcatcaacgcaggggctgtaagttatcgtctccggtcacggtggcaaaggttgatggtgttccttaccccatgttcggaccttggctctccttgtcctcggcgtatcacgacgtgttttctggtccgtcgtacggtgttcctcgtcgtcaagtgttgatgaagatctctgatgtcgacggtgatggttcaaagaccgggcgtgctctgaaggtccggcgtccgagatgtcccgtgagtgcgaattctcgtgctgctgctgtccctgggaagtcgttggtgtggttccctaaacagcgtggtgaaggtgtcgagacgggagtttccaatccgagcatgggtggtacgtctggggctcaggtgattagaaaagggtctgatcatgtttctgttttgagaggtgatgaggtggactgttcattgggcagggataaggtttttaaaaatttagtcgtttctaatttggatttgattgatgggccttcgtttgggccgggtgtgtgtgggtctgggccgtctggccaaatggtgcaaggtgaaaaaggagatttacaaaaagacaaattcattgggcctcctaatttgaattgtggtattattcgaactgggcctgaggttgggattaataatgtgattatcactccctctttaaaagaaagtgagggcccggttgtttcatttaaggctcctcctagtattgggccagtttccttggagaaattaagtaatgagaatcgtggcccctcctct

SEQ ID NO: 225611 - DNA, 2714 bp, Cannabis indica
tagaattttcctataaatatatataagtatacatataagtaaattataatgggagagtaatatcttaaatttactaacaatttaagattttaaaaggatttattgtaaaaaatttaaacttaaaagctaagtggaagtgaaaggacgagaagatttaaacgtgaaaaactcttaattatattatcgtaatgtccttttagcatttctaaataaaaagaagtgataaaacaataaaagaaaaaattagtaataaatgacaatttaagatgcatgatgggatgtacgaatttaggttttcattctgaccaatgagagaagagaaaatgggtccatgttagataatacaaaagcgtcgtttcatcgagtgggatcgaccatcatggtgtgatttctgggtagaaagatgtacaagtgcggtggaccatacataaatgtgccacgtcagttttttattcgtttccaagaattaaattaacagctattggtagtgcgggacccacctatacaccggcctttgctgtttgtacttttgatgacttggctgatgttaaaatgactccaaattaagcaatgcataacctgtaccagcaacaaaaataattcatgtcaacctctacttgtggggatacagtcaatttttagtttttagtttttaattttttttttttggaatacagtcaatttctttttcacaaacattggacataaaaaaagaattagcctaagaagtgattattagcatttaatatgcattttttgtgcagaaaaaaaaatatagtacattgaaaagttaagtcatcaatattaatgctatttggcaattttatttagagaaatattcaatttttttttgatgtttctgtaacactgtatgtaagtgtaatttattaaaattgaaccttataatttataataaataatataaaacaaattctaactaagttcttgtttgtagtgtttcacgtcttaattatatgtgcctaatcatatcttaaaaattacatttctcttcacaaaaaagaagtttcaaatttaaagtccctccccaaatgcaaaaaaaacatgtgcctaatactaatactcttaaataagtaaatatatataaactttcaccatctctttcatttcacatatcatagatcatatggatccaattaaattacaatttagagcaacaaaaaataatttaatttttaataatagtttttgagattattgtattagggcataattgttgggattgtcgtatttgtatggaaagaaatgcgtgaggattttttttttttttttttttgaaaagaaatacaaaattcactaagaaaaattcgctgttacaaaagaactcaaaaatcaagaacaagtatctgtccaaatacaatctcttacactagtaacagaggttgccaatgtatggacaacaccattcactgatagcaaaaagggcactgcaagaacgatcaccaacaacagctaattctaataaaatagactgaaaactaaaattaatgtaaaagttattaatccaaccacggtagaatcactattaataatgaagatactgaaaccaaatgcgtgaggatttgaaattaccaaaaacaaaatgatagaaaataaggatgtataataccacatatattgaagaaataccataaagttagaagtgatgaaattagtagcaaaatctttttatgttttaatttttatcgctttgttttttttttccgtaacaaaatctctttaagtttgttttttttttttttgtaaatttgaggtatcaattaattaaatattaccgttaaataacaactcgataatcactatatgcatttatatgaacatgaaagttaaacgtcgagtgaatacaataataatacagttgttattcaatattgtgctgcaaacttataagaaaaaaaataagtacacataaatgagttttgccaataataaaataattaagtataaaaaaattttgccgtaattttgtaaaaatataaaaaggccacgtgaactcatgttccaaaaatagtaatgattgtatgcagtgagttttgttataataaagatatatatgggaaagggagaaatcgatcgatggaagaatgaagatcacaagaacaagagttttaagtaaccaaagatttagagggaacagtgatgaggttcaattaacagacatttgcatgagaagagcatccatcgcacatgctaaccctaaatgtccgactgcacaaagcacaccaaattaccaaaacacacaaccaaaaagaatatgatgattccatgcctaacatgaaaataataataataataataataataataataataataataataataataataataatgtaatatggcttctgatatttctgcgatcccgatatataagtgaaatttatgtagtagctggtttttttcaataaaaaaataaaataatattactttattcataaattaatgtatccatttattcttagtctttgaaaaggaaaaataaacaaaatcacttgttataaaatgttgaattaaattagaattaggcaaatcagattatttggaaattggacacattcaaagttatttcgttaaatttttactttttatttttggtagtaaaaatgtaactgtttaatataaacatcaattccaagaatttacatgtaacactattaccaacaagctaatatccatcaattccgtgagatgag

SEQ ID NO: 225612 - DNA, 2385 bp, Cannabis indica
cgctaattttaaatttaaatttaaatttatttatataaaatatccacataatttttatttctaaatagatatatataataaaattaatttttttatataaatatctacattatttttatttttaaatatgtataataatactataaaaattaataaaaaaaaaagtattactcttcattaataatatattgtgttaaagttaacataaaaaatttaaaaaaatagcattaaacaaaaaattccattacatagatttcaattattgatgtaaatatatattttcacaaatgaaataaaatataatgaaagaaaaaaacaagagagaagaaaataaggaagcacctttaattttctgcaaaaatcttggttactccatgacctctcatctatgtcaatctctgaagaaatattctctctccaaattgcagcagtcagagatgaagtgaacacaactttctcaatactctctgtttgagcacatgcttccactacatttattgctcctcttacttcccaatccactattttttcctgaacaaaaattaattcaaaactttttacatgaaattaaaaaaaaagaccccaaaatggattaaaatggattattttttggtattgattagaagaattaaatagaacttacatcataaccatctgaactatctaaacaacagaacaaaccagtgcagcctttcaaagccaaatgaatagaatgatagtccaaaacatcaatagtaaatattgataatctttcttcatgaactttctttaattctgtattctttctcaatctcactttctagtcctgaaattacagtacaatacaatacccaattcagaaaattaattagtgaaaacaaaagggtcatcaagaaaaagagggaaaatatataaaaggttaccatttctttgtatagctgcatgaactgtgtaccctctacttaataatcctttgagaatccaaaaacccacgtaggttgatgcatcaagaacacaaatacaatgtttttcataatccatttttggttttttggtttataatttgtgtgttggtttatgaatatgatgtatttatatatagagttttgagataataaaaagagcctaaagtggaatagatgggtattgtgctagtgctcgaaaaaagctagagtttggttggtgaactatttggtctatattgttacacattcctagctacttaccatcttaaaaaacaacttctttctcactttttcattttttgtttgttttattattattattttcagaatatagttatggcaaattttacaatacaacacattgaaatgggtacaaaaaatatttgtctaatttttttatggtcatttacttagtaattattatttgacaaaattttgagaaattcaaaaaaaattatcacattgaataaggtttaaagaatttgttgtacgtgcgacatttttatttcatacgagtgttaaataaatgttttgaatattgatttctataatgtaaatttaaatttcgtaaaattttgcagtatgtcttaaataactacaacgtacacgagtataaaaaaatttagactaaaaaattcttatagatactgaaatagttagggttgcatcagtgaaaagaaaatctactgtattcaaattgatgtgcccttcttgtcccactaattattttagtacacatcatctatacctatttaatatataataaattcgttaacaaactctaaactaaattaatacatataaaataagtatagatgatgtgtcctgaaataattagcggagcagggaaaatacaccaatttaaggacaaccgattttttttcgtatcagtgcacccattttagtgaaataaacacctataattataatgaaagtagtttgggatttgggaggaaagaatggtaggtttattattagtaataatgtaaataaagtcggtattggggatgcatgtgtgtccaactctggttttatatgtttgtagagttccaaacgtaacttgttttttttgctttgttgcgctgaaaaaatatgtgcaatcatcattactttttaagttggtgataacgtcctcttttttggttaccttccaaaacaaaaacgtgcttagttagagagatgaaacaaccatattttggttattttggtaatctatttataataggagatataaaaggcataaaattattttagtggcataagtacctaatattaatagatttgtaatttcgtccaattctagtataaactctggtgaggtcggccgaaactttggtagtttagattattgtttgtacatttttttaaagaaaagactttgttttaattattaaaactaaattgtggttttaatgtacacagtttttttttttttttattt

SEQ ID NO: 225613 - DNA, 2552 bp, Cannabis indica
atataggttttacaaaatttactattacatatattacattatatttttaggggtgtaaataaaaatatctatatgattatagatgagaatattaatagttttaaaagatactaatagattataaaaattataatgggaggttacattattttttctattatcaatagaaaaaaattagaaaacataacaaaaatagagaaaatagagaaatggaaggaaaatatgccacatcaatgctcttatgcttcctttatttagatatatagatttcattgaagtgaactcaacgccaaattggtgaaacctgagcatagcttccttttttaaatgacatagcaaaacacacgagaaagaaagtgtcccagaaagttatcttcttctaatcatcaacaacatcacaattttattacctattttattatttttggcaattatttattaaattaaaatatataaaatttaatattaaattataccgatactaatatctcttttttctccctaataaaattatttaaacacatcatcatcctgcatgttgtaagtttgtcattaccatcaccatcaccatactcctctgattcagtagtttaagcctttttaagggctgtgattgaacttgagctcccgctgatggagtcataacgacggaaggtgtaagccaagatcaaacaagccgtaagcgtgacgatatcttttcccgcgcattgcttattggtgacgctgggcacaccggtttgaggtccattggaccagtaaagataatctaacagacctttatctttcatgaaccggtccccgatgaacgactccggttccgagaatatttttgggtccctcataacaaggctttgaaacccgcataggagctcgcctttcttcacctcgaaggccgcgtcgtgcgagctgagccggaagtccttcctggccctggcgaattggagcggaacaggtggattgagccggagagtctcgtacacgaccgattgaacgagtggcatttctttgatcgagtcaaacgtcagagttgacccgccattttgtctgacttctttgaccagtctttgttgtagatcggttgtgtcactcgccacggtgcccagtaggctcggtagaaatatagagaatcccccgaaggcgttgaaacccaaaatgaagagaaggttgtgaatcgcttcttgtttactcagcccgaactcggtttcacctctcgctactatttctttacctgtaaaaggtaaccacaaataatttctcaaactattaatttttagtgtattattactcccaagtggaaattatttgcaaaatgacaaggggtgtctatgcaaaataaattttacaaaaaaaaattcattttgccaatgcattaatgggatcatgagtctaacacaacactatcaccgcaccaccatatttggttatttactcaaatcttcttttggtggagagaggtgaattgttagtgtgaacgatttggaagatatagttagaggacatgtatgattaggttccatttgtatatttggtggaatctggcatatcttaaccaaaccctttgcatgggctcgtcgtgcacttgtatgtatggtttggagagaatggtgtattaataacaatatattacttcctacatatctctaaattaatagtgcctaataccaattaatgcagctttatatgaccatgattgttcaacataaggtggggtgttagacactaaaaaaaacaatgcaatgcagcactatataaatatttgtgtggagagtagagatagtaattagcataattaactaaccatattcctctacaaaactggagaggttattgtagtcaccactgaccaagaaaaaaggataggcaaaagaatgaatgaaaagctcctcaagaggctgaaggatcccaatcttgatagtgggaaggagctggaaggctaaccatcggtcgagcatgatgtagccagactctgcaatcttgggggagttggaagggtcagcaccaattagacacttgaccaggaagttgaacaagaacttttgaagtggggctaagtaggatgaggatgatttctcagatacgtctttttctattgtgtcccacatcgtcgacagatttgatgtcagttctcccacccatatcttcgagctttgttttaatacatccattgcgaagttcttaacctgtacttcattgatttcaaccacttcatttataagcatctctatataaaatagctttattaagacattattataatatgactcaattcaaccaaaacactctgcgatctaattctaaagtttaaattgatatttcaatgaaccactaaacttaatgtacctgcaaaattatatgcttatgctttcatatatcatggccccgaattccttagggctcttttggtatataacgtaatggatgattggactggatattggatattatgattggtttactttgcgaaaaaaaaaaaagatttatattatgtttggtttagaacaggactattgagtatacagtttattttaataaatttatttttatttttttat

SEQ ID NO: 225614 - DNA, 2483 bp, Cannabis indica
ttgcgtcacttataaaatgaagcacaaatataagtaagggaaaattgcaaactaaatataaactaattacatatacaaaagataacaaccataaaacttgtttctcagattatgcatgaaaaatctttcaacacaaactattagctaattaactatatcatgtttgaagaaataatgaacctatttttgaaattgacaaatgacaactaaatcaaaatttacaatttagtttggtaacgagaagcattcaatttgaattgacagagacaaacaaaccatacaacatttgataagcaaacaccaaacaaagataagcaaaaattgccattttgttgaactagtttcacctctgcattagccttttaaataagagagcaaatattactcatctgattgtcaatgcatcctgacattaatatatatcctttatattacaacaaaaggaacaataaatatacaacctcttttttcaaattaaactatacaaactctaaaaaaatttcttctcttcttttcaaatatttcgagcaattatcactttccacatatgatatgagtaagtcctacttactccaatctagtcattgtaatccatgaaatatttcacaattgacaatattccatatccacacaaagtgagaatataaattttcttagatacacttgtacaaacaacctaaactgaattgaaaatagtctaagcatcataacatacctgtgttgtaggtcttccctttcctgagaagaacccgtcaatcaaaactgcgagtggtgtgagtccctttatagcaatgtacattggaatattaactcccttcaagcttgccaaggcaaatgccacattagcattatagaacaatgacactggaagaagcttcttggcagttgacatctctaatcctttagcttttgtataccctgatcttcgaccagagtatatataagagctgcaatggccaattgctaccccaaaaaaatagagagaaagacagaaattaatcacccttcaactttgaattttcaataaataagtacagtttctgaaaattaaaagattattgtctgtttcattaggtaatacctgcacagtgagaagtgtcaatataaatattgcataagaatggctttgttaataaagaccatggccatggaagcaatcccatatgacaaagcagcaaacaaactatgaaaataaatctaaattacagaaaaataattacaacccaaataataacttacaaatcaataattcccattcaatttcatcaaatcccaattgtaattttaggctttggagttcaccacttaagtcattaatgagaattgataacttttttcattgtgacaaataatcaaacgtctgggccacattgtattttgtgttgttgtttacaacacgtaactatggagggagagttttaccacaagtcatgctttacgtgtaatcatggtggttgcttcctgtcaacatcatcctatgctgctttggatggaattctttactccaagcaccactttgcccagttattcaaggagaagggaagctataatcacctaattaaaacttcttcaatgaagaaaaatggagttctattaaatcaacaaaagcctgagataatagacaaaactaaagctgaagaaggaacagaagtaaacccagatgaggattcagtccaaacataattagagtggatgaataaataggtcacctatgaaagaaaataaaacgagtaaaaaatgacaaagaaaacttgtattgacttatttctcaccgtagagactatgagacagagtgaggctccatgaaggtggctgccgagaaagggaagatctacttcgttcagtacttaggagacgatggagtgttttgggcaaagggttaccgcgagggtgaatatatatatatattatagcaattaagcataatacaaaaagttacacagaaaaatcacaatccaagtgaagatttagaagaagagttatcgagggtcaaagaaaaagggtaatgtgagggttgtaagggaaagagaagcagagtggttgacggtggaggatcgacaatggagacgaagaggagagcggagcggtcgacgatggaggatcgacaatgggtcgaagaaggcaaatcctcagagcttttttgtcttcaaaacgattgaagacgaatgtgaacagtgggatcgatttgggggtttagggatttagaagttgttcctcgctattttatttctcgtcaattttaaaagctgacaaaacttttactcgattacaattaaccgacgagataagatctccatttttaatttttctttgctttctttgccgtcagttttatttgtagcgtcattttactatacgacgcaaatcaatattttttaatggcgtttagtaagcgacagtcctatcttttgcacactattcacgtcggtcaacgctgtgaatagtagcgttgaccgacgcaaaaactagtttttgtagtagtg

SEQ ID NO: 225615 - DNA, 1434 bp, Cannabis indica
caacacacattttattctattacattcttataccaaactaaacataataattttaattacatattaattctaactacaaaccaaatattgtaatcaattctaattaccatttttattccattgctattatcattaccacttcattacaccaaaccatatatcaccttaattgcattgtagatacatgtctttaacttttgttattattagacactaacgtcaccttaccttattgtggtgttaggtaccttaaagtaccgaatagaccttttaatatttctatcaagatgcatattgactattattgctcatcaattttggataaattgatcacaagttgctctttttgatacactattctaaattacaaattactcttttagctctactgctttagaatttaatactcattttttatcattgtaataaaaaatttgagagtgtttggagggaaggaaaatcaaaataaaaattgcaaaattcaagaaaggcaaaacaaaaacctaagaaaatattattaacaaacacaaatgaaaattttattataagtaggaaaacattaatagctctgataccaaagtgtgtatgtatatggtttaaaaagtataatggagtgaaatgtatggtaaaaaagtataaagttccatcttaaaattgagtgagtaaatcatattcttacaaaatatgagatacactacacacttatgtaaaaccagtgacgagcacactctaggggttatagccccagtaaaaaaaaatgcattaaaaaagttaaatattttttttcttttgataattatagcacaaaaaattaaaaaaaaatccttacaaaattaaataaggtagacctaatttttttaaaataacaattaagctctcacataatgaaaatctaagtccgtcactgtgtacaacatataagtattacattcaacttttaatattttaaaataatgtaaattattttaggaatgaaatccgtatgacatttattattttagaaaagtgaagaaataatatagtatggagtatattctcgtgaaataatatttataaaatgtatcttttaaaagattatttaagaaaaaaaaaatcaagtcctaacaaacatacttaaaatgttttttttttcttcaaagcataaggtaatattgacatacctaccaactaatctttttaatttcttcaatcaattataaattgacccaatatgtggttatcagtgtttctctctactcattaagaaatgattaaaatttatatcggttacaaaaaatatattgttatatagtagaattcagtgtatacttagcttcatattcttcttgtgtgtaccaatactaaaattctttctctgtttttatagttttctcattttgagtggtttaaatctcatgacagatattcctcaaaatctagaagatggggagctat

SEQ ID NO: 225616 - DNA, 4442 bp, Cannabis indica
cgatacgtatacttgcgtgttgattttttcacaacaaagttcaggtccaataattcttaggtatcatcaattatttgcgagactttgttccccggttttttgtattgacaagaccactcagaaatatgcttaagaagaataacgcagtacatgaccaaactgtagcagtcagcaagcttctactaaatataaaaattctagtgttcttctctcaagatgttcttttaaattttctttgatagatttccgaagtagtgatagtgtgcattatgggttatatcgaaaatattactgttattatcactcaagtgtaaaggtaactaaaacaatctatccttcataatcgtaagtcatccttcataatcgtaagtcacgcagtaaaatcgtaagttgtgtagattcttgtgagaatattgtttcaattgtttttatatttgatgatgcttatagctatacgataccataacttagagcatatttattgaggttctagacaatttttgcacttacaaacatcccaaaatttatgagttagctagcttatagcaggaacccttgtaaaagaaaggaatagggtagatttcatattctcctataaaagaagtttagtttgccatgttgaacaatcagtaatttgcttaaaattattgctgagctgtttatatatcaaacacaagcagagaagtgagtgttaggttgattgcactgatttgttaagttttaaaaataataaataaataaatttgaatcaacatcatcactcatcagtgttgattatttgaaattaaataggtaatcctgattctcatgctgaaaatttcattctaaccatttacatatgttaatattttgctttgtaaaatacatcactaaaccattcagaaacttaaaacatgaacataaacaagcaagtcaataacataataatgtccaacaacatatatgattttaaaaacttgaagcatttagaaacttatgaacatgaacatatactgaaaaagaaaaaaaaatgcacaaaacactaattctcacattcgaagactttcaaggtttagccatatttgttaaaagaagtttagtgtactgaattgaatacaaagatagatcttataggatgggagaccagaccataagctccaaaaaaactttgatctttcacgattcttccaaatccgtttaaaccccattcgctaccccaactattctggacaatccaatagtggatttcttttctttctggtttcgtcttgcgtttgccttttttggggtaatatatcgttataatctctgttccttctcctactatcagcattgcatgacttccataccagtattgccagtcattctcttttaaactccaatcatttgggaaagtatatactccaatcgccgaatttctccttaaagttatgttcgaatcgccctccaacgaccagcggatgaagtttaagaagctcactcatccgctcctcacttctcacacattcatatccattaatgtaaaacaagtcctgaaactaaaaaaaaaatagaaatagaaaacatattaaaattaagtaaattaaattaaaataacagtaaagtgtagcactagctagcacctacctgtggtgcttgtagactgtcgatcatattctgtttctttcctacaaatggatattcctgctccgttgtgatcccgtgttctcgtatgtagttcagagctataggaacttggtgcccgctttcgattttggcagccggccaactgaaatctatgagttgttggcacgatagtatcgtttgttgttgtggctgtggctgcaacaagttgtaacaacatgatacacaacttgctgctgttatagcccaacaacactctgcaaaaaaaacaaacaatttttaatgtttatagattattaaataataataggctccttatgaaataagaagaattaatacatttatgtgaatcttttgtatactctatctccaatataatctttattgttactttctcttgtattgtgataccagcaatcttttgagtagtaggtttcaattttctgtgattattatcaaaattatgaattaatatagcttgttatgaaataagaaggttaaattttggtttttattactcatctttagattttgttcaattaataaaattttccaattgcaaagaaagaaccaatttctccaatgggatttggtatatgggctcggagaaaccagcttcttttctcatttggttcttctaggcctctgcttatggctaatcaagaacaattccaaagcacaaaggtttggtttgaggtcaaattactacaattatatttgttgggtttgctggctacatacaccactgccaatctatgtagaaagtaagactaatctgtctctttttgaggtggggtttcaatcattttggtttataaataagaatgatgctgacctacatcacttttggaagttttgaagagtgaaatttaaattttggtagttgtttcattcctagcatagattatatttcacactgagactaatgttggtagctaacaagtttctacaagagtcctccaactctctttcattcattttttttgtagtgtccataaagttgaattccaaggcttgtatagtcttttaaacctcaataatctcaagaattctactaagttcacaaatttggtgagtgaaaattatctaaactattgagttgttgggctgcattggatcaaccaacttggtgtttcatttttctcttcttgtgtagtttctaatgaattttcactttgatattgaagagttttgattaattagatcacgaacgtgttaatttaacttgtaatataattatttttcaacagaaagcataggctcccttgaaaaattgtttttgttttttacttgttttccttttttatgtgttttaatgtgtaataacataactaaaaatattagttagaaggtaagtatatatagaatttgagggtaatattctacacttccaaaatgcaaataaattcatttagatgagatagctccttaaatttgtaatttccattcacaatttatgatttgtagttatactggtaatatatatggaaaaagatgaagcccataaacacaacattttaaggtttgataatatatatggatgaagggcatgagtacaatggcagttatctcataagttctaacttattttaatcattggtaagtatactatgattatatccttgataaacttgcaattaataaaacaaagactgactataattaatttgcatcttacaaaacttcaggttgattttatagttgatctgagtttacattattctattattaacaaagattatattaggctttttttgtcttttgtttttcttatattaggctattctaataatgacactttttttttcctctttttgtttgtatactgtataataaagtttcttatattttccccaccaacttgtgttacaattacaactatataccatttaaatgtattttattttatctttctcacaaaaccttctaaagtcaattcaaatttgtgtgatttaacacttgaaccgaatactcagtaactaaacactattaataaatacaaataaaaatgtatgtacatatatatattgatacttacttaatttttgttgatttcggactggagttaatactcctggtattcttcgccagtccgtaattatacggtctattatctgattcataataaaatatatgagtgattaactatatatgcgattaagaaccagaaatataagagcgattaactatgcggttaagaataataaaaaatataaggtacaatattttaataatattacctcagtgcgtgcctccattgaatgagtaaatgtgcctaattgtgtactaaaaatagaagaagaaagatattagtgagaaaaagaaaatataataaaatgaattatgtattttttaaaataatataaatagaattataaactaattttttttgtcaaaataaaacttgataataatataatatagaaatattatgacaaaactggttgtgtcataatatataatgtttaataccaattaattgatgttggtgggatattctataagaccaaatacaacttagctaactacttataataatatacaggaatgacaattatacccgcgggttcgagtacccacgagtacggaagttgacttttggggggtgggagtgggtatgggtttaaagatttatttctaagttggaaacggggtgagggcggaggcggggcaggggaatagatactcgccctgaacccgcactactacaaaatacacttttagtatcggttcgaaaatcactaaattttaaaaactgacactatagaaccctctatgttttaagtgtcagttttaaaccgacacttataaatcatgaatagtgtcggttagtagtgagt

SEQ ID NO: 225617 - DNA, 2969 bp, Cannabis indica
gtaaacattcagaattgtttataaatgtacatgaatgatattatagctaataacaaataatctactataaaacaaaaaaataattctagtatataatttcgatcaaaaaaggttgaactaaaaaattataatatataggatatatattgtaattaacagagcttaagtatatcatggatctctttgttgaatctcatgatcttttattttttttctttgcgctttctgatcttcctttctattgcacaagatacacatggctggtttagattcaccaattggccaattactaactcggattggaggaagtggatagggcggattagcataggattataggaacaagttttggctgtgtactatatttggaaacgtataaatttgtgtatatttaagaatatgcccaatactgttcagattgtaaatgagttgattaagcggaatattaaatctaaatgtagttgctatagtaggagaaagttgaccacaagagaagagaaaagtacatttctgatatggtgaaaatattgtaattgttcaacttcatttctttgagttcgttttgaaattggtgcttgttgattttatgaaaattcttctcctttcattaaatagaaaaatatattaaacaataaaaaaagcattatatatatgtgatatatttttaataaaggatatcttacaaagtatacgtacttaaatttccagtatagctatagtaaatattacactaatttatatatgttgaaggataaaattttgtataccttgtattgtacaagcccattaggtttagtatattgctcattctcccgttgtatatgagcaatatgatttaatgattctcttctctcttcatggtactagagccatggctcaacaaatcccaaaatctcaggtaggctcctgcggtggtcttccttctcctaccgataaaactcaacataattcttatcttctcaactctcaaaatttcctcaccctaccttcaatgaatccacaattttcagtcaaattagatgaggatacatttctcatatggcagaatcaattactcaatattttcatggctaatggtttagatgggtacattgatagaactcaacattgccttccaaaatttctagaccccggcaatacactcatgaatcctgcattcacaacctgacagcggtacaatcggcttgtgatgagctagtcttttgcttctctctcggaaggaaccgatgctaagctagattgttagctattgcactttaattaggaggtctagaaatctatgttgggttttgtgccttaactaaaattctatttcaatattatcttgaattttattatcaataaaggaacataatttatcttattacttgcttagcattttatttcatgatcatatgtttggtatataaattctattaaatcattatcacattgctattcatgattattgttttatctacacagtggaaaactataatttaacagtacacaggatttacagtggtatgataatcaacaatttggtttacttacacttgtatagtggaatgtcttttccaatgcattaacaaagtaagcttgtattggatatatggttatacatcaaactggaccgatattcacagtggaaaggatatcataaatttaccgtaatatattttctaagtaaatatcacttagttgatcttagatcaatgatctcaatcctgagattgttatgatctggtttaagtgtattacttgtgttctttgacttgttcatttaagccaaccaattggattggtccaatacttatatcttgggaacacggtagtataattgagtgggagcgctaatcatagatacaaaatctatagcttctataatcacatggaagtgaaacaatggtctccttcgagcttggctaaatgagtttaaatggcggagtactcatttgagtaattatattagtttactaaaatatcatttcagtaattatataagttttaataaagtggtaaaattgaaacccattaggctcactaagaaattcggccataaaggtttaagtaaagccaattttatcttcttcttttttttttattttaaattctaaacctaaacctaatatctatcatataaatagaatagctcttatttacataacttaatttgaatctttgtcaggaaaaatagaaattaaagagagctccttctattattgaatcctccttcttcttcttcttctcaatatcttcgaaccctatagtgtatgagtgatttccaacacaatttaagtcaatactcaagatagtttgaaagattgtgtagtgttcttatcacttgaaggataaaccaggttcagatcttgatcatactgtgcgacagaaaggatcaagggttagagatcttaacattaggagtcaaattattctgttgtcatcaatgtaaggttttctataactttatgtgtttaatttatttttttagggaattcatatttaagatgttagattatagatttataatcaaacatacatgttagtaaatctagatcctagtaaaatatttctaataactggcctcagagtcataataataatttattttcatgaaatatagatttaaaatgatgtttggttgacttggatctattcatgtcggtatatggtacgcaagctcctaacaatactcggggttggggacattagtctcgcgagtgctaatggtgtacctggcccctaaataaccccatttcggggtattagtgtacaagccccaatctcggggtacatggttcaagtcgaggggtttatggccaaactcaaggtaccacaacctttaccaatctcggggtggtacacccccgacctccatgtggtggtctcgaggtgatgcaccccgacctccacatgatggtcttgggggtggtgcacccaaacacctcactgcccaccatctcgagttaaaaaataaaaataaaatagaa

SEQ ID NO: 225618 - DNA, 3993 bp, Cannabis indica
acatccacataattattaatatttataacagatttaatatttttatattcggtaatagtagaaatttgatggattggtcaaaaatatcagtataaatagtatttaagaggcagatattttattaatacttgataattatgaatttatgtgggagaattgaaattgaatattttaaccctaagtttaatatattagtttattaagaaaaggtattttagtcatttacccttttattttgatgatatacatcaattatatgtagataagttagaatttttagtaaaaataaaaaatcaatataactcttccctttgctccatttttggccgaaccaaacaaattttcctcaccaaatttctctccatctttgtgagaattcaaggtaagaattgaggtttggtcaattgaagagctaaaagaggaatcaaggtatgaatcggaggttaattctttagtttttatatgtgggagttaggtttttgttacgggaagatagaaaaactttaacttattaatggtaaattttgattctttgagtcaaattaaaaaattagatgctagtcttgattataatattctattgtttaaggaagtttggttcaatttggataggttttggacaaatttaagggcttagaattcaaaatattaatgttacaacctgccaggaatcgaaattccggttgacaattggacttccagatggggcagtttcaggaacgactaattttttgtattttgaccataactttttacttcgatattcattttggacgttctatatatggttagaaagcttgtgaaaagctctacagcatggtatataatttagaactaaaatatgtgtgttattttagggtattttcactacgtagttcggtaaaaaaactctaaattttacgcatgggtattagaaagtgttttagaatagacacttactaatttattgctaatgtgacttaagactttcgatcatcgagcaattttccactcagtttaaccgacacacttgaatttagaattaaaataagattagtaattagatgcacatatgcacatgtttagtatacatgcattatgtattgccatgtagctaacatatcagaaataacagtattggtgtacatagagttgtaccgagataccgataaatatatgttagacaatattaaaaagtatgaattaacgctaccaacactagtacgactacagtactgagtgcagtttagtattatggttaattgtactatagttacaaatgttcaagactctcaaatatatttccatgtgtacataaagccaaagcaaagactgaataatagtgatattagagcttgatgaagattgtacatatctagacgtctagacctagatggttgcaatctttgagaaactacatgcttagttttgtttatgtcgttggacgatacttttgtttaatatgtaaattatgtacttttataaatagattttgggatcccgaattgtaagtgttttataaatatgttgtatgtttagtaatattttaattattacaagaattttattaaacacacttttatagcaacaatattttactagcaaaagatagcacgacaattaagaaaataccataacgtgccttagctagtagggcgttacaatttggtgtcagagctgcaaagtttgttctccaaagaccgctagatatgtataatcatcatcagagacaagctcgactcacagttcagtaagcttttatgtgttttagtagctcaaataagatagcatgattagaaatacataataggaatcatattagtagtatgacagttgaataactataagattacgtttccatgttatgcaataattatggtatgcttatgatcactgcttggccgacctaacttatgaataccaggctcgtcctatagaatggacacccaacaaaataatagaagttagggtgacatggttgagactggaggtggttggagaaatcagaatccctctcatactcgtagccaaggaagaggctgtggtcggggtcatggcgatagtaatgtcaatctgccataggctctagtagactgggaacgagggtttgcagaaatacaaactagaattcagagacaagaagatgagatacaacagcttcggcagcaagctcctcctattacacctcctcctccggcacccctagttcttgttccaaagttgccagtaggacaacctgctgctggtaacaggatggaacctctttacggaaggtttcaaaagtagggacctccaaaattatctattgttacaatctaaacagtcattgatcctctataggcgatttatattgaataaggatgaatttactattttacccttcaatatattttatccttaaaacacttagctacatgtaaatgatattttagtaaactaataattactaaaatgagcattaatgccctggaaagaatattctacttataaagtgtaagaaaaaacatcgttgattatcaagttagtgtaaatccagtgcactaataaatcatgagactaaatagtttaaagcatataataatgattattttccactgtgtagaaaatactataatcatgaatagctatatgtttgagatttaataaaatttatatattaaacatataatcatgaaagtaattatgtgaaccatacaacataaaatgatttctgatcttttattagttaataaatctgattatattgaaatggattttatttagggcataaaatctcaaaaaactcccacttacactaatataaaactaaatacatttcaattaatatcgtcttcttgatgtccaaatcaagagtggtatgtagtattatctttgtaataggatctgacagattgtattcagtatcgaccttctccaccattacatcctccttagtcacaaaatccttgatattgtaaaactcctatctatatgtgtactcctcttagggtattggattctttactatttcacaactatatccgtgttatcaggaagtaacactagtagttaatacatgattggaataacgccaaaaatggtacagaacttttcataggctgaataattatctagtagccttctggaacactttaatattcagtctcactagtagagttagagactctggataagtttttacactttcccaaaaattactgctccaccccagagtaatcactatcccaaatttggagtttctagcattaatgtaaatcttagaaatctgagtcggtgtagtctaaagggttccaaaaaatatcaaccgtatagactaacatataagtcttccttaatcttaagatttatttgattgtcttctaatgttcctttcttagattataccgatacctactcataactcccactcaacatcatgtgtctggtctaatgcataccaaaacatacatgagacctctcattgttgatgctcaagaaattctttccgtaacttttatcttttataggaatagttgaaaatgttccttagataaactctatgtctgggagtcaaatgacttcttttagagttagccattgaaaaatgctctaacatcttacaaaagtaagttgcctgcactggagtaagtaagttatcaggtataccacaagccataagttcaaatgatctcaaacctatgatactaggatcaagaagtttgcttaaatccattgaatagacctattattagaatttctcttattatccttataatagaaaacttttagttgctctatgtgaatagttttaaccatagttatcttggctccaattcttagtcccttacgacatctgcttgtttaaactaacaatgaactgtcattattagtgtctttcaagtcataacaaagtgggttcttagaaaacctcccactacgacgagatactgtgactttctatctaagaatatcagtggtattgaccttatcggttgtgttaatacaacaaagacagtgagaccatcttacatagaa

SEQ ID NO: 225619 - DNA, 1854 bp, Cannabis indica
gcggatgtagctcctcttagtctgtggcttgtcattggcgagtttcaatgaaattctctccaacaatgagaaatccgggggtgcacttcgtaatgaatctcaaatggatgcctttagaagcgcattggacagatgtcgtctttttgattttccttatgagggtgatcattttacttggaccaaataccgacacaatgttgctacaatcaaagaacgattggattggtgcttcgttaacaaccattgggagagaacttttctaatgcctcaacttcatcatttggatttcttccaattcgatcatcgggccattgcagcaaccattcactcccaggatgttactttcaacaatgaaagaaggaaaagtcgatttcgctttgaaaagctttggctgtccgatcctgaatgtagtgaaatcattgcctccaattgggtacgttcgtttaatttggaccctattactgcagtatgttctaatattcagttgtgtgccgattctcttcaagcttggcattcaaaaaagtttggtaaaatgaagaagcaaatcaagcattaccaagaaaaagtcaaaaaacttaacaatgctattgctccaactcccagccatattattgagacccaacaaactgaatctatacttgatgatcttcttgagcaagaggaaatctattggcagcagcgttctcgagttgaatggcttgcttttggggaccgtaatacaaagtttttccatgcaaaagccaatgctcggaagtccaataataaaataaagttccttctcaatggtgctggccaaaaattcttctccaaagttgatattgcttcggttgttcagaattactttgagaacatcttcacagcttcggatatagatgattttgctcttgaatccactctggcttgcatcccttcactggtttctgatgaacataaccttaatctcactaagcctttcacaggggctaaattcaaagaagctttgtactcaatgggttcagataggagtccaggtattgatggcatgtccactatgttttatcagcaaaattggtctatagttggtgatcttgttactcgggctgttcttggaatccttaatgatggggccgatcctactgcactaaaccgaaccatcataacactcatccccaaaattaaaaagcctcaaagaatgaaagacttccgccctattagtctatgcaacgccatatccaagcttgttaccaaaatgcttgtggctcgattcaaggaagttctcccaatagtcatatcggagacacaaagtacctttttgccgaatcgattgataacagacaacattcttgtggcctttgaacttgtgcatgccattaaaaataaagtctctggtcgccttggcgttgcttcactcaagctcgatatgtgcaaagcttttgatagagtcgaatggcgattcattgaagaggtgatgaaaaagatggggtttgctcctcgatgggtctctctcattatgacttgtatctcaactaacagcttctcctttctcatcaacagggaagttatgggtcatctaattccatcaagaggcttaagacaaggctgccctctttctttatatttgttcttgatctgttctgaaggcctttcaagacttcttcttcatgaagagagtatgagccagttgcatggtttcaaacttattagacgggctcctcctatttctcacttactttttgccgacgacactcttcttttctgccaagctaatgagagttcgtgtctggctatcaaaagggttttggatatattgttaggttttatgccctaaataaaactccatttcaatgtaatctattttattcaacatcaataaag

SEQ ID NO: 225620 - DNA, 2399 bp, Cannabis indica
agattttctttctgcaacaacattatacattttctattctctcaagattttctttctgcaacaacattatacattttctattctctcaagattttctttctgcaacaacattatacattttctattctctcaagattttctttctgcaacaacattatacattttctattctctcaagattttctttctgcaacaacatcacactaaagtatatacgaaatgcttagtgaaattgataggataaattcaagttagaaacatgcctgagattgcagagagaaaaaaaaaagtaaaactaagtttatctatgtgatctatgaaattaataggataaattgaagttagaaacatgcctgagattgcagagagaatagcgtgagaacggaagaagaaagcagaggagagcgtgagatgaatgggagaagagagaacagagcaaatggaggagagaacagagctggggagaagaagcagaacttttggcggtgaaatttgaaatagtttgactggggggttaaatacccgcggtgaatgaaatcggttcaacatctctacgggtacttttatcatcgctagttgtattggtcttgtttcatcagtagtagtagtagtagtagtagtagagatatgttgatatgttacttactctacttaaaaaggcatgcattttcttttacttaattaattaagcctcatatttgtttgtttgcaattttttttaatacgtgtcactcaacctcaaaggttccctcctcccttataaatatatatatatatatatatatatatttctttttatttaataacatcatgatcataattactacaactctatatatttagacttagagatctttatcaatttatgggacagtcactagttatatgacatttactaagttagttctccatcaaaatattttgttgaatgattttgcctaatttgactcattacataatgttggtaataataggattatagaagtgtattttggttgaataaaaaaaatgaaagaagcagagttggaaaaggaatggagaaaaatgacaaaactgccataaccaaaaaaaaaaaaaagaaggataatcattaaatgaaagcccagcccagcccatatgactgtcccagcccgcctggagccccactaacccgcgacacggttcgctcagtcagcgcctccttcccatctctctttttctcatatatctatttatataatatatcaaacaataaaatataaacaatgatttctattcaaaaatatatatatataaacaatgatttcatttgtttatttctttatctcctccacttttaaaatttgatctttctttatacattcttcgtagaagggtattagaatttagaagccacataaatggatttcggtatattggtgatgggagtttaggcctgaaaaatttagagagttgagctaacgtggtggactggaatgttagatcattggtgataatctttttttttttttaattaagacacaaattttatctagaaggtttgagaactgtctgctaacttatgtaagattgctaattttaaccctatttcatcttcaatttgtaagaaatgagagttttgttgtgggctagactcggaatgtcttcatttaatgttgttattttggtgctaaataagtgggaaaataaggaatttaaggtcttcgcaatgattgaaaaaaaggtttggaatttctttaagtatcacatgtatgttatgttatgttaccattgaaaaatggcacaagtttattacgtttttttactatcctcttttttataaaggtttataaatatacatgtagtatatatgtgtttactacattaatattcaatgctacttaatttttgttaaaaattttaaccattaatgattatctttttttttttttttatgactatttattgattttactttgcttaagtactcggtaagcattggctttgttatgtttggcacgatcatgtaaattcaaggagtttgatactcaaacaaatgtgaatttaatctctctttctacactatatactctgttttttattttttttttaaacaaaaaaaattgaaatatacattaaatatttttttaaaaataacattatttatttaattaaattatatgacattatttattataacaaagtaaaattaaaatacaataccgaaataaaaaattaaacttacaactaaatataaaataataattattaattttttttatgcattataaattcgattttattgtctttctactcattctgattattattcatgtatttttattctgtctaaccaaatacaaatcttaatctttaaattgcattccactatattcttgctcattctaaaatcttaacgtatattaaagattatgaagtta

SEQ ID NO: 225621 - DNA, 2665 bp, Cannabis indica
ggtgattttccacaacaagaaatggttggaacttttttgaagaattgtatgctacattatgctgcatatagaaatatatttccactgtgggctcttgctgaatatcgtaaaagagttttactatgatatacctccatattttttttagtacttgtggacatttgtaatgactagatttcattgtataactattgcaagaagaatgaatgatttgaaattgcagttgttatattatataaaataattaattatacaatttcttactttttttacaaaaaaaaaataaataaataaagttggatagattaagcaaagaggatcatgggatctacagcccgcctcttttattaaactctgagaaaattagggtttcatcttttcttagctatataaaggcccattttttattagttttaatctagttttcacaatgagtatgagtagtacttaagctttttattagggtgttaatagagattgtttgtcattttattctggcttaatgtgatttaagtcttcttcgattttttacttcatttgtattgaatttcttttaattgtctgatcaccaattaattgtttaatgatttctatacaaaatttgagaagttagtattgattatatatataggacgagagcacttatatgatctatgtagcatttacgatttttttgcttaatgcctcctatatatgtgtttaaatttatcacgagagtagaaaatttgcatataggttgagatttatatatgtcctagccaaaatataaatctctttagtaaatttgttatcacatgaaaattagaaattaagaattatattatgttaaaccaagtaaaatatatagattctaccgtatagtcatactgctaaaaatttggagggcaaatatttacccaaattttgatgacaatgatgtggcaagaataacgacacgtggcatgaaaataacgagactggattaatggagaatataaagtcatgaacattgaaatggaccgttggtcatgacgggtggtcatgatcgttaatggaagtctgacggttacctttacctctagcttgagcaaggtggtcgcctccaaggaaaaaagggtggactaacaccctcataggtgggataaacgatcaccacaaacctatgggtcaaattagtctaggggtaaatgacactacccgtaccattattgtggaggttataaaaaaatacattaaagttataacaaattagtaagtattgtaattttttttgaatatcttagtttgtttgattttctttttacttattgttaagttttcttatctttatatatatatagttcggttacattaaacataattttatgggaaaatttgaatgagatttttaatccaaatctctatatatataaagttaagtatgagactgtgacataacactctacgataacttcattctactttcttatttttctctctctttttttcatattttttaagtaatattaaaatcttaaatgaaaaataatcatgattttaaacaatgattacttttttaggtttatttcttaagtgaaattataatcttaaataaaaaatcatcacgattttctatttatcatcttcacctcttatgtttatttttttcggtaggttttttagaagttcattcaaaacagtttttaaattacatgatattatcttataatttaacttaattttgcttacattattatatattcattgatattctacattctctttattcggtatcattattttttttttattataaattgttatatttttattttcaaaatagtgacgattacaattgagatacggtgatgacaacaactttaaatgtagtgacgagtgagatacaatgatgacaacattggtgggtttcctatagacttatgaattgttatatatatttttttttctaattctatttttttatataaatttaatcacaccaaaataacattaatccaattactaaaactctatcatgtgtacactaaataaattaattaatattttaatttattgagttcaaaataattaaaaaaaattatgactctaaaatattaatatatttttcttgtgttattaagagttaaaaaatgaaattttgaataggcactcactattaaaaatgttatataaaaatattaaaatttaaaatttcatataattttataacttaattattattaaataaaatataatcgcacgcgaagtccagtttgtttcctaatttagctaattactaaaattttaatgctctgttataattttgattaacgcgtgttaattttcttttctaaaaaaaatggggtacagaagtacacatatctttcaaatgaaaataatgaaaataataataataataataataataataataataaattaatgaccatatatataattgtcgaaaattatattgtccaaatattttcaataattttgaaaataaattgtcttgaacaaattaatgaagataaatatcccagttatatatgctttactcattctactgcactagatatataacactaacatatatataattatgtattttgttaaaatggttagccattgatgaacatgaacctgtaacagagaaggtaaaacagagagagagagagaagaaaggaaatgaaagagtagcaaagat

SEQ ID NO: 225622 - DNA, 1873 bp, Cannabis indica
tgcctaatcattagagcgttacattttagctcaggcattgtgataagggatcattatgggagaatgtcgaaacatacgttccttggactcccttatgcccctcttattgctaagctggttgccattagagaggttatgtgcctagtgtcttcgctgggattgcatatatgttgggttttatctaactgtagtgaggcaatgggtatgctgggtaggttgcatgagtagagtggctctttggagctactggtcgcaccggtgatttttgaaaccaaagagatgcgaccgtgatgggagttcgcttcagtccaagaaattctaatgttgttgctcatataattgttaaggatatgttctattgtgtaagagctctaggttttaaaatggagggttctcctaatggttgtctgtattgttgatggagagttgcctctccctaacttgattttttttgaaagacaggacactaatgtgctgtactatgggaaaattatcggttctgcatgcaatcaaagtaaacaagcggccattcttcagagaacgacactacctgaacgatacactccctaacttgatttgtttatgtatggttgtactaaaaaaatattattaagagatttttctcaaaataataatgatattaataaggaagattttctttcaaacccttctaaaacaataataatgatatatagaaacctagtttggtccttaacaacttgccattcaattaaaatatttgtccaatgagattcatcccattgtcatgaaattatattttaccactttgattgttattattattttataaactcataattactttacttaataatgaacaaaactttagaaacttcgtagttgttgatcgttggctgcatgcataagtggcaatggaaaagttgtgttaattaagttgcttaagcactcgattactcttttgaaagctccatctttatctctttaattaatttttatttttaaaatgttaactaattgcaaagattagtgcttttttttcttttttatttctttaatttctgaagaaaattaacaaatccctttctcttttctattaattaatattatttccacaaaaaaaactggttttcgctttaaaactttttccgaaaggctatcaaaagtggttacgtatcaactttagtcttgtccaactatttcctgttatgctatttatgacataattttgaaatcaatatgagtttataaattatatgtatataaagaaaataacaatagatttgctcaatttaattagcttaaagttggattagagactatgatttacctttaattacggacataatgctttctatactcatacaagtagagctgaaaatggaaggctttttatacaaagggatttctttgctaagtggtcatatctttattttctatttataaaaatcaaaactttctaggagtaccaaacaaaacaacgtttgtgtcggcatgaatcctgaaataaataattattacacattttctaaaatggaaaatgaacaatagactgaaaacagtattgttaatgaagaaagtgatacaagctattctcttaatttaagaaagttgttgtgcaattactaagtggtataatgagtaattaataattatttatttagatatggggtgataattatatataaatttattgtattttgtttgataataggagctaaaataattggcgactccaattgaaatctctcaactaattctaattatgtaggtatagctaatatatggtgataaattgtataactaactctaattacacttcaatataattttattgtcactttccaatcttaccctaaatttatataacactagtaaggaatatgttttactt

SEQ ID NO: 225623 - DNA, 2788 bp, Cannabis indica
  modified_base (2548)..(2548): a, c, t, g, unknown or other
aaaacacaacgaatgccatcctagttataacgattatggatgttcaagatcaagaaattgtcattgttgccaaaaatcccgtcaaggaagaaagtggataacatcatcaagcatagttttatggaactaaaatccagaatcaaaggttcttaaggatagtattagttaggatttgaatgataacaaattagttaaggccttgatgaaaatagttagagagagaaaaactatcaaatttcacaaatacatgagatttaatcaccataacattaacaatcaaaactcatgtgtaaaaagaggatgatcaatcttagtcacaaatatgaatatttttttttcttgaatttcgaatattcaaaagaaaaatttagaagatagaatttagaaaggtttactctgtctctaatacaaaaggtcataaaaaacttcaagtacaaacattcctcaaaaactctttctaattaatgaaaagaacaataaacaaaacctttcttctaactgttttcccaaatcaacggttagccttggcaacacgttcgatctcatctttctttttgatcgcataactgtatagaaaccgaaaacagtgatttagaaacaataacatatagaatgtttaatcatgtcattgtaaaagaagttgatctcacctgttggaggaaccttttgcagcgttaatgagctcatcggccaaacattcagcgattgtcttaacatttctgaaggcagactcacgagcaccggtggtgaggagatagatagcttggttgacacgacggagaggggaaatatcaacagcttgacgcctaacaacaccagctgatccaatacgagtggcatcttccctaggtccactggtttgcaacaaataaaatcattatacacaaatatcaatagcaatactaacaaaaagacatgaaagtgctaaattcggatacctgttaaccacagcatcaactatgacttgaattgggttcaagtcggttagcagatggatgatttccatggcgtgtctgatgattctaacagccataatcttctttccgttattgcggccgtgcatcatgagagagttggtaagcctctctacaattgggcactgagccttcctgaacctctttactgagtatctcccagcagtgtgaggaacataagtggcgtgcttagccggtacaactccgacataatcagcaagtgaaatgtcactcacctacatcagagcatgagcacaagcacaaggatatggttatgaataactaccaaacacccattatgctaaataagtaaaactaactaaaaaaccttcttcaagagcagagagcacaaagtctaataatgaaactcttctaaaatgaccaaataactatcaaactcattatgcaaaattcatgaaaagaacagttttgacaagttaatggaaatttcccaatttgagcctttttttatccaaatcgaaatagaacttcattaagaagacaaatcatctgaactcatatagacatacactcagcatgactcccactgaaaatccactctggaaaagaactggaaactccaacaaaactgaacgataacaaacaatatatagctcgttcggtacgatgtattaagtcttagtatagtgtattgtattatattaaattgagttatacatcgtatttttatataacactatactaaatttaatttatactaaaatactatatattgatatgccccaataccatttatagttttacataaaatacaattcaatataatattatacagaaatttcccaatttgaggctaataataaaaaaaaaaaattagattaaaaaaataaacacaatgagctttacattatactgtctatattgtaatgtatagtggttggttcttaaatcaacaaatataataattttcatattaattcatattcatacaaacaaaaagtaattagcagagaaaatatcaatcgagtattgataaaaacctcttgaaattatctaccaaagccatacaaaatacacacttgactctaatttcactacgttgaacacaaatctcactgtcctctcaattgcagatacaattgatctatgtattgcgtaaaaaatcgttatttttgtcaaaattgaggaagaagtaaaagagagagtgagaattagtacctggacatcctcaaagctccatcgattgaaaagcttgacctcatgttgttcctgaatgatagcttccgccatgactgaggggtgaaagtgaagctcgagctctgcttctgaggcgcttagagagaaagatgggagttctgagttttgaggggcatggctagggtttactctctaaatttaaggtcttcacactgggcccaccagcccaaccagaaaattgggcctaatataggtgggccaaagcccatttggtggtaaagccaagagaaaattacacctagaaacgaaattttgaaaaatatattacaactaacgttaatgattttaagtgttaaatatacctttagttttgcaattttttggtatacttaggtacgttgcttcttttttttttnttttttttttttttttttcattttttgtgtacaaactagctttttttttacctaagcatccatctacctcctctatattatttttctttttatttatttatttattttattactttttcttttaatgacatgggatcaacatatctcttttatttcattgtaaaaaaaacatgtctcttttattttattttatttatttttgaaaatttttataataattttcagcttcatgtactcttt

SEQ ID NO: 225624 - DNA, 2755 bp, Cannabis indica
atggtatttaccctatatatatacatatatatatatatataaaaggtatctcctctaaccctaaagcacaactaatacctacggctgccacttattctctttcaaaataattcaaactttttcaaatgctttcatcctttctttctcacggcagcaccgaaaaatagcaagaacactcaatattcaacaaaaaagaatgagaagagaagacattatcaatggagttgatgatcacttctcatatttgcctcagcacatcgttcatcacatattttcattcctaaccaccaaagacgtaatccgcacaagcctcctctccaaacacttcttccatatttggtgcacttttccaatccttaatttcgattacgaacttttctccaccagcacatacaattcctcgactacttgttcccaaagactcattaagtttttcgaaactattattgcttccttaaaacgcatcccacaaaattcatgtgatttggataccttcacgtgtcgatttcctctcactaaattacccaaacccaatgataatatcatcaacaatgttcttgcttattcattagagtatggtatagcaaacaaggtcaagcacttaaccattgaatgcacaactcgtactcatcaaacttccaatattgtagtgagagatcaagatcaagattcgcaagaaacaaataaacctctagtgccaccacttttaccagttgaagttttctcatcaaaatggatcaaaactatgaatttgtgtggtatttctctccttaatgtagagaattcgattattataaagtgtccattattagaagatttgatttttgagaggtgcaatactactatcaggccaacaacaatactcatctcgtgtcctaaattgaaatctataaagtttatagattctaaagattttgataccattgagatgactaaagataatgaagtactcgagtggttttcttttgagctacaagggattacaggtcgtttcgatggtaataaaattgatcttcaatcttgtaagcaatctctcaaaactctaatcctagcaaacacacaagttagtgatgaatggtttagtgagcaagtttcgaaattaatctctctggagagtttgagaattacttgttgtgagagtctccacagtatcaaaattggtatgagtaacaaaaatttacagaacatggaattgattaattgcaaagcaatggaggatatcaaagttgtttctcctagccttaaatattttcattatggttgtttgaataatcgtcgtaacaataatcagatattgaatttgaatctttatgagtgtgaaaacttaaaagatgtaagattagagggtgcaaacataaccaataaatggattgaagatcattttaatccattaacgggttttcgaattttggagaaatttcacttgtttaaatgcaatgttgtggagaaagttgagattgattataccatttgtaataatcaatatttgaagagtgtggaattggttagttgttacaaattgtctactattaagattgaagccccaaatctacattggtttgattatgatggaccaactttgtcatctggggttttggttacttcaactaataataagcttgaagctcaaataactatccaaaatagttttgatataaatttttatcaaaaaataaggaatttcttaacttattttggtcattgcaaatcattgactctcaaatgtttcaacacaaaggtatatatgtctctacactatatcaatatttttctttctttatttataaatttaattatgatttttaacatatatattcttgttcataaatatgcagcatttgatatttcctgaggaagctaaagatgatttatttcctccattgtgtgacctaaaacatctgaaaataaagatattgagggaaagtatattgggatataacattatgaaattaattgagagcttgctttggcttgctccctctcttgagactatatcaatatcattatgtattgcctcgaagaacacaaaagtacatgaacagcttcaaccacctcaatttctattaaaggtatataaattaattttcttttatattacattttattaatttaatttaagtaaaaaattacatattttatggattttatacaattaaaaaattattttatgggaaaaataaaaaatgtggaaaaaatagtaaaagttagctcgttactttttttaaaaaaaaattcacactataaattctttgagttttaattgaattaattgtttaatacagttggatcgcattgataaaatggaagaagatgtgtgggagttgaaggaatgttgtgttcaatatcttgtgaaatgttggcgacataatttgacaaaaattgaagttgttgatgattttcaagattacgaagaaagggcaatattgctacaaaattattttatggaaaatgttggaataaaagcaaattttcaatttaatttgctaatttagggatgatattttatatatctattatttatatagaataatcacatcaaaacatttttagtttttttctttatttttttcctccatattatttacacattatgtaatttaatatatatattattcattcaaatattttatctcattatcaataatatttttatattataattcatatatgatatcaaatataattataatatgttttaaataaatcatattattttaaaaactaaaatatagattaatattttaaataaaaaatt

SEQ ID NO: 225625 - DNA, 3686 bp, Cannabis indica
ttttactcttttttcttggattagatggatccagtccaatccaatacgtactggacctaaaatattagatggcttcgatccgatccaaaaaataataggtctaaaatattggatgaacccaaattaaacaaataatatatatgaaatacatccaatggagaaattaaacaaataatatatatgaaatacatccaatggatagaaccgatccaatggatgttggattgattggatgatggaaatcaattggatcggatcggatggtaaaatctaacatctaatatatgattggatcagatttggataggctgatccaatgaacacccttaataacaagggttttaactctgtcatgactgctggtctcaccactgctcaatgccaacccataatctaattgcttgcaaatcgaattcaagaaaattctaccaatggctctacaccaaaaaccactcaaccaccactggtgtctcacttctctggtatgaattctcttaaatctcattctaaatggattattaacactggggcaactcatcatgtttgtcatgacttagctttattctctcaaacttttcctaacccttctttgacaccaattcatctcccaaatggccaagtagcatctgtgtcttgcattggttctgtcattattactcctaccttaactctttcaaatgtcctctatatccttgcattcaacactaatcttttatctgtcagttctttaatgaaatccatgtcatgcaccttcttattttctgctaattcctgtgtcattcaggagactatccaacatactcagattgggaggggtgatcgagtaggcaaccttttttaccttgacattccttcaagttcttttgtctcaaattgtattttttttttattttaaacctcctgttgaaaacatatggcactatagattaggccattctgcttgtataaaacaacattcattgaataaagagttgatttttgatcattcacattctgatgattttcattgccaaatttgtcatcttgccaaacaaaaaagattgcctattatttccaataacaatttttcagatcactgttttgatctcatacatattgatatatgggggccctataatactataactgaaggttttaagtattttttgaccattgttgatgaccactctagatatacatgggtgtattttctcaaacaaaaaaaaatctgaggctcaagaagccattcctaactttctaaatctagttaagacttagtttaatactcaagtcaaaagcctcggatctgataatgccaaagagttacaattccccaccctttttaactctctaggcatacaacatttccactcctgtgttgagcatcctcaacaaaattcagttgttgaaagaaagcaccaacacctatttaatgtaactcgggctttacttttccagtcccatattcccctatgttattggaaccattgtgtagggattgctgcctatcttattaataggactccctcccccaacttgcaacataaatctccttttgagatgctgcataatcaaacccccacctactctcatttaaaagaatttggttgttcaacctatgcttccacactccctagtcatagaaaaaaaatttctcctagagccattgcttgtgtctttttaggatatctcactagtatgaaggcatataggttgcttgaccttcataccaattgaatgttcatgtctagggatgttcaatttttatgagactattttcccttatacttcaggtacctctgtacctttttcccatcaattttttttttttcaaattcatgtctccctccttctggttcacccaaggtgtcaaacactctcaagactcaccctgatgcctccacatctacacctgttactcaatccactcaagttatcaaacccccatcctacctgcaagattaccattgctccttagctcaggttcccaacacttctcaacctacaccatctacatctcaccctatttctaatactctcacttacaagaaattgtctcctgcttttaaagcctttgttcttgctgtttcaagcctttttgaacctactacatatcagcaagcagcagcttatcctaaatggttgcaagctatggatcatgagattattgcgcttgaacagaaccatacatggatcattgtgcctttacctgcagggaaacatccaatagggtgtaagtgggtttataaaatcaaattaaatttagatggaacagttgagaggtttaaagccaaactggtggccaaggggtatacttggcaagaagggatcgattatacaaaaacatttgcccctgttgcaaagttggtttctgttaaactcatcttggcacttgcagcaatgcataattggcatcttcaacaacttgatgtcaataatgcattccttcatggggatttgcatgagaaagtgtttatgactttacctcaggggtatagtcctaagggggagaatctacctgccaatcctgtttgtaaactcaagaaattctagtatggattaaaacaagcttcaaggcaatgttttgccaaatttccaagtatcttacttgaagaaggttttacacattctgcaacagaccattccctcttcatacaacattcctctaatcactttatggcattacttgtttatgttgatgatgtgatcatagcaagtaattacatgacagttgttcaagaattgaacgtcattttgaatgataggttcaagctgaaagaccttggtgatctaaaatattttcttggccttgaagttgctagaactgatgctgccatttttcttctctaaaagacattatgcccttcagcttttagaagatttaggtcacctaagttgtaaagttgctaatactcccatgaaagtgaacctaaaactcagtcaagatggtgaagatgctcttgcagatctaaaatttatagaagaactattggcaagctgcaatatcttactataaataggcctattttagcttacactgtgaataagctaagccagtttctggttagtcctagagttacacacatgagtgctgctataagagcacttcaatatgtcaagggcacacctggacaagatcttttttatgcagcctaatcagacattcaactccaagcatacacagatacagattgggcagcctgtgttgatacaaggaggtctaccattggattttgtgtgttccttggaaattcattgatatcatggcggagtaataaacatagtactgtctcaagatcctcagctgaggctgagtacagagctatatccaatacgacttgtaaactggtttggcttctatctcttttgaaggaatgaacattgagcatccaaggcttgtattgccttactgtgacaaaaggttgctcaacaaatagctgtcaacctagtctttcatgaaaggactaagcacatagagataaattgccatcttgttagggagaaagtccaagaaggagtcataaaaatagtgcacacctccagcaaagaacagattgttgatatttgcaccaaagctctcttgcctagccaatttcaatctttaatagataaaatgggactttgtaacctatacactccaccttaaaggggagtataatcttgtaaggtgtcatgttagttaagtttgttacaaagttagttaagtt

SEQ ID NO: 225626 - DNA, 2658 bp, Cannabis indica
cgtcgtacgaggtatcgtcttacgtttgtagtttatttttagtaactttttcttcttcctattgccttgttgttaacattattctaaccttttacacgttgactaaaactacgtgtggttttaagaactcgtaattttgctggaaagatgtattggcagtaatggtgtgaaactgacttctatcctgaccaactgtatttacacgttgaactgcttcttcaagctttataaatccatctgctcgatctaggaactctcccattgatcctacagtgagtctttttatgtcttcccatagttctcccacaggttcaataccttctaggatggtggccaatctcctttcttcggttatccatttccattatggcctttgtcataaatttgctaatgtaggttgtcaaaggctctcttgatacttgttatactttcaccaagtcctctaattgagatggatttttcctagaagaggagaaatgcacgtggaactttgccatgaaggaataccatgagctgaattttcctagagctatcttgaagtactaatattgtgcagcctctgccaaggtagctggaaagattctataccgtacatctccttttactacatgcaagtccattttcattttgaagtatttaaagtggggagtggatcttccttgccggtgtacatttatagtgttggcattttgaacatgggtggcaaatcaatggtgttaatttcttatcagaagggtgatcccctagtccaatcaagttctaggttcgtgaaatttgggctggttaggctttgtacaaggctcttaagttgatttatttaggcttgaaccactagatcaacttaacctgcctattgaccgacctgtgtcacttgtggatccctcagaacattaccaggcatataattgtttacattggtcggttgaacattgggagggatgtattttccatcatgtccccttctatgattaagatcatctctcaaatcatgttcaaggcctaatttgttaaagattgattcacataggggcttccttgtctggctattatcagcaattggttggttctacatatccatctgaggacggatgctatattgattaacaggctggataaacttgctcatctattgtgtggccatcagtttaactctatgaccttggataggacagcttgtttccctgagtttgttgagtgtttccagttggacgttcttctagcacgtactatggttcagtgaagatatagacgtctagtcttctgttcaaatcttgtagaactggactatctgtcactaattactgcccacttagctggtaggcttgcctaaatagtatggtggcctgctgataataattttcgattgcttgttgttgggctctcataatctccatttgttgatccatccattcctggaattggaacctctgctgctcaaaggtgaaattcaaagctgctcgggtatctttctaatcacggtgaagagggttggtgtgcccttgcatctgccctaaagtagctcacaaatttttcatctcggtatcacttccaatcaccaccgaaggatcttgaacagatggatttttagtgccagaggcagttttctcggcctaggtactcatggttctaatttcttgatgccctgagtgaacccatctagaggagttgtcactctatcctgttgattgaggacctattggaggctgaggaatagtagatttgggatccttccttgttggatctcttcagttcacaagggtatgcacattaggaatcgtaaccatcagatcagttgtttcattgagattgcccctccttgtttgtacaaccatatttgttgtcttgaaaggattgaaaacaaaaattgtgttcttttctctcaatgagatcaccaaaatattgacctcacctttatccaacgacaatcaattaatgtgattaaaaataataaataatgacaattaagcaaagagaacacatagattgttatagaggttcgacctcgtgatggtggtaatagcctactccacttttctgtgtattgacttgtgagaagagaagcaagaagttcttgatctctctcaaaagctcttacaatgattttagcagtttaagtgctctatcaaatgaataatttaagatccctaaatagggaaatgactccactatatataagggagaatgacctctatcttgtttccagaaacataaaaataaaaagggaagctatttactttcctatattacaataatcacgtatagaaatcccaagaaaatagggatttagttaacaaacaaaagaagaaagtgtttttaaggctttcactattgcatgtaggcaacatatgcagtggccttaaaaacaattctggtaagataatatcgtttattgtgcacgtcatctttactctattctctagataagtaattcttgattgataactcactctgaacgatatgtcgacgagagtttcatttatacaactctaagaacgacttacatgtcacctaaagaagagccacatcatcacatgaaaattttaggataacaatcaatattcagaaactcaccaatttggactccatcaatagtacccaagaataaaccctcgtcgacctcctgatcttaaatcacttggatagcctcaagtataaatt

SEQ ID NO: 225627 - DNA, 1868 bp, Cannabis indica
tttttttttaaatttacagttcaatgtctgaaccaagcacttcaaggaattggttaccatctctgaagaccaacaaggacaattactcgaaggagcgtaaaggatggtccattaccatccacgacctctccggttcgccagtggcggttgcatcgatggttacacccttcgtggcctctcccggttccgaccgggtcagtcgatccaaccccggtgcatggttgattctccgtcccggcgaggggacatggaagccatggggccgactcgaggcgtggcgcgaacgctgtggctcagactcggtagggtacaaattcgagctccttagcgatacatcaacacccgccgctactctcgccagctccgccgtgaacgctaactccggaggaaagtttaccattgacgttacatcgagcatctctccggcgaacagtccgaatagcagttgcgatttcggatctggttccaggcccgggtcgagatcgggttccggatccgggtctgatttcggtttcgctcttccttgtcacatgtcgtatagagggtttgtgatgtcgtcgacggttgagggtttgggtaagcggagcaggccagaggtggaggtgggtgtgcagcacgtgacttgcacggaggacgcggcggcgttcgtggcggttgccgcagccatggatttgagcatggatgcttgccggttgttttcgaagaaacttccaaaggaactaactcagctaaggcagtagtgaagtgtgtcgtttggtactttggattgtcgtttttgagaatgaaagctactttatttttgttttggtgggtagtgagtagtgactaacagcaattttttagctgtattattttttaattgtttaattgaagagcacattgtacagtgaggaggaattagtagggattaaaattttaattattaattttctgctccgattttgtttttgtctgtaaatagtattatctttgggtgatatttattctttgctgagatttgttgggaagctaaaagctgagaatcctatggtggcgtaattattctgaaataatcaatgcaatcgatgacgtggcagcacttatttgtagaatccagctggttattagttggcgtagtcaggaaaattaaaaaagaaaaagggcaacatgacatgatgatgactggaatgtcagaaatatctacgtatttatttattattttaataatcctcaagattgaagatggcagccaaaatatagcatttacgctttatttcgtgaacttgacaaatcatcaaaacaaaacctttccacgggttgtagactgttaattttaaaatatgttaggctgtatttgtaggtttgaatttggtaggggaaggctaaaattgggtagactaaaattctaggagaaatttcatttactatttttcttttttttttaaaaaaaaaactctaattacaagagaaaatccttctcatttattttgtttaacttattcttctctctacatttatctcattagactgcccaagagctgccaccctccctccactcctgatttctctctagctccctctcatcagcccaaaggagtagccaccgatcctccgttgaaactcaaacgtccgttgtagaagcttgtcctttatggaagcctgtcgaagatccaaaacatcccaccacaaagttcgaagggtggagctcgtgaattaatgagtaagtatttttcttaacatattttgttaaataattattaaagtattgttgactcaaaaatttagactagacttttaagccacactccctcactagatgggaataaataaagaaatttttacataaaaaatcacttttgcacaatttattactaaaatactcctacacg

SEQ ID NO: 225628 - DNA, 3398 bp, Cannabis indica
ctttaacaaacaacaaaaaaaaaaaaaaagtgtagttggatgggatttcgtgcaagatcctagtattttgctattcatgtttaaatatcattgagaagactgaatttctcattgcacacctctaatcagtaatcacattatcttctcaagaatctgaaacaaaaaggtaaaagcttttcaagtcacaaatatttgagctccaatttttctttttgaaaatttccagaacatataggaatttgattgtatgttcttcatctttaaagactcttcttctttcactgattggtttttatttattgtttttgattcgcggtctgattccatcaaacctcaacatagttggtgtttaattttttatgtaataaggtctctcacatgggttttgtgttattgttcagaagaaaatgggaatggaagaaaaattctttgttcttaacacgggagcgaagatcccatcagtgggtctcggaacatggaagactgaccctggtgtagttgggaaatctgtcattactgctgtcaaggtaaaccattttctaatttcatatcattaacattgtgggatagttgtatatatttatactgattaaaaattggtttacatgtagaatggttacagacacattgactgtgctcaagtctatggaaatgaaaaagaggtgaaaatgatttaattgtggcttttcattatagcaataaataccaataatcttttgaaacatttgtttgtgtttccttatggtgtgaagaacaatttgcaggtaggtgtagctctaaaggagcttttttcctctgggatagttcagcgttcggaggtgtttatcacatctaagctatggtatctctctatttatatatcttaactattatcaaacacattagagaactgagagtaaaaaaatcttgtattttgaagaatcaaactgcttctgaaattgtattgtaggtgtagtgaccatgcaccagaagatgtccccaaagctttgagcaaaacattagaggatctgcagcttgatttcattgatctatatcttgtataatatgcctctaaattaaccttggaaacttgtttattctatcaataaactttaggtatacatgtgatgtttctgaaaatggtatctggcttttttcttaaagatacattggccatttaggacaaagcctgggtcagcaggatttgccccagaagtcatggctccattgtgtcttcctgagacatgggctgcaatggagagactttatgcgtctggccaggctcgagctattggcgtgagcaacttctcgactaaaaagctgcaagacttgctttcctatgccaaaattccacctgctgtgaatcaagtagagtgtcaccctgtctggcagcaacctgcccttcacaacttgtgcaaatccactggtgttcatcttactgtaatactttttacaagctttgtattgattgaattagacttttattgtttacttttagaccatagtttgttgaatatgccattagaggaagtagtcttctttggccttgaaatttcgaatagactgaggtgaattcgttctgtttttacaggcttattctcctcttggatcaccggggtcttggttaaaaggagaaatcttgaaagaaccgttactagttgagattgctgagaagctaaataagtcaacagctcaagtagctcttcgctggggtgttcaaagtggacatagtgttcttccaaagagtgtaaacgagtctaggatcaaggaaaatctgagcttgttcgactggtcaattcccgaagagctcttctctaaattttcaggaatccatcaggtaaaactaaatctcttaccttcaacttgttcacttaagtttgcttttacaagcaatgatatatatcttgcatgattatgtttatacagcaaaggctgctccggggggattttgcacttcatcaaagcttaagtccttataagagtctccaagagctctgggatggtgaaatatgagaaaatatgatgatatgatatggctcggcttggcaattagcatagcaaaactcttcttgcagttttgtcatttaaatgcagtgaaatatgtatcaagcttttcattggcaattagcataggaaaactcttcttgcagttttgtcatttaaatgcagtgaaatatgtatcaagcttttcatgtattggaatttttttttttccttttcttactactcaaaagaataatacaatattttcttagaatctcttgagaataatatgtttgtgtcattattacttataaactattattattattattattattattattattattatcacttaataaaataactatttgttacctgttgttttattgaagcataggtactctattttcaataatacttgtatattaatttatattaaattatcatgaactcaaaatgatcaatgactaaactatcccaagttagaaatgtgattattataacacataattaaaggcagtttgattatattaatataattttacacattaaaactgagttcatagtacaaaagatcaaatatgtctaattgcaaattacagaattaataaaccaaaaacaggcctcaccgctcagttttctggacagagaagctctatcctcttcattgtgaatttgtcatcatcagaacttgcgtcactagagacaagccgcattcgcaggaagaggaacttggctcagaggagccacgttcaaaactagagaagaatgtagagtcacaagatactcaagttctaggttcttcccttgtgcggctatgggtttcttgttaaccaaagacttgcaaattcttgtgacctgaaattatatataccataaacttcaaaataaagaacaatgtttggtttattagaaaaattaaataaaataaattaagtggctaacctaaacaaaaagtgatttagaaagaaaagtgtaaattaggattatatactttatttaagatataccattaaagagaaggtgatgtgtgattttatattttttttaactaattattattaataatatttaaaaaaattttgaattgtatatgaatatttttgaaattaattaatcaattaatatttataaagttaataaaaatattaaaaataaaagaattaaagaagaaatatgtagaagtatttcaaaagattataaagtaacatgtcaccgatctttagatagatatattaaatttttgtgataggtatcaaatttgtattttaggtagctcatttactttatagaaactacccataataataatagacttgaaaaatgaatttgttgttcctttatttatgttaaaagataataaaagttagagtagaattataatttctattaaaatggaattatttcgaaaaaacataaaaaagaacaaaaaa

SEQ ID NO: 225629 - DNA, 3871 bp, Cannabis indica
cctaaaatataattttaataaaaaatgtactaataagataaaatgttaaaactaacatattcctaatcttataatttaattaataaaatataatttcaaaaaataacaaatttgaaaaaaaaaattacatgtttagcaaactttgaaatttgaacaagattatttcaaaaatattttaatatcaaagtaagatcattcaattttaataaaaaaattaataactgatcttataattaaaataaataaaataatctaaaatttcaaaattaaccataaggctcatggttcctggtattatgctgggaaaattgggcaaagagttggcgagccagccattgatgagcctcatatggatttgggagaagatttcgaattggcaaaacacagaaaggttatctgccaagttggccaaactgaataaccacgtgttgtttgtggtaatgcatttgcacaaaagagatgcaaaattttttgtatggagggatgactaggagtacatccaccaatctcatcaggcagagctagaccgcagtaataaaggagctagtgacataataaggcgattcaatgaaagaactaccaggagaggtcaagatttaatcagagatcctctctgagagagactagttgatacattgggtcgggtttacaaacaaacagtccaactaggtttcgccggaactaggatggaccttcccctaccgaaaggtggacaagtgctaccacacagatctagtagcgggactagccaaactctagcaacctttggccaactagcccctagtggtgcacctctggctggcaaacagagtgagcttactcttcgaagcattcgagagtgagtcattccaacccctatctttaaccaactaggtttgggataggtggaaacacctaagacggcatcaacttgagaagtgagaacaataacttaaggcagttagatccaccaaaatctagtaattggtgtgatctaccccctataaacacacatactacatcagctaattaggggagaacgggtggctagacattgcccagcatagagttggatggccatgaacagctacccagggtagggttggctagccatggccaattgctttgcctagggttggtcgatcagagccagatggtaggcctggcgctggtcggccttgaacataaactttcccagggtatggctgaccaagtcttatccaatctaggttgcagcccaatcaagcaaggccaatcaactaggctcttacatcagatccttctgtgcaagcacaattggatcaaataagggacatgataaagggctttgcttgccccaaactattagaccttgagctagataggtcaaggggatctccattatctgcatacaacaatgccctgcccttgcctaagttcaagatgctagtatggaaaatgtataccaaatgagaagatcctttggcacacattaagtaattcgagatgcaaaattatcttaagaaagttactggtgatgtgcggcgtaagatcttcttggaaactttgtcgaaaacagcttagcaatgatacttcaagctagctataggaagatttaactctcagaatgaattttctcgagaatttctcactcaattctcgtcctcatgactgataccatcgtagctggaagaccttatcaaggtcaaataatgacaaggcgaacctttgaaggattatatccaaaggtttattattgaggccaccaagttcaaaggaataacataagaagtctattatatgaccatactgggggcatactttcgttgagtgacttttaaaaaaatatctataggatctcaaacaacatcatgaaggagttcctcgaatgattagtaggcttcatagagctaggggaagctatcaggcaagccttgacaaggcaagtcaacaggtagtctcaaggttgtgtaaacctctaacatttgccaaacatgcaagccaacaacagcagtacctgccagacttctagtgcaaagaacactggaggcaaacgttacagcaacaattttgaacggaacaatcgcaaaaagggaaatataatacttctcccacaccacaaaacaataatgagatgtaggagaagtacacttgcttcaccctcctatcagagaaacttgagaccatttacatggccacttaggctacttttccttacaagaagccccctcctattataaaagagatgagcaaaagggtcatgtcgaagtttctccagtttcatagtgattttcgccatgacaccaatgagtgtcaaaacttgatgagggagattgaactcctcataaggaaaaacaatccccacttgtgtcattatgtgcagaacggtgaacctatgccacctccagtggcaggtcacttgggggtcataattggcagaccctgcattgcaggagaactaccaaggttagggaatgatatgctcggactctccatcatgagcctaaaagtgatatcttggccattaaagaaagggtttccaagcaactcaagcttggggagcttgccatctcctttacagagggagatgccacctaagtcaacttcccacacaatcacccctggtcattacagcacagacaaggaacatgacggttgctaggtgcatgctggacaacagagcctcctccaacattctttttaaatcaacatattaaaagaccgggctccaaatgatagacatggcaccttgcacacaagtaatgtatggcttccttagccgaggcattgcacctatggggtacatccaactgcccctgatagttggagagaatccaacaacacgaacgatgatggcataattccttgtaatcgatgtgccatcaaccttcaatgctatgataggttggcaagccctgtatgaattaaaggtagtgacatgcatctactacctatgcttgaagttccctataaggcatggggtaggatgtttgaggggagaccaacagtcttcccatcactattacaacttggcgtatccaaagccaagaatgagaagatgcctgccaagagctctgatgatgagcttggcaaatggcaatgaagtccaacccaaagcagggaggaaaacatagatcctttctttggggatcctgcagacaaccttagcccgtaaaagaactggaagaagtggttgtcgatcccacttttctagctagaaaactaaagattgggaaaggtttagcgccagaaataaaattagtattgatagaatttctaagggaaaaccttggcctcttcgcatggtcacatggagacatggttggaataaaccctttcgcgatgactcgcgcactaaacattgatccaaacttctaacccgtgtaacagaaaagggaggttattggacaaagaacgcacccgcacattaaaagatgaagtcaaacggctgagtgccaatgacttttccacagaatagtttatccactttgggcatccaaccccgtgtggtacccaaccaaatagcaagtggagggtgtatatagatttcaccaacctgaataaagcatatcaaaaggactgctttccactttcaaggatcgacaagctagtagatgctataactgaccataagatcctgagattcatggatgcttattcacattaaaagcaaatctagatgcacctgccaaatcaagaacacacatgcttcatgacaaacctaggcctatacatctacaaggtcatgctcattgagcaaagaaatgcaggggccacctactagagacttgtgaacaaaatgttcaaagatctcattggttggaatatgtaggtgtacgtggacgacatgctagataagtccaaaaaggctgggggcatgtggaagatctagatgaatgcttcaggatccttt

SEQ ID NO: 225630 - DNA, 2415 bp, Cannabis indica
tttcttttattatttattaattcatacacaattttataggtaatatcccaattatgggcgttaaggataggaatgcatatttctcccacggggaatgggatggggctccgcggggacccgcccctaatgggacggagattcctcgtctaaatggggaatggagcgaggattcctcgccccatcctcgtccccatccctaaaccctaagcaacacttaatacatcatatggatgtatgatgcctacaaaggtgacttcgagaaaattaaagaatagaagaattggaaatggaagcagtgctactgttgctaaacaatggcctcctcaaaacacatggacgatgaaacctgttattggaggaaacccaagacaattatcttcttccctttcccctcatcagtctcaacactttagcctcaatctatcattgctcaaaaattataaaatggatagaactgacaatctagactaccatcacaacaacttctagtgcaagaaaaaaaaagaaaaaatacaagaagtcaagactgaagcatgaaatgagatcatatagtgaaacaattgtgactacaatctacaaaatataaacatatacatagtcacaaaatgtttcactatatgatctcatctcatgcttcaatctcgacttcctatatttttcctttttttttaatactagaagttgttctgaggatggtctggattgccagttcaatccattctataattttcgagcaatgatagattgaggctgaagtgttgacactaatgaggggaaggggaagaagataattacctaagatttcctccaataatagattttttagtccatgcattgggactggaattatgaggaggccattgattagcaacagtagcactgcttccgttttcaattcctctattctcgattttcttgtagtcaccttctcctactttttccaacaaattaattcaactactaaaaattatttgataaaactttacccatgcattatttagcagcaataatactacttccaaaattgatcaaagtttcttgttcaactatcatacagttttactcctcgaatatactactatcatattttagttaaataattaccatatcatatcatattttggtcaaataattagcaattgaggatgatgagtagcttacaaaatggggtggttgcgtagaacataagtggctcagtcaaatgcatcaagtttaagctttctattctattctacgcaaccaccccattttgcaagctactcataatccaattcacaatcagcaaatttttaatgatattaagataggcagcagcacttgattgagccacttcgagagattgtgcaagtagctcagttttcttgttcaccacatcttggctagaaggagaccaaaacctcctcaccaaatcttgtgtacttggagattgagattgtgctaagagagtcgggcgcgctagaagaagactgaaaatgtgtcgagaaagtggaactagcagtggaagattgagactgtgctaaggaagtgcgtcgcaaaggacttgaaggaaattgaaactgtgtcaaggaagtggaactcgaagccttggaaagcgactgaaattgtgtcgagagagtggaactcgaaggcaattgccaggttgacgtgatcctcataaagaatccgcaatcaccatggccctgcccatacacacatgcacacacatgatacatctctaaaataacatacttataattattagcccttaaaaatgctcaccataacacaacaacatcaaattctttctccccttacaaagccagtgcgacaaaagccacgtccacaagaacaatgcttgagttcatcgtcaaatgagtacaacttacaatcttggatattttttccctgtcacataacccttattaagatttaacattaaaaaaaacatacaaaaatcattcctaaatttaccctttatctgagccagggcaattgtaataaggacgactcacattagagccttttgttgttatattcttcattagatatccattcccttatggacaaataagctccatgatactagacaactattgtaatgttgagtaatcaatgttataaaaaataccaatattatagataataagagaacgtgaacaattagtagttaactgaaccacaactaccatcagatgaattggaagccattagataaagttttatttcagcttcacccaaaatagcagctcaaataaaggaaagcaaaagaaaataccagtgttatagataacaataatacgacaattactcaaagcaaccacaaaccagtacaacaaaaaagtcaaaaacaaacaaaagagcacctaaactagccccatgatcctttgtataacatcttttttaatagtattactaatacaagctgctaaactacaa

SEQ ID NO: 225631 - DNA, 2575 bp, Cannabis indica
agtaacacagaatgaatcaattgtactttaccagcaaatgaaagatgtatgctcgactaggtatgtaacctttgttatatctttttgatgatgatgccacagtcctcagctttccatttagttggcctaagaggaactcccaaatatttgagggggaatgtgccttcaaccaactaaaaatctcttaaaatagtctgtttgtcattagtgttcatgcctccaaagtagacttgagatttgttagcattaatgtgcaattcagacaccatactatagtcatcaagcacctatttgagaaccaaaatcgagggtactgaacccttgctaaacagaattaaatcatctatgaagcccaagttaattatttcagccctttacacattggttcgaacctataggatgaattagaagcttccaattgaagtcttctcgtgagatactccatgatgagaacaaacaacagaagagagattgggtcaccttgtcttaaccctttctctcctttgaaattgccttccactctaccattcatgactatcgaataagacgttgctcttaaacaaaccataatccactaaataaacttatgaggaagattataggcaacaagcaactcctccaaaaaaattccaacttatagtgtcataaaccttacttatttaaattttgattgtgcatctcggggagactattttcctcttatagttttctagtcttgaagaatcatcacattatgagcgatggacctaccttgaatgaaaactccttggttttgatagatcaaaccaggaagcacaacagcaagtctagagcataacagtttagaaatacacttgtaaattctggagcaacaaggaataggtctaaagtccacaactctagtagggttctcattcttaggtataagagaaattagagtcgaatggagttcaagaggcattttacctgtgttgaagaagtccttgacagctgagcataattcagatcctatgtcaggctaaagcttcttgaaaagaccagatccatacccatcagctcctaaagatttaatatttggaatgctgaaaaacacaaccttgatttccttgtttgagaagatcaagttgctggttcaaatcaagtcataactagttaattttattttttctcctatactagtctattgtgataataatattgttgttttttttttagaattaactcaatttcaacttcaaatacacattacttttcaaatctagagattattatttaaacgggtggattttcttaaaatgagcgtatattatttatgatgtgaagccagctcggcagcatcaatggtctttcattgagccatcatcgcctagtgaaaccctctctcaacaaccaataatcccatggttaatttggcttactttcacgaggtcgtttagcattattaccacgacccttagcgtagttcttatactgcaatactgatacagttagttaaaactgttttgtactgttctttagttttctgttattctgttattttgccaactgttctgttatgttggttaaagcttttgtataattccctatataaataaagaggcttctcctcagtaagatcaactgaggctttcatacatttctctgtatctctctttctctctttctattacatggtatcggagcttcattgacctgcgtccatggcttcttccggcgacaactcgtctcctgttgcagtcaccgatcctcagcctcaggcaccatcagcttctgctactcagcaatggaatcctttctccaattccttaacctcttctctcaccatcaagctcgacagagccaactttcttgcttggaaatcccaagttgttcctacggtaatcggtcacgatctcgatgaaatcttgttcagcaatgtcactcctcctcaaactcttctcaatggcaccacgaactctgcctatcttcaatggcgtcgaaaagaccaactactgttatcttggcttcgctcttcaatgactgaagggattcttggcactctttccagttacaacacttctcatgctgtatggaaagctctcgaacagaaattctccagtcagtccaaaactagattacttcaacttaaagcacaactcaccaactccattaaaggtaatctcagcatctctgactatattgataaaatcaaatcaatatgtgattctttagccattgctgggcattctctcactgatcttgatttgattcttcacattctcaatggactgggaccggagtttgaccccgtggtctccagcattacttctcgaagtgaaaacctctctcttgaagaggtccaagcacttctcatggcgcatgaaactcgtcttgaacgccacaattctgtgatggatctttccaccaaaatgtcagcaaacttaacctttggcaattcaagaaatgccccttatcgaccaccatttgctcaaggcagaggattccctactgaaaacaattcaagaatgcctcctcgagcaaatactcgccccaacaacaccaactacagtcggcctctttgccaactttgcctcaaatatggccacactgcccccac

SEQ ID NO: 225632 - DNA, 2126 bp, Cannabis indica
gtttggattcaattcctcaaggaccccataagtctgaatgaatgtaatgcagaattgcctttgacacatgaacacctttaccaacttgactcttattgattttccaagaacattgctcacataactccatctcttggatttgatcttttccaaagatttctttcttcttgagcacttgcattccaccattgtttatgtgagaaagtcttctatgtcaaataaaagttggattcctagatgttttgattgcaacattctgaccttggagtatataaattccattctccttcactccctttatcactatcattgagcctttgacaatcttcataacccttctctttctgtcttgacagattacccttcttcattaagtatagctattgggatgagatttctcttaatctcaggaacatgtctgacttgtctcagctctataactccaccttcatctaattgcaacttgacagtgcctattccattgacatctaaactaaccactaactactatctacctcttaactgttatgaaattagttaggcaatacagatatatgtaacatcccactttaattatgcttctttattttagcctatagattagtaatcttaataattcatataaaaactattaaaataattgaaggaaatcttcacatatagctattcttttgacataatatattttaatggagaatgaatataattaagtcgaagctcaagtattattgtttacattattcctaattaattaaaagcttatgaaaagctcttacttataaaagataaactaatttattatattgctatattattgtaatatactataatatcaataatataatgctgaaataattaataactttaattaaattataatttttgtttaattcataatttatgatatttacaggaaaactctcttatcattaataattgttacacatatgactaataaaaaaaaaagtggtagtaattttttttgactgttaagtgccaattatgagcctattaagtatcagttcagaaacacgtagcgatatatttttttaacttatttaatacgtgattcaataatatgtcgtcatgtgtttctgagttgatacttaatgatcaaagaaaagaaaagggtacgactgcaacaaaattataaaataaagtatttttacgtcactttttttattgggatcataggtgcaataattataaatattaagagagtttcgccacaaatatcttatctcaatttaaataaaaagtataaaattaacagtggattaattaaatgcagttctttgaggaagctgggttcccatgtcctacaaaagcaaatccatcagatcacttccttcgatgtgttaattcagactttgacaataatattatatctacacaccaatcggttgttatttattagttcttcttttagatatacttcttttcatctaagcattattaacataattattgatgttattatttctaattaattatgatacataacaggaatctacttcacctgccaatatggctagacaagacatcaaaaaaattctcatccacaagtatgacaattcagaatatgcaacacttatgagaaataatctacaacgaattaaatccgtaagcgaaatttctacggatacgtttagtaaattgaaatattaagaattttattattgataatgtaataattttttaaaaatatactgatttgatattgtaactatttaaaaaaaaaaaatcaatcatacatatattttcaaacacgaaaaaattgagaaaaatattaaaataagagattgacatttgctagaaatatatactcgatccacttattatatttttatattgggtactcttgataaatttttaaattttgagtcatttttatattaaaaaaaaagttctaacctatatcaagagtcgaacttggttacagataggaaaacacattgattttctcaatcgaaccaatttatcatatatttcatctatttgagttaatccatatgagaaatgttactggtgtctagcattatcgaaagtgtttgaattccacacaatttaatttaataactttatagaatatcattaactatttataaggtgtcgcctctcaaagt

SEQ ID NO: 225633 - DNA, 1968 bp, Cannabis indica
aacgggagatcaaacctaatcgttaaatttaacagaatattctttatttttaagtatattctgttaaaccaagaatgttaaaccaagaaatgtcgttagatagacacttttaatatataaagatatatatttttaatttgattcataaatattaatttgtattaattcctcccaatcaacatgagctcgagtatagtgaaagtgatactaaataattactaattactaaaacatagtagaaattttgcacctgaaacaacataagttgagttatatatataatatgtttaaagagaagtgtagtattgttttttgtccaaccaaaccaaaccaactgttaaaacacattacagcactcattcatatgattttgaataaagacgtacgtacgtgtcagtcaccagctcgaaggatcactaacatagacctttttaagtggttaataataagtgaacacatgtggattaatctaccatggaaacaaataattataaacaaaaataataaaaacttgtaatgaaaatttaattagatgatgccagttgagacccaactaagactttcttaaactttcattgattttaagtctgtagatttgggatgacagttttacccaaaatcatatttatagtattctatttcttttaccccttatttaatgaagttttctgaataattaccatacttatgaatctgattaactagaatggagaatataattttttagaaacttgtcagtatttgattgtgcatgcaaatatttaattagttcatattaattaaaaaattacatgtttggttatacacaaaaattctatagtttaatttaaggaataaaatgagatgcctatttttttgttagttaactaaaaatgcctgcatattaaaatctattcaaatttacccacttttataaggttactatccaatttacccttacacatgttaccttaattaatagctggtgggtattcaatattcatatgattggggaggcgctaattgtatgaaataagaggggcataattggaataatagttagaaaagagggcataaattaatgagttttaagaaagaggtaaaaatgagatggactctcttaaaaaggtataccatctaatttcctcttaattaaaactattaaatattattattaatgtagaatgtttaaaattttaagaaaagattctcatgaagtaaatttattattttcacggtaatacttttttgagtttaaaacttaaaaaaataaaaacaaaatattcataccaagtataagctattagggttcatttattaaattgtattgtattatattaaattgtgttgtatatagcatactttgatataatcctatgctaaatttcaatttatatcaaaatattgtatatttatatgcatataaaagccaatattgtatgtagttttacataaaagtatgctattgaatacagtttaatacaatacaataccgtgtaatacggtataccgaacgaacacatagagttttggtttctgaattgacatgagaattgctcaattctgtaaaaatacatgtttatggtggtatttgggaattttatttagcttagttatggtttaattttgtttgagaatcatatatccattaagctaaaaactttgatttatgtaaacaatcaccaaaatcaagattgaactgaactaaaatgaaaacagatgaagaatatggcataaactaatgagaattaaacttcaaacagtaaacaacactagcaattttaagtggttcaaccacaaaggctttaatctttattcaatatgtgatgaatacaagtacaacttgagtccaagatttttcgcatcaaactcgtagaatcttggagcaaaataacagctcaaacctcaccaagttctctctctttctctctctctgaatttagtataaggcattaaggtggcgtttggctgggaagaacgaaaacataa

SEQ ID NO: 225634 - DNA, 3909 bp, Cannabis indica
ttttactaattttttgtattttatttagaaaattacggtttttggtactgtactcttcttattaatttgatgttgttatattgtatgttatctagatgttatttacatgttactttcatgttacttttatgtagttttttattatttcgtgttgttttataaaacccataaattataaaaaaattcttacatataaaatataatttttaaaaaaaaaataatatctcatgtaattattcttatatttttttttctgctccttactttcatatgggtatgcctatagttaccaaagggccctccataaaaaaaattaagtaaatatatattttttaattgattacaatatatttgtaattagaaataacgtttattaacaaaatgttagttttgctttaataattaagctaacttacacataataaaagtcgaaggtctaaatccaataaggagtataattggtttttcattattaaagtttaatttttaataatatggttgtagtagttgaaccctttcccaaccaataagactttttatttttctattattgtgttttaattatagtcaattcttttattgtcatttttataatattataatatatacaagtttctatcgatcaatttttaaacaaagtacgcccccttaaaaaaaaaacctacgcccacttgtaacttaaattctaggaccgcaactctgtctaggaacacagaaatatactgttaaaaataattatacttactatcaattgtttatttttttgtggcaaattatacaactatcgttaagtgtagatgttcgtgtgtatcgcaattgtttccttgggctatcataaaccaatttacattttccacaggacattatgtcccacagttgtccgaggtcatttttgaccaaaacaagcgcctggcaaagagaaattacataaatctcaaaggtttcatggtaagtacaattaaatatatagattagtaagcctattataggtcccaaaatcccaatttcaatttggttaaacttgattagttgtaaaaactaacactgtataacgtttgtggtgcattttaacgttaacaaatatgaatatacatgtatatatatatacacacaccggccagtaaatacgtgcgttaatttaatttgcttgaaattgcaggcatatatgttccatatatatatatcttttttactaattatcaagatcatgatatttgtgtaaataaatatacgtgtgtacgtacttgcacttgcagataggtaatgctctaatggacgacgaaacagatcagaatggaatgatcgaatatgcatggaaccatgcagtgatatcagatagtttatacgatgggattaggaggaaatgcaatttcagtgatgatcaacaagttgctgatcataacgagtgcagtgttctaatgaacaagtattttgatgtgtataagatcattgacatgtacagcttatacactcccaaatgtgtcatcattaataacactaagaagatcatcactacttctgctaataataataaccaccattcccctgttttccaacgctttcgcactaaccatttgttttctgaatctgtaagtacgttctatgtatacttgttcttatatatataaatatatataccttttcaataaaaatgattaattaattatgtattataatttggcagcgtgggtggcacaagaggccagcaggatacgatccatgtgcatcggattactcagaggcatattttaataggcctgatgtccaggctgcattgcatgccaatatcaccaaaatttcatatccatggactcattgcaggtactgcaaatctatatatatttattagtcactctcacatgcatcaattgctcatcacagcactctctctctccttaatttatttgtctctcccacggaaagcatacatctctatagtttactatctgttaataatatattatgtgttaataaatcaaagcaaactcatttttgacagcgagaagatcgagttttggaaggatgcaccggcttctgtacttcctataatcaaaaagcttattgctggagggcttcgcatttgggtttacaggtacgtataaatcaaaaataaaactacaataatttgttctgtcaccaattattatgttataattatatttttggaaacatacagcggagatactgatgggagaattccagtcacatctactagatacacattaaaaaagcttggattacaaataactcaagattggactccttggtacaatagtagacaggtatacaacaattttttttcctttaatttattaatttatatttttaattaataccattttgttttctctttggtcctatatacataggtgggaggttggactgttgagtacaagggtctagattttgtgaccataagaggagctggtcatgaagttcctcaatttgcaccaagacagtcccttatgctcattgagcacttcttgaacaataggaaattgccagctaaaccattttagcattactttgctgttgtgttattcatttttaggaaaattaaaacaccaattgaaagaattgttggttaggaaggaccatattgttccaattgtatcaaaagatacatacggtacaatagccaagtagccaagtaatattgaataagtaaaattcaaatagtttcttcaatgataatatactaccattatggaatcttgaaatgatagagagagatagagatgttacaacaacaacaaaattcagcttgaactactcactcgaaatacagcactaatcctaatcttagtgtgcttcattcctcgactaaattacaatcaatagcataattatccttcataatattacaaaagtaaacaaaaaaactttaatctatgaatacactcaattgggaataatcatctaaaattgcataaatagcatcaatattcttattatgttctaacactaaacaatcagttactcagctgtcaaaaaagccaggacctgcctgtgagagaagctccttccctgcatcctttcccatactgaccatatcttcataagtatatagaccttttctggatgtctcaataactaaacagcaaggaagacgaaaaccatgttaaaaatgaaaaaaatctaagacatcactgcagatgaaattgagtaataaaagtattatttttgttgacatacctcgagttccatcaggggaagccactaaccctctgaatatgcaattaccatcctcatctttgctagcatacccggcaataggagtgcggcaagatccatccaatgttagaaggaaggccctctcgcatgcaactgctagtctcgtctcctcatggttcaatgaggctatgtaatttgcctgcaagcccaaagggcgagaagtgtcacgaggtgaaaattttgagacaactactgcaagaatattaagttattagaaaaagagattgcttcacattttccaaaagaaaaaaactacataaactaaagaatatgccaaaattatggcaagggactatgctttggagccattttgccagaagagactatgcttgcattccaatgtgtcagcacagaaaggacctaatgtttaaggtgaccaatgtgtcctaaagagaaaaggttttacacaggtaagatgacacatgctctgggtatcagtttgataaaattccatatgcactgagcaaggtgccctgctatgaactccaacataaaatcaatattcaaacttacaaagcatagactatcacatccaaaaccataaccgtttggagttcagaagagagcacagcaaaactggtggcttcaaatcaagcacgctactagattagaacggcaatgtgaatatcagttaatatactgagtttggtgcattataggacaatatgaggtgaa

SEQ ID NO: 225635 - DNA, 1914 bp, Cannabis indica
ttttggttaattgataaataaaagaggtatttctcaatatacctccatttttaacggtacaaattatcataactacaccatacagctagttacagattattcttaattttttaatttaatttaaacaatacatgaaaaggccgaagtcattgtttgtagtgtgagaaaaatgcgaccatacaattataataaagaaatatatctatattttgctgaaagtaataattaatatataaaagacaataaaagtagaagtaaactaattttaaagaatattaattctaataaaataataaaaaaaaaagttgtacatttgaaggatcattgtcattgttaatgacgattctcttatttttgtatacaatatcatgagatgacaaattatgtccacttaaagtttaaaatattataattcagttaagctatgatttcatggcgtcattaagatggattatagccatggttcgttcgtgcatgtcattatcaattcaaattgcttatcatgccctattaattaaaaatattgattatagcaacttaggaaattcattaaattttggagaactactcataaacgtgtatgatcaatgatgtgtgagatgacattgtcattgatgtgaaaaactcaatgcatttgtatcgaacgacacgttcaatcgccttataattaattcatcttggattttatctatagcatatatgtactaattcaaagatttttttttaattatatatgaacccaaatgcattctgtatttcttttcaaacaatttatattaattagaatattcattaatcataacatatattttagctgtaaaatttaagacaatgtgttctcatatgaaaatgatattgttatatgataatttaaaggcttagcaattataaataatatttctggtatgatacattattaattgacaaactatattgtccctagtagaaaggtcggtttgttgaggaagtggaaattggattgtatgttgacatgtatcattagctaaaagatttccactgaaccatttagtattagtgtagagtttggaatttaaagggcaattagctattggagttcggagaggccagttagcctttttctcctgcagtttaattattggggtgacttcatcagtttatttcatattaaacagagaaagaaaggaaaggaagggaagggaagcaaaaaaaaaaaaaaaacaaagatgtgataaaaaaaaataaaaaaaaaaaaacagatgtagataaaaaaaaccaatcatcaaaaatcagagattgataacatgtactaatgtaatgtaatttataaattaaataatataataatattgagactaaattttttatatattatatattattaaaagataacatatattgtatgtataagatacatatatgagcgggaaatttgattttgtattcttacatttggttaaaatcctctaaactcataataactaatatttgtagaatatgataacttttatgatactcctaaaatgccccctatttacatcacccccatttacacaattggaccccccctatcggaccccacatcggacacaatcggacccatcagacaccatatcggacccattggaccccccatcggaccccatattagacccatcgaacctacttctcctacctcgcaaactcacagttccattagacccattggaccccaatcagacttacatcggaccttacccaaatcatagatctaagattctaaaacctaaatctatccctaaatttaacaaaatctatctttaatactaaaatcacaaacaaaatcaataaaaaaaataaaaaacggaacacgaactcacttttgatattgtgtttaattcgatggtagtgcactgtgggtatcgtgggtcgatggtggtgcttcggtggtggtgc

SEQ ID NO: 225636 - DNA, 2220 bp, Cannabis indica
ggacccacaagatcgagtgggtattggcgcgggtgcatattgaatgtggtggcatgtgttctagtagattactctcagttaaggattcatttcctacatctgggacctttctgtaaaatgaaagcagctgcagattttaatgtggcaagcaacactcttccgatctcatttttcttaagaaaactccatactcttcaatctctctttgcttaagaaacctacgaaactcctacaatgtagcaaaagactaacaaagaagttcaagcaacaatttaaacaataacgctcttccatctgtctttggttagaaactcacaaactccaatgcaagcatgaacgatgatcatcaacctacacaatgcagggaaagacagacaaagaagttcaagcaacaacttagagaaggacgttcttccatctgtctttggttagaaactcaccaactccaatacaaggatgaaccacgatcattaacctgagtttcttcaacaaagacctttcatcacaatttataagaactgaaccaattcttcctgccatactacacaacccagaagacaacaaaaactctaatttttaagaaattaaatataatattgttataaaaatcttctttaacttattttcaagacgacaaaagtgttctataaaaaaacgatagaacaaaagggataaaatcaaatccctaaaatcagccgcaaaaaattgaagagaaccgaaccagagaagaggaagaagaagaggtctgaactgaaccgaattgaagctcaagggtttgatagaaagaatgggttttgaacgcatattcatagaatgggtgggttgattctttctatatatatgagattctgtagaaagtcccacatcgggcacatatactattttgaagaagtttatatagattatgccaaatgaacacatcgccgggtccagtaacgtgtacctgtaaccaagtggggcaataattggttaggatgcgattgtgttggacgtggtcatctggaaggttccggccacctttaaggggacgtggtaccattcctttaaggtggattgagacttcagtggccgaagccttgaatcacgccaccaaccctgtgggagggagcgttagaggtgttggcctaggtaggcgtttcaagtgacttgcacggccctcataagtacaaactaaccatttttatataacccttaaataatcatacctattaattatttttctttaaaagaaaaatatcgctataattaatctcctaaatccatttcttaaaataaacttttttactcgaaatatctattttttaaatttaaacatttttttacttatttattgaaaataaatttatttttcaaaaataatttatatttccattagtcgctattcttaaccccattttgtaaaagaatttttgtaaaattacacttttttactcttttagtgaaaataatactatttttcaaaaataattttatctttttattagttttagttaaatcattatctcttaaatctgtttctaaaaaataaatcttttaatctgtttccaaaccctattttgtaaatttaagctttttttactcatttagtgtaagtaactctatttttaaaaaataatcatatcaatagttgaattcctatcccgtaaatctattttgtaaaaataattttcttactatttagtgaaaataactatttttaaaaaaacaatcctaatttttctcttcaccccattttgttaaagtaaacttttgcaaaattacactttttagctcttttagtgaaaataacactatttttcaaaataatcctatctttctattagttaaatccttatctcccaatccatttctaaaaataaactttgttactcatttagtgaaattcctatctcttatatccattttctaaacttaaatattttttaataattaagtggaaataaatctattttttaaaaataatcttatatttccattactccctaaatttttgtactcatgtagtgaaattcctctcttagtaaattctgtgaggaaattatactctatacattttttatattatcctcttttattttcaccatcttttttaaaacctatcatttttgcctattttttaaaacactttactgattttatccctgtcacatcaatatactctctatgtgactcatttgtgtcagggtattttgggtacgatacatataaaaagaggtatgt

SEQ ID NO: 225637 - DNA, 1682 bp, Cannabis indica
taagttcctggtaaaatataattccaacactccgaaccccagtttagattttgtggcgcagctacgtgcgcagggcacatggcttccttatggtggagatgccttaattagatccaaggcgtagaacatccagttgaggaagctggttagttctaagcctccacacatcatttcctaaagatgattcattaatagcttcagggtaacaatattttcttgtcttctcttaagctggctttctcatatttatgatcacgtgacttactttctttacattcgagcttgtgtcgattatgcttacaccatggataacgaacacaagaaggttgtcgagcttgtcgcaaaacttttagctatggagaagcatgccaacgatacaaagaaccaagtggctgactatatatttattttgacaagctatttttataaatttcttggagcacgactccaatggcctaaaccttgaaattaaataactttcttttaaaaaaagtttaataagtgtttcagacgcttaaaatttttgttcctattaacttgaattaattgattttgaagtctggacttcttttgagtttaattaacctgagttaatttagcaaactttttgttcttcaaatatggtaaggtagttgcttatttctagatccttgaggctctagtttttagcactacttcctattccgatacttggtattaattaagtttgaagttgaacttctcaattgacttagtaaacttattaacttaggaaatatggtagatagttgcttacttccagatccctgagggtccagtttcaagttgtacttcctactctcatacttaaggttaataaagtttgaagtggtataagatatactaccccctaagtgattaagagttttcactcttggtcacttgtttcaagacttggagaaaattgtaatatgacatgtgttgacctgacttttttagtcaacgatagtgagtcaaattaaagcgatttaagtataattgaaataacaaatatgaataatgtaaagtaaagaaaacaccagaattatacaggtttgagcccttggtgatggtatcctactctttagttgtattgacttgtgagaagatgaaaaagaattcctcgatctctcacaaaagctcttacaatgatctctgagtatcctactggtaaaccttgatttctctcgtttgtttcctctgaatgaattttgtgtccttgaatagtgacatgattccactatttatagggattaattacatcaattggtttcccaaaactaatatgaaataaaatgaggaaactatttactttataaaattaaaatgaacaaaataggtcccaaggcaagttttctttcttcttcattcactacagtgctatcttttctaatcaaagaacttactcgaaaatcgtgttaaataaaacttttatattaagtattaaactttataactttataaaatcatttataagtaccgggatcctgtttctaaacttttatacaaaatacacaaaatacataaccaggtcgcacaacaactacaaaataacaaccccagatgtcccaagaccgaacactccaggtcgcgctgccatgacatgtacaatctcatcctagctcaggctcactcctgttcagctttcgccttttctttacctacacatggaagcagaactgtga

SEQ ID NO: 225638 - DNA, 3055 bp, Cannabis indica
gagagctcttagaaaaaaaatggctactttgctttcttttcctaatttttttaaaatttttttttgaataaaagataaaacatgcataactcaatcctttatttcagccaagacaaatcaaataaatcaattagttcataactctatgtccactaaaggacaaaagcttaccctcccacaccaaaaggattaaaagacactaaaagggtattttcaaaaaagctctagattacttactaatcccgacatttccaatgtctacataaactgccccaatatactaaaatactaaattgtggttctactgagccatacaccgcgttccatgttgtcgggcactgaaaattccaaaattatgaaatttcactgtatgacataaaaatgcattctgaattcaaatataacaacataaattattatttaaatatctataaataattttcataagtaaatcttaattaactgctaatttccaaatttaatctaagcggtctttacaaatagcctttcccttgcccctagatgcaagcacgaggcgagtaggtctttagaagcttggtctttgggcctgatatggagagaagcatcatcaattgggccactgctagccaggcgcggcagagagccttctatttcctctctagattctgtgcaatgctagataaaggtacctcatcatcaaagtcaagagcttacccatctccagggcaggccccatctatagccggtggtcttgtaactctagggataggagaatacaagtcatacttctagaaattagccacattggtcaactggattacatttctttactgtaccaaaagagacaggatgtggttttccatatcccttatttgtaaagtggggacagaatgcttgaaaaatttcactctagaagcatcgatgacaaacctctttgacatcccaagcaatgaagtatttatcagtatattcaccaagataaactattagtatcatccagccactaatggcaaacttcgtcaaagcagaagtatccagactgatgttgccacgaaacagactccaaataaaaaaatatccaatctcataaggggtggttgaggccaacctagctccttatacgaaataaacatcgccgcaaggtagttgatacctttcatggtgatttgggtcggacacatcgtgaaatgtgcagcaacatctcagaagtacggatgaaaatgtagcacaactccttgcttaatgttgtactttgaccacgccatctagttgagggccaatatatgcactagttgatcttgcaaaggtattttacaatgaataccacccacttcccattagcctgtattctttcaaaactatctatcgagatagaagatacgggggaagtccacctgtttccttgtgagctcgcatctagaatctcaggctcagaagactgatttgagacatgatccaaatcgagtgctaaaatctcatcaagcctgtttagtggattaccatcagtatcataatgacccaaagggcagttggagaggacgacacaaggtctatgtctcttcctcttaactagtacgacctcctcaagatcaaactcaacattttgacacttatctccttagtcagtcttgggactgatgttaagatgaggcatggtatccccttctaccatatcaatttgaccccatatagccaacataattgcataggggtcacagagagtcactccaccacctgtctgttttgtgctgaccatagttacaaaataaacatcgacctatgctgctatcacctcccttattcagtattcaatgctacctgcatggaaggaacaaggggaggtgagaaacctaataaaggtataaacatattaagacatatagtaagtggtaagttatataattgactgtaatggactcactaccttgccttatacatattttccaagagaaaccaagcataaggctagagttttatatgcctcaaaggccatcagaagaccctagtggaggtcaaaagagggagaaaaacaagctacccacttggagccttagccttggctgaccagggttctaagctttagtggctggccagaccccaagacccagtgtagtggccggccaaaggctatcatgcagatcaaaataccaaaaggaaatcaatctaacgttagaatcaagacatgttcgaagaaaaaaatagtgttcatgaatccatggaaaaatcaaccaaatcaagtggagaatgcgggaatagaaagcttacccactacaagatgtcgttgaggaagaaggtgggaagctcagattgtagaaatggtgtaaaatcttgggaagatgaagcttatgggttcgaccctttagagagaaggaagagctttttctaaagcaaatttttagtgagagaaagtgaaaagtaaaaagtgagaagtgaaaaaaggttttccctctaaaaagcacttatttaatgcatgtggggcccattcttcacttacttcacctacacatcataaaggcaactaaagtagttatttttctactgtaatgagatcagaccatcaagacaaagtgcttcaaaaggctaaaagtgaataaacttttattcagaaaaggctacaacagtcctgaccacaacaacacagttggtaaagttcatatgcatacaggcgtccacatagggacttggaggcaaatattatcccaatttctatcctcctgatgtggcatgattacatacacaaaattggtgccacgtggcagcagatctcaccaataagaaggtcaagtcagcacttaaagaaatgtagactccaacactcaaatgggcatcatgtgatagactagctccctcataggagctggccagccacccttggctggccctatggcaaaccacctttgggactgcaccatggatggtcagcctgttgggttttgtgcactaaataaaacccattacaatctgattagttatcaatttaagaaatttgaagtgattatgttaacatatatttttcatgtttatggtttaatatatattcaatatatgaccgaaatcagttaagtccagaaca

SEQ ID NO: 225639 - DNA, 3218 bp, Cannabis indica
tcctaatattaaaattttattgtgcgatttttctgaaatatctctacatgtacttgagatagacaataaatttttacagattaaaattttccgctaaaaaaacaaattaaattcatagtagaaaattaaaagtagtataatatgccaaaaggaattattaaaacatatactccaaactccacttttcgatctgaatttgataatcaatacatatccatccttgtctctctagctagcaatatatatatacatatatctatatatatatccagctcaaccaaggttcttctatgttctatatatatagcatatatatatagagagagaaaggtagagtaatatcaaccattagttgaaggagaagtactcttcatcataattatacattttggttttcaccaaaaaaaaagtttttagtaattaattcccaaaaggtagccattaacatcaatgtggaacccattgatgagtatatatatatacatggcgaatataaagacaccaaaccatagcattgaaaagctattaatagttatatgtgtagtgttaattaatgtgtatttttaaaaaggttaaataagattttttactttaaaatttaatatgtattgagttatattcttttcatgatattaaaaaaaatttctaaattattgaaattgttagttttaaatttttttgccttattttacgaatagaaatctcatgtagatatataaaagtttaggatacataatttagtacatgttaaagttaggggtataatctaattcatagacaatcgatacattaattaataaaattcaacataattaaatagaaatctttgaattcaacaatctcaaattctcaatagtttagaagaatttttaacgacctaaaaagttcaaggactataatttaatattgtcgaaatttaagagacaaaagtcataattagccttttaaatctttaataatactgattaattagtcaaaaaaactgatatgcagtatatataatattgggtgtttctacaaagcatcgccttaaaaatgatatactaatgtaccatttagaaaaaaaaaaaataatccaattttttttatcatattcatagttatttaaaattttaaaatatcttacaaaattttgagagatataaaataatttataatataaaaaccagcatttaaacaatttattcacacacgtataaaataaaataatcatgcgtgcaatataatatttgaatttttttttcgacgtgttaaattattctgaatttcttaaaattttgtacaatgtcttaaataactataatgtacttaactatgagaaaaaatatatctgaaaaattatttcgaatactaaaataaataaaaatatatcagtacaacttttttaaagagtaaattataaaaaatttctataaaaataattataaggatctgagaaaggagacaaagctcgtgaaaaattacctatatatctctaataataatttgcatgtaaaaaaatacacttttttcaagaattgatatcgttgcatgtgaacacacctaactacgtacaaagtcaactccatatcccaaattttattttttgacctcaatatcttttttcacatacattattattattattattattattattattattattattattattattattattattattattattattattattgtcaaatatctttatacagtaaatatatatagagaaacttttagctaggtcactcatcttttattctaattacaaattagctttgtttataaccactcattttcttttacaatatataatatataaatatatataatttttcctcacatgtgattaccataatttttttgtgtactataataaatatatatatattatttatttccttgaccattaattttttccatgcaaaaaatctcaacagtgaagacaaatattatctaattatttccacggatgcatatcatataatagtattggtcaggtttttctggtagttttcaaattaagggggtgtttggttataacacttttgtttttaataagtaaaatttgtgttttgaaatttttgtttttaaaaaataaaaatacattctatttttacttttgtttttaaattttaaaataaataataaaataaataataaaaatgtattctataacttttttatttatttatttaagttgggtctaaggctaggtctggggccgggaccgtggtctgagtctgagactagggtcggcgccagaatgtgggtcccaagatctaggttagggttggagtactctaaaatattgattaagaaaaaaaaactatataaaaaatttgaaagtagtgattatttttttaaaaaaaaattaaaattttgattctcaattgaaaaattaaatacagtgaaaatagttttataaaacttgattttaaaaaatatttttacttttctaattaaaaaaataaaaaatagattaaaaaagtgttactaaacacaccctaattatataataaaattttagctttcatataattaaggggttttttttaatttaatgttgtttaacactagtattatataaatctaggtaaatactatttttgaccatgtgttttgtataagttacttattggacgctctattagtgtgttatgttaaaaatatttagaccctttaatttgttttttaaaatagtacaaattagactataaactcaatttctgtaatttttcttaatacaacagatttgaagtcaatttagcaagaaaatatacaaaaaatgtaataattcctgtcataacacctttaggttagattaatattaaattttaatttgacaaaagttaagcttaggatctattttgtacaattttaaaaaatactgagttgtcatttaacaaaatagagagttcaattgataatttatcaaaacacataatctgagttgtcatttaataaaaagaaggttcaattgataattttatcaaaacacatagtctcagttgtcataaccctattatatataatataaatatacaaatccttcaaatgggcttaatttattaattatattgataattttaaaaaataccaaaacaacaaaacaaaattataaaaaatacggtttatacagagtttttaacattttacggtttttaaattttatttatacaaaatatagtcttttgatgtatttttatattgtattcttgttattt

SEQ ID NO: 225640 - DNA, 2225 bp, Cannabis indica
gcagccagagtgacgtactcgtgtataagagtcattcattccgtgagtgtaagggctcaatggaggcttgaagcggggacgttacagatgaactctccgagattgacgttaggtggctgttagtgggtcagtttttgacgaatcgatctattgatttccaggcaatgcagaataaaatggccactttatggcagccaggtcgtggcctttatgtcaaggaactttatctaaacttatatctgtttcagttctaccatgaagtcgacatcgaacgggtggttgagggtagtccatggacgttcgaccgggctcgtctgatttttgaacgtgtgaaaccgggtactaatcctcgacttgttccattaacaaggttagaattatgagttcaattacataacatgtctattagatttatgtctgaaagaatcattagcggaattggtaattatctcggtagcttcgttaagtcgcatttgaataatttttttagagtttggcgtgattacttacgtattcaagtgaaaataccagccaatatgccattgaaaaagaagaaaaagcttgagatccaaggtggccgagtatgtcatattgtttttaaatattgagacctcccaaatttttgctttatctgtggtgttttaggccactcagagaggtattgtgagaagttgttcgacacttcgaaggatcagattgtgaagaattatagtttggaaattaaggcggctcctagacaacgtaactgcgctgatggttcgaggtggctgcgatcgggtctggtgaccaaacagcggtcgtcttcacaaagtttcgctgttaactttgtgagtgctccgagtgttactccttctgttacggtggtagctggaggcagtagtcaagtggagaaaaatatgggatcatgtattatgggatgcaatcaagggagggctgactatgtgattgataataatcaaaatcaatcccctgatatgagggacgatttttttggaaaaataaatatgaaaagtgtggagggagagtcaaatattgggttgtcttttcttgaagttaaaaaaaggagaatgggccgagagagtgatagtgggctgggaattaatgtggattctaatgacaaaaattccacttttcttaaaaacatggaaattatggagaatgaatatgtggtgaatggtgagacttcggagggtacaaaaaacttgtgtggggcgggtgctggtttccaagcccgccaagaatcatgaatgttcttagttggaattgccgaggcttgggaaccaacagagtgttcaattccttagagaaattatttctcaaaagagacccaattgcatttttttatgtgaaaccaaatgtcttaaagcaagggttgagagcttggctagattattaaagtttgaaggtgtttttgtggtggaagccttgggcccagcaggtggattagccttattgtggaagaataaagaagaggggactttgttgggttactcaaataaccatattgatattgtggtttcttcccctcatgcaagaaattggagactcattgggctttatggggaacctgatcgtaatagacgccaacaaacttggaatcttcttagcacattgtctaaccaatctgagttaccttggtgtgttttggggatgtcaacaatattgtccgacaagaagataaacggggtggtagacgttatctgcaatggttgctaaccggtttcaactcgactcttcgtcaatgtaacctcactgatttggagcttcatggacaccccttcacctgggagaaaggctgcggttctaaccattgggtggaagtgcggcttgatagagcgttggttactcagtcctagcggttagcttttctggaagccactcttaccaacatggaatactccactcgagatcgtttctccaatctttctggagccgaaggtacttaataatttttctcctagtgcccgtttccgttttgaaaaaagatcctatttgttttgagattgtgaatgactgttgggatcaaacccagttttgtgatttccctgccaatatttctttgtgtgctgaaaaattggctctttgggggaaggagattacgggaactttgaaccatcagattaaatgttacaagtctgaattgaaaattctgcatcctcgtcgggatagtgattcggtccaacgatactctgaaacaaaaaagaagctttacgaagctcttgata

SEQ ID NO: 225641 - DNA, 2756 bp, Cannabis indica
tttttttttcattattttcagttaagctaagcttgaaaataaacttggccggctaaatatttgtaccaaaatagtaggaggacagtataagctcattattatttgataggcagcaaaaatttgtggtgccatgattacgttatattaattatttaattaattttattggtttcttcttctattcgatcaatgatgtcccagctagtcagttacatcataatcttcaattttaaactcttttttataaattcaaccaaaatcagtattgactttaataattttcaatttcaatatactttactatataattatgtctgcgtcatccaaaatatccattgtgtatccgctgacccaataaattggtgacccatgtcatttgccatatataattaaattaagagaggttactattaatgcactatgaaactccaaaattaattataccaacatattatttagaatctgaaacctaattaatttattattattattgtaacataatactaataataattagttatgaagagagagaatgtcaaaatctcaatttatatttaatttttgaaatcaacttgggtacaataagggaaccaagaaatagagattgtgttgcagtttaagcaacaattgtagctaaaaaacgtgcctccaaccatttaaaacaacatctattttggttaattaattaatacaccaaagcatatatttacaacatttgataactcaacttgattattacaaatataaagatacgcgtatatataatatataataattgctctcactataattattatatgtatatttttatgcaaaataattcagaaaccatatgacagcgccttaatcaaatccatttctttatttatttattttcaggtaccaatcatatccaaattaagaggattaagtgaaatcatgacgtttttagagcacgaaatatttgaaaatagatcaatggacagttatatatattgcaatcattaatgatttacgtattgaaaaaaggttggcaagacattttctttttcttttgtgtgtaatactaatgaaactgttggacctttcccaagaaatgtttaataaagttttaaaaaattgtttaaagtaataagtctttttagtagctagatgtatctatccattttcaaagtggacctatatatatatatggtacagcgataagtcaatttatttacgaaatctataaacaaaaacagatatgtttcgaattcgaaagagagggaaaattacactgtagtatatacagctataatgaacattgtatttcaatggtgctaacatgtgcttataaatatagagataattattgactctccattctacaaaaaaattagtttatataagtaaagtactatatattcttaaattttatatttctctatataaatatttttatttaaaacgatctataaataaagtcgtttaagtttctatacgaagttatcgtgtctttagtagaaattctttacttgatctatgtttatgcaactatatagttttggatgatttgtaatgaaagttgctaaattatttaagaaaaaaaaaaaaaaaaaaaaacctaacaattcatttagttttgtgaataaaatttgtcccaaattatttaaaagtctttccgagcttttcagaatatttggcagaaagaaatactaaactacatataatatttctggcacacaaattctctctaaaccattatttattattgatataaaatgtaattataggcatactttagtgattctacactttcttcccaaagaaaggtaataaattttattattataaaaaatttattatctaatattatagctaaatataaagggataagttaaaaaaaatacttttttttatatccattaatacatttatattatatattattaaaatatatactctcactctctacctaagtctagcttataatttacattttacactaacttaaaaaatctaattgggacatcatttataaaagtgagtaaaaaatatgaaaaataaaagtaaaaataaaaaataaaataaaataaaaaataaaataatataatttcttcaaatataaatataaatataaaataataaaaattaaaatacttattgttaattagtacaaattttgcatcatctttgagaggcatcatcatgttgtcttatatctcaaatttgacaatttttaacacttagacctaatattttgccaggtgactcatccttacacatattgtaatttatatataattttttttattaatgtattgggtaagctaagctggcactgtgttcgatataaaatcaggcctaattaagacagatttgagtggatcttttaatattaattattacataacattaattttgagtcaatttattgttggtaagatagattgggacaggtatgagttttattttattttttgtaacatatatttaccattaatatttaaatcagtcaacaacattaattaactgcaaaattagataaatatacgaacaactaattggtgacaaagcattcttacaaataataataatattaataaataaaatacagttgcagtcttgcagaacatttgttcaaatagaaactaaaataataacaaactgtattgatctatatataaacttcataatactgtttataataaaagtaaaataaaaatatgatcatacaaacaatatgtaatgaagaatattatatacaaaaataaataacgatggggtgataagcatac

SEQ ID NO: 225642 - DNA, 1806 bp, Cannabis indica
aagctaaaaacctagtttttctctttaggttcaagagacctcttccttcttcttcttctcttaattttgaaatactatagcctctcttcacaaacaattttaagccttagtgattgagtgcatgcctacacatatcaagtaattccaagattcaagaaacaaaagtggagtttacacatgattcgagaattacaaaaattcttgaattaaaaatgcttgatctaataaaaattttaaaataaataattggacaaaaataatattttgtaaatgtgagatttcaagtaataggtgctatttcatcaccttattaaaatctcaattcaaaaatttatttctagaaagagggaaaaaatacaagaagaaacaaatttactaaccctgtttactgagatttgtcccaagcaagcaaagaaataagtggactggtggtgctcctctggttatcgaagattcgtcaccgcaactaaggctacttttgtaagaagaggagatttctattagggtttttttcgtacaagttttttttttgaaatctgtacaagtttttcttgcatcgttaatataatttatttttagatttttttgtgtaacgtttttcttttaaagatctataccaatagttaaatatttactataaaatattagaaatatgataatatggcaatacatgtaggataagtaagatgccaattaggatatttttgacacatcatcacacaacttaatattatttgtaatgaaaagttaaaataataagagggaaatgtaggcgccaaaaaccaaaaattgtccctccgttatatgtgtatgtagcacttcttacttatccatatttattagtaaataattatccttttgcaatgttacaatattggcaatatttacataccaataacttttatcaaaagaatttggtagatactacgaacctttctttaccaatatatattggtaggtaaagataagatttcttgtagtgatataagtcctcaatcatagtgtgtaagactgcgaagaatctaaaaaacaagaaagagtttcgggctcagagtgatactctgctacagaaaggatacaagggttagagatctgagaggaaggagtcatttaattccgctgcaaccaatgtaaggtttctcatgcctcttatgtgtttattttatatcgttttagaagttcatgtttaggatgttaaaaacatacttgttagtaaatctagatcctggtaaaatatattccaacactaaactcatctatttcaaccaaattcacaaccaaaacttaaatccatcaaatagattttctaaaaattaaaccaatagcttaaaacacaattcatgcattaaaaatccaatggtaaaaaacccccaaaatttagattatacaacattcaaagaaaagctcaaaacttgagcataaacaaccaaaacttcaagctcaagaacttgaacttcaacaattaatttcaaagttcaataacataataaaaacactaataaagttccttttaaattctctctaaacctaacccaacataaactcaaaagatccaagtacaaatattgtcatatcaacaagaaaacaacaacaggcatctcaagaccatcccaacctatttcatgcttttcaaccatcaaatcacagtataaaatttattaaatttcagcaatagaaaactacctcaagcttcaatgcaatgatcaagccacaactcctcaaaatcaagcataacccaacacaattctcaagtaattcttcaatttaggaataggttagagagagagagagagaacttcgagtttg

SEQ ID NO: 225643 - DNA, 2326 bp, Cannabis indica
actaaaagtcacatttagtcataaaaaatttatgttgtgactaaaaggttgttactaaaagtaacagttttttgtagtgccagaaaggtataccttggggtacacagtatttattgttctttcttacagcaaaaagcaaagttaaattggcttcaagatggagatagaagcacaatcctctttaatgctagtctctgagacagtagactccaaaatagaatttattctataaagttaggtgcaagtctttgaatggataagtcaggtgatgttacaggtgtattccttgaatactatcaaagtttgttgagcacaagcatgactagtcagcttaagataaataagtccatagttagagttggtacatgtgtggcagatcaacaagcagtaaccttattagcaaagttgttatatgatgatgtgaagagagttgtgttctcaatccttggaattaaagccctgggtctagatggctatggtggttatttttatcaggagtgttgggacattattggggacagcttgtgtgaaactatgttatcctttctccacttaggtaacattttgaaagaaataaattcaactgtgatcactcttgtgccaaagagcaaatatttagaatctatcagtgattataggctgatagcgtgttgcaatgttatttataaagtaggtgccaagatgagttgtacacgttttaaaatgattctacctcatcttattgctcaaaaccatggtagatttgtacatagaaggttcatagcgcacaacatagtgataggtcaagacttggttcgtcattatggaaagaagaattgtagaccaagttgtatgattaaactagattcagaaagcatatgacacagttgaatgagaattccttgaagaaatgctagttgcttttagatttcagaatagctttactaatctcattatgagttgtgtcaaaacgcctcggttttctctaatgtttaatggagaactacatagtttctttaaagctaatacatggttgcagcaaggagacccaatatcccctcttttgtttgtcctaggaatggagtatctttctcgagttatgaagaaggttgagcaaatagaagactccaagtttcataatagatgtagagacactacaaaaaattttacttttagtcacaacagaacttgtgactaaaaatgaaaaaaattgttaccaattataaattatgattcatatgttgtgactaaaaggtccgtggctaaaggtattagtcacaaaaattacaatttgttgtgactaagtatatttttagtcacaatacttgttatgactaaaactaaattagtgacaacttgtaactaaatactatgttttagtcacaagtaacattttgttatgactaaaagtcacatttagtcacaaaaaaaaatgttgtaattaaaaagttgtcactaaaagtagtagttttttgtagtgagaaaaatctaaatcacttgagttttgcaaatgatgtactctttttttgtaatgatgatttcaagtcaatataccatatgttacgaggcttgaagttattttcacaagcttcgagtctctttccaaaggaggcaaagtctgtggtgtactatggtggtatgtcggatcaagatgtggaatgaatcttgatggcatctggttttcaaagaagcaaattaccattctggtaattggagtgccaattttctctactagaattttagccaaaaagtgtgaggttttagtagataaaatcactactacaaaaatagcttttctcgacattttaaatagttgtttaaaatgtcatctggttttcaaagaagcaaattaccattctggtaattggagtgccaattttctctactagaattttagccaaaaagtgcgaggttttagtagataaaatcactactacaaaaatagctttttccgacattttaaatagttgtttaaagcattctcgtcggtttctataaccgtcgcctatgcgaccgccgtaaaacgggtataataggcgacgattcaaaaccgtcactaatgtgggtttcccgacggtttaaaaccatcgcctataactgggtataggtgacggtttataatcgtgccctataactgggtttcccgacggttttgaatagtaaaaaaaaaaaagaaaaaaaatggcagaaaaatctttattttctcccatttttttcatccattagctttataattatacctaaatattaaagtaaaacaactaattaattttgttacaataacaactaacttttaaacacattaaatttatacaataacaaaataaatatacataataaataaaaa

SEQ ID NO: 225644 - DNA, 1673 bp, Cannabis indica
gatcagattggatattatcttgaatattcaattggataagtaattaaattttatgttattatacttaatactatatccaattatatattggatgttagattttattagatggattcgaaaaagtccaatagatatatatgttggatcgattagatgaatgaaattaattggatcggattggatggtaaaatctaacctccaatatataattggatcggatctagataggcctaaaaacattgaatgttgtggtccaatgaacactttagatactaaaacttccattctttcattttgggtattcagttcaaagagagtggatgattcaaggcaacaatgggagaacactcaatcatccataaacaatcttaacaagaacaatttagcagagatagaatctactgtgaagtaagtcttctttacaccaaattttttaatgttggttgttcttgttcttgtgttaaatattttctaaatttagtgttcatttctttaatagcaaaaacatatctgcgaatatcgttgcacacaaagaattcgtttcagcatctcaaactgttgatgaagaattcaacaccagagcatctgatacattgacaactattaatggtaattactgagttactttgcaatacaattttcttttccaacaatcaatctaactcaaaagaaaactcgggcagattcgctcaatcaagacgaggaaaataagaaggaaatagattcaatgacagccttgtgtatataccaactcaattcaattgaagagaatcatgggcaaggcatattgaatattcaaagtcaaacagagaaatgtcttaccaaagattatatggtaagttgagaagtttcaatttcaaccaatttttgcatcatattgaaataatttgataatgacatgattgttgtgaactgcagattgatgatcatagtaacgagacgcctaagagacgcgtggtagaaatcccgagcttgaaatcaatagaagagatgagaagcaatataaagaacaacaaaaagaacaacacaacagaaagcaagatcccttgtctgcttctaccgccattttcgcctatcagaactccttttgcagatgttaatgagtaaaaaaaaacaagttattgtcatgtgttgtaatagtatgaaaaacaactactactctactctcattccactcatcaactgatgagttattagaatctctattatgtgtaggtatagttgagttttgtagtatcacattctggttttcaaattttatattttttccattcccactaatcattatggtgtgttttacttaattttataaggattaataagtaaacacattgatttttgattaattaattcgattagagatagattttgttataagttatttcgattatgtgtaaatgcctgattagagtacaagcaatgactatatggtgctcaatactatcatgaggtgacatcttacgagtgatataaaattaaaatactatcattaaattttgattaattaaattgattggagatagaatccgttataagttatttcgattatgtgtaagtaaatacatgattagagtacaagcaatgactaaatggtgcccaatactatcatgaggtggcattttacgagtggtataaaattaaaattacgagattctaaattacatcaataatag

SEQ ID NO: 225645 - DNA, 2514 bp, Cannabis indica
ctctctctctctctctctctctctctctctctctctctctctctctctctctgtctctctctccccgacctcttgcgcatgcacctaaaatattctccaccaaaaaccccaaacaactccttttgattgtacccctctctccttttaggattattattataatctcccaccttttcaattatatcatgcttgcattagtaattgattaaaaacctaaagtaatatctatatatatatttatatataaagagagaataagatagttggcttatatatgtgtaccttgtataaacaattaaagctgtatatataattcttattactaatcccactccaaactatttaatatttttctaactactatttgatatgattaatatagaggcctccatatatatatatatattgatgcctatgtatttatatatatatatttaaaacaggaaacttctaatgtgtcttcactaatgccattaaatttacataacatatattaatttgatgaataattacaattataatttcattattatatatgaaggggcttaattatatatacatgcaggtattgtgaaatagttcttatttcttttcggcacaaattgtaattttgatttttataggatggcgtgtatagtatagttatatagttgctttaataagttattaagaaatattttgaataatttagaatgttaaaattagaattcaatctgttcgtacacagaataaaaaaaaaaagtaaatgaatatgcggacaacaaaattgttttaatctagaatttgtcactctaaattatttggattaaaaaaaaaaaaaaaaacttgtggaaagtctctatgacatgatctataattaataaacaccttacatataagaaaaatgaattaaggttacatcttatcaatgtgccaaaaaaagaaaaagaaaaattatatggaaatatagtacttcctaccttgttttatgagacaaaaaccagttattaagaaagttatatataacaacacttgcaaattcgtaaacaattaagacaccattaattattcattccactacttgaatattcagtggacttgtatggttcgtgcttaacctaaatgtgaccacttttgtagctagctagggtacaaacaagtaggtatagtaactatagcttcttcttcttttttctttctttttttttcggtataagtacaccataagttttctattacttaagattctatacgtagaaactaaaagaagggtggtcaaaaattgtagagagagagtgagaaatcttgggaacaggagtgcagaatgtcagcgaaaggattttgtctagaaagaagttttttttttctttctttaatttttatttttaggtgtgtaaagggtgagagcagaagtggtacgtaaaaaaatagttaaatgaaactagggagacatataaacacattataagttaataaagattattattacagttactgatgtacccaaaaatttgtgagtttgagacaagagagagaaagagaggagagcacacttaattagcacaaataataatgatactaaaaaggaacaaaaccaaacaaaaccaacccaaagcggagacaccggcgctaaaggagcctgccttgggtcttcattaggggacaccttccttgggttttgcttactcctttttcccatttcaccatacactactactcatcaattttcaattcttttcgtttattatattctctctattagggccacacatactcacatactattcttcttcttcttcttctttttcttctttttatagatgatttttgggatgtgtaaaaagacccctttttttcatttatataattttttttttgggttagttagtctttctctctcactcatgatttggggcgataagttcgcgtgccactacccaaacagattcccccacgccttaaaccaaacaacaccatttagcacgtacccttcttttctttcttcaccagatcctatgacacttactttctctttcttggactcaaagaggtcaaaactcaacaaacccatcttcctctactttttttctttctctcttcattttattttatatttaaattttgatatttcaagaaaaatttgtatggataataattatgaagaattgaaattgaaaagaacaaatcagaatgccggtctaatttgttcttgagggttcttgattaaagaagtgaacaaagaaacacgaatgttttctagtcataataaatgagatttttctttcatgccagtgctactacatgtatggagggggccatgttgttggccttttcattatcagaaaagcaattacacttttatttcatctacatttctatatatgaatgaccttttcttaacaataatatcaatctctgttttctttatattaaccaattagaagttgtaaactgaccttttagtaacttaaattgaggattgtgtgataaccctttgttttttagattcaaatgggaaaatgggtcagtggtaat

SEQ ID NO: 225646 - DNA, 2179 bp, Cannabis indica
gctatttaaggatttctaacatgttattattagatgttttttcttgttaaagagctttattagatgtatttccttgttaaagacacttatttattataaccatttaatatatgttatatcaaatcaatattttgttgtgtattgtattctaatattgattatcatgatactaactccaaaatctgccaaattggtcaattttagaatatctagtattaacttcttatagtcaactgggtcatcttaacatcttattatgcaaccttattttttttacccctttaaagttacaaagacaaaaagatagagaattttacttaccgcgttcttattgctaattgaaaagaaaaaagaaataagtacaaaaattaactgttccaataatttatgacattaaatatcgtagctgtgaatttggtgtgaagaaacctatgtgataaacatgtttgacatggacaaatttccaccaaaaaggacttgattaaaataataggtcacttcttcacatggagaaactaaatacaattaggttcacaattatattagattgaccttaaaaaaaaaagaaaaaacacttggtcaacaatgctaacagatggagagagaatgcccctctgtgctcaccacctgtctattatcttttgctctaaaccacctgtctatttttgttcacaagtttttttcacatctgtcctaaccaattatacgtgtatataatgtataaatttgtttatataaaattcatttacaagacaagacaagagaaacccaaatgttgtcagttctgtttctgggaatatgggttttaaactcattcctataataatcaaaagagagaaaaaagaaaaagagtttctaggaatagtaagacaacaatagaaggtgatcaaagatatacttgagggtgagtaaagctatttaattaacattacaaaaatgtgaaattcggacaagcaatcaatttagtatataaatctattattgaccctaaataaagtcatacattcacattatatatttagaaatatatgtggtatataatattatataatatgatatcttttgttattcttgccaagtgatatggaaatttggtgaacagaaacatccactagtgactagaatacaattttgtaagaatagtctataaagttattagcacaaaaaagcaaaaggcctacaaatccaaccaaaagtgtaccataaccattcaaatctctagctataatatgcaagtatcaattattattgttgttttaaaattgatgcatttaaatcacaagggtatattttcatctaaatatattatatattatttgcaataagtgtccacaaaatgtgaaaaaagctaggcttttattcatgagctatatggatgattctacccattaataactatcactcaataatctttcaataaaaattagaaaataacaaactcgtattcttataagaatataagagacataaaccaacgaccaaccaagctcataaactctaacaataatgatcgagaaatcatgaaacaagcggtcaataaacataaagagaatatcaaaatctacatctaaaaagtagcaatctaagtattgttcaaaccaacaaactctataagcctagtcaaaatctctagtcctggtaccaaacactaaaacggtatttagcttcataatttaaaaattattttatttttttaaaacaaaaattattttcaaaaaccaataaggatgtttgcgcaaattttttaaaaccatttttttaaaaattgagttaaaaaaaatgaaaacattaaaatgttgttttttaattttttttaagaaaataatttttctgttgaacttattcatttatattttctctcacatacctaggtttgggtttagggtcgagacgtatgcgtctgggtaccgagttcggatccaaatccaagtttgggtataggactagggcttgggtggggtcaagtctgagttcgagtacgagtctagggtacaagtgtaggttcgggtctgggtctaggtctaggtctagctctgggtccggatctgaggtctagatttgggtctgggttcaggtttaggtccagtccagatcctagtctgaactgattttgtgcatatattaaaccataagcatgaaaaatacatgttaacattagtcacttcaaatctcttaaatt

SEQ ID NO: 225647 - DNA, 1740 bp, Cannabis indica
tttttttatatatatttttgagttataattgaatctgctgcttgaattatgtttattagacctctattaggtatttttgagcttagtttgagatctgggatagttttgaacttgaaatgagatgttttgaaaaattgcagcagaaaatggcagactattttcttagaaatggtctaccatttttgctggtagagacccagaaaaacagtttgctgttttttaggcagtttttcatgaagtcttgttttttgtattttctcaatatttagggtattgtcacactttttatcgatagaaaaacctctagttttgagtttaaatctccaaaaatgttttaacaagttgtttacccattttacgtgattgtgacataggacctccgttcagcaagtgaaatttctattcaggttgactagctcacttgaattaggaaacaaggtaaaatttgtataagatatgtatgtatatgtatatgtgtatgtgtatgtatgttatatgcatgttgtattatgtgatttgtatactaccaatactagtacagttgcagtacggagtatattggtatattatatgatgtttaggggcatgacacagtgttaccaacactagtacgaaacaagtacggagtgcatgtagtacaacacttagttatactcgaggtgcgattcagccctaccaacactagtatgggacgagtacttagtgcatgtagtacagaggtcgtacttctgttaagaatatttttaatcatctattaagccttataaataggtgtatgggtgcctagatacaatcgataatatgttatatgtttttcttactgagtccattgactcgcatatatatttacatgtataggtaaaggaaaagcaaaggctgagcaccagtgagtccaaagcttgagggtgattgtacatatcagaatggttagatttggagtgttcagttttgagacaacatgggcttacattttttagtcgcggggccacacttttgtaaaacatatattgtacgctgctttaaactttttgacgggatctctgctattatgtaaagttacgtatttgttaaagtttaagttcaaaagttttaatttatcacattttttgagaaattctttgattagcaaaggcatgcacagtaattaaaagatcactgtaatgttcctaagtaagtaggatgttacagctttcatcccaaaaataaaagcttccaccgtcccttttctcttctctttctctcttttgcaatttttccattttctaccaaatctttagttgggttttgttaattggagattataaaagcaaattaatgattgcatttgttatctaacatctgaatttctaaattgaattttaagaatttgagctcatatatggtgttcttgaatttgagcttttatgatgatatttttgataaattcagtttagactggtgttttaaagcatgaaatatgaattgaagtatttagcttgttaattctatttttggcatattttagtatttagctctttcttttgagcattattttaagtttgttagcatgtggtccttgtgtttcaagctcttgaaatatggaaaatagcatttgtagaataagtatgatgattgggtagtttaaaactttgatttttgtgttaattagagcatgaagataaatactatattttatgtgagtattacactatgtttcgggcttagaaaccatttcataacaaaagtcgagtgcaagaatct

SEQ ID NO: 225648 - DNA, 1079 bp, Cannabis indica
ggctagattatgggggaaatcattgaatattctagaagaaaaggaatccatttgatgtcttaggatctttttgtcgccataaaagtgtgggaggcatgagatttcataatcattgggattttaaccttgcttttttgggtagacaaagatagcgacttcttacgaggtgtctttggaaacttaagattcattctaaagtaaaaattttaatttggcgtactggtatgaagtgctttcctacaatagttcaactcttaactaaaagggtggaggtgagtgctttgtgtcctatctgtggtgtggaggatgaatctattttaaataccttggtgactttttgagtggtacaacaatgttggaatagggtgggcattggtactataatcatggctagattagggttttttttattaggtggtggttacttttatgcgattggacaacgagaagaggtgtttggtgtcgacaatctgttgagctatttgaggggctcgtaatgagacagtttggaagaaaaaagtaataagaatttaatgtattattgcttctgcatagggtactttgattaatggagaaatactcaaaactctaataaagagtcatcacaatctgttttataggtgagtgatgggggtgagcattggtgtttgcctcagtttaataccaccatagtgaatgtagatgcatcgataattatggaagaccaatgttatggttttgaggtggtggcttaggatgatagaggtttattgttagaaggtttgcaccagactcttgcaggggtgtgtcgtactgaagttggcggaagcaatggggtttgggaggctattagttggatcaaaatgaagtcgtggcagcaagttgttttggagacctacaagctttaaggagtaatgtcaacatgattgtgtttgggctagttatttaagattgtaaaactttacttattgatttgcaaaatgtttatgttttctttattaaatggtcaataaatgtggttgctcaagagaaacttacaaaaatactggaatttggattaacttttacaaaaatactgtcacacggaaatattttcaaaa

SEQ ID NO: 225649 - DNA, 2587 bp, Cannabis indica
aaaaaaaaaaaaaaagctttatagaaattttaataaataaaatacagtaaaaaaaaaaagaaacattaatagttggtgtaaattaagataatgtagatatacagataaaagttcattgtatactttattaacccaattaaagtataatgatagcgcatggatgcttcattttagtataggtgctccttaagctattgttattgttcgtttatatataaatatagagaatgtttattttatggtatgaacacttgtttcgtcggcaataaaggtcacaataggataatataacttaaaaacgacacggaataaatagatttagataacacgtttaataatcgtgtcgtattgtgtttaaattttagacacgtttaataattgtattgtatttgtgtttaaatttttgacacgtttaataattgtatcgtgtctgtattaccttaattatgtcgtgctatactcgtatcgacacgtataataattgtgtctgtcaattgtattaacacaataacatgaattgattttcatatattttatataaaaaattcaaaatttttgtacttataatgataatcgtgtcaaaattgtcttatcacattcgtatcatgtgacgtactaattaatcgtatcgtgtttgtgtttgagattttgatacatttaataaatgtgttgtgttcgtatttaaaattttgatacgtttaagaaacatgtgtattcatgcttactttagtcgtatcttgttctaaacatatcgacaaacacaacacaataacatgaattgccaaccttacttatttcatcgttatagaatgaggatattattcttgggaagttttaactatcaaatatagcattaatcatttaaatcatacaatgctattgtaccgcatataaaacaggttcatcatttatttcttaccgttagtcaaattcagtcactatgtttggttggtctttctaccttctctatgtgcgtgctgtgaatgactaatttatttattttgacttcttttacaccactaattttcttttcaacaattctaaattcgaagaacaactacattataagttactgtatattattaaaaaggttaaaaactaaggttataattgggttgtatataataatattatctcatacatatatttatcttacttattctaattcattaactttcatataataatattaataaaaatacatatgttacttttttttaaaatttattttaatagtaatttttacgtcacttttaaatatatttaaaatcttataaagtaataaaacataaaaatttatcaaatagcttatattggcaaaataaacataacttttcttttttaaaaaaatatattcattgtatgacactgaagtaactctaaatttatatgtataccgtataataacttttatacactccagaaaatagcttcattaataataaacggtgtgtgatgctctcaagtgaagagaaagaagatcgcatcaaagcttgttaatgctgctgcaagtggtatgattgagcagattgagctgccttatatccaagaagatgcctctgttcaaacagaggttttcttagcccatgtgctgaattggagaatgatttgaaggaggctgaggatggtcccagtggtgtgaaatcgacccttagggctgctagatgggctgacgaaataaagaagatggactaccaaactttggccaaagtagcgtggagcaaatttaatgagaatctggtgagaaccccttcttctcaattaaatttcactaagccactgaaaattggtgactaggtggttgcaaaactagatttagaggaggttgaaatagagtcttcctactagaggtcttcgattgtttgtatattcttaggggtgaatccttcgtttagagtttttgaagggtttaccaaaagaatttgggggaattcgggagtgcaaaagattgtgaggttgcactcaggtttcactttggtcagttttgatgatgaagcaactaggatgtcatcctagaaactggagtcatccattttgataaaaaaaaacagtggttcttagaccatggattgatgatatggacacaactcagatgattagatcgattctagtgtggattaggttgaatgaattgggtctttaatattggggaaagaagaatttgagtgctccaatgagcactactggtaaacctataatggtggataaagtgactttagaaagaactatgattaaattcgccagagtcttagtggatgttgaaattttggatgatccaccaaaaactattgcttatgttaatgagaggaaagaattggtggagcaacatgtagaatatgagtggttgccttctaaatgtgcatcctataatcttcatggccatacagttgctaattgcaacaaggataaacatgttgtatggaggaagaagttgttggaattattttaccaggatctagatttactaacaagcatgtttcattaacatcctaatatgaatttctaaaacaatgaaataaacacatataaagtttaggaaaccttatgtaaagcccgcttagttaatttggaaattagcagttgttta

SEQ ID NO: 225650 - DNA, 2877 bp, Cannabis indica
tggtgaaaacctatcaatgccactaagtctaaaccaactttatttcacaaaattaattaagatgcttatacaaatatttatgtatctttattcttattttttttttttgaacaaaaagtatttatagattaaaactaaatagatttagacttcacgatcattataagataatgtctagtatataaaaaaaaaaaaaagcttaactatatcagtaacattttatagcaaaagcctatttagctacattataaaccgcaaaattataatttttgaaaataataaaaaaaaattacaacttaacgaaagattagagagatatttacatggaagcacatagttaccaataccttaactggaacaagttcccttcaactcttgacaatcgtctcagagtcacttttgatcaacacaaaagggtgtttcaataagaccgcagtctccatacctaacagacaggtcgtaacttctccaatgagagagtcagagaagttgagcatgttagtagccacccacaaaacagactttgtgtggtccctagccaaagccgccacgcacattgaaccgcaactaattttgacataaaaattgattttgacccaatcttcaagaggaggaaaggaccaaatagaagcctcaacaaccttcgacgaaggaaacaaataaggaccataatctgcgtaacaaatagagatagggtcaatacaatatttaatgttactcagagaattatagtgtaccttaacgttgcaggccctccagatcgtatccaccacaatcgaagcataaggaacaactcctgaacatcgacccctttagacttcagactccaaagaaatttaatccaatcccaaacacgagctctagaatccataactgtataactctccagggggatgacctccaaaggtgaaaagcaaagttacaatagaggaaaagatgctctatcgtttcttctctctccccacaaagaggacaggaaacctcctcaatatgcattcttctagtgagaaaggaacgaataggcagagaatttgagagaatgctcaaccaaaggaccttgtgacgcttcaaaattttagaattctaaagtttgttccacaaagcgggagcaacattacacaatggggcacgatccaaagcttgaacaaggtacgcaaatttagtggagaacaaaccatttggctctttaatccatatccacttatctctaccctgaccacagggtctaccacctttaatgttgttattggttgtttccgtgtcaaaaagagtgtaaagtttagagatgtcccaattcccattgcctaaaagtaaattcgtaactttctccaaaccctcagaccgaagattattaggttgaggataaaaatcttggtcatgtataacccacgggtcatcccagatattcgtcttttgcccatccaaaataagcttgcatgcaccttgcttaagaatttttttagttttcataacattcttctagaatccagaatcgaagttcttaaagaaacaattcaagaaaggactacctcttagatacttggcacttgacaccttacaacgcagtgattgatcctcattaaggagagcctagccctacttagccagcaacgccttattcatttctaaagtcttccgaaagccaagctcaccttggaatttaggaaggcacaaatgatcccaagcctctaaatagataccgtaatttccttaactccaccaaaagtcattaaccataccatcaatttagaggcgagtttcttggacagctttgtggtttgcatagtgtaaactggtaaggacggccaaccaatttgatcaaagtaacacggttaactttgtacaaagatttcaacttccacatgtgaagcttcgagactaggttatcgagaatgaagttaaagtctacatccttattgcgagtcctaaacaacagtagccctaggtaattaatgttaccaatggcattgttgaggccaagctcctgctttatacctcgtttcatatcctcacgagtattattgctgaagaaaatagaggttttaagtttatttattcactggccagaccaatcacaaaatttctccaaatactgccaaacacccttagcttcctccatcgtggccctacctacaaggattagatcatcagcaaagaagagatgagatagtcgggatccattccatctcaacttgataggatccagtttccaaggcgttatcaagaatacgcgagaggatatcagcaacccagataaaaagataagggaaaatagggtccccttgtcttatgccacactcaggagcaaaactactaaccgtgccgccatgtaggaaaaattgaatgaagtcataaagatacactggcagacccaattacaaaacttgtcaggagccttgaagctacaaagacataatcaataaattgtcagctcagcttatcataggctttaactagctaggtcaattttgataggaccctcttttctttttttgagcttaaacaaatggatgatctcttcgactagcacattgttatcttgaatattccgtcctagaacaaaagttgcctaagtaggggaaattagcttggggagaatcagactaattctattcgcaataattttcgagataaccttgtaaactacattacaaagaaaaataagtctgagctgcaatacttttttcatgttgggtaccttagaaatcaggaccacattcattttattgagactcttatttatagtccctgattaaaagtaatccacaatagcctcgcagaaatatgcacccactgagttccagtaatgtttaaagaacatgaaagacataccaactggacctagggcttttaaacttctcatagagaagagtgttt

SEQ ID NO: 225651 - DNA, 2774 bp, Cannabis indica
tttttgaatgctaaaataaataaaagatacatcagtacatttattttataagggtgcatggtagaatcaccctatataaatatattgattagttaattttccataattgtaatggaaaagccaaaaggtacataggcgtaataattaaaagcggaagcatttgtattgtagctgtgtagatgtaccactgtgttataatcttatctaacaataatttattgtttatttatgtattttaaagtttaaactttgagtctattagtgcccattacaagaaaaaggtattattgggtgttagtccaaatgacaagaggaaaataataatttaatattttcaaagaaaaaggaaatcttcattagggacagtatatggatggattacaattctatattatttacataaatacatttatatatgaaggtgttttcaatgcatttccattttatttgtttattttgttccttaaaagcctaaaaagaggcactttgttatagagtagttctatgggtaagtatgtcagttgatattataagaccatagaaaataggttaaaggaaaaagtagaaaaccaacaagagtatatctctttttttagacgcataactgaatccattgaaagcaatttcacccgaataaaataatgtttcccatagaaaagtaggaagtgatatactcatatctaaaaacaatatttaactttatatgataatatatttaattggaattaacataattatgtattgtacacaacttgtgccagtataacgtaataaacaatttgtatattgaagtttgaacatttatgtaacgtcccccgcttttagcgccctgacaatcacggaatgataacttttatgcacgagtatgttatgttggttgcttcatggaatgactaattcaccctacacaccaacacgagtattttcagtacgttttgtcctcactctcacacttcatgggaagttttcttaggaagtcatccattctgaaattatcccaagtcaagcacgcttaatcatgaaatttttttgtgatgggctaccaaaaaacaagatgtaccttgttaatataggtagtaccaatcaatccatttaagtctttttcaactatgtagtctgatacttacacagtatcagtattatcatacatgaccttctccaagcaatgttgcattgtacaactccctatctttccccttcgaatcacaggactcagagtgtcacaatttacaactctatttttgctgtttgtatttctagtttattcatccattaaatttatctgagtttttttacctaaaaaaaaaaaaaaaccttgaaacaattgaaacaactgaatgtaaatacgccattgagagaaaaaggatcaaagaatcccacaaaaatagtagtgggcaaggcatcttttaatatattcaaaagattaattaagataatccccttaaagactgagttttgcactaatgggcataaaccaatttggcaaatgtagaaaaaactatttttttttttcaaagaaacgactatataaaactaaatatattgtggaaaaattacaattaatggtacagaatcaaatcaactaaattttaaataattaaacaattagcaatgacaagattaataaatcacaaacaataattgaagaaaattaaggatgaacagagcataaaattcaagaaaacataaaacagtaaaatgataaaatcaacaccaagatatatactggttcatgtccaatagatcgatgtgatctatagctttactccagttctggaacaccaccaaatccactatattgatcaagcaagaacatatacaatacaattgagattgattaactgatgagttctttcaaaatgtttcaactctcacactcttacctaaacattttcttcatctactgaaaattcttcatacaaaagcccaaactcaatctctcttttttctctgtaccttttgttatacccatattttgagcaattaatatggtaatgacaagtattaaaaagctaaaatataaaccagctcgtgttatagagtaataaatgagatcaataaactcgcctcggaaaatacaattagtagaaatattttaactcatccttttaaagataaggacgagccgtgaataatagctactaatttatgagaccagaaagacaaacaatcaatgtagaaggtccatctcaggatacacaaaatactcaacagaaagtatgtctagaaaggttagataatgaattctttaaagagcttgcaactcattgacccacatactcgtgaatatgtgaaaagactaagggaaacactcccagcatgattcatctcagaattgtcacactatgatagtatctcgcgtttacttctctcaacattacagaaggactcgagagatatcacccagagtatatttaagcactaaaagccaccttcagaatatagcaacttaagaagattatttatattgtgagatgaataaagcatagtcagaataatcgtttacagataaagacaaggagcagttatgcatttattctattactatcccatgtgatgtaaatatcaaaggtgagatttatccacttggcatgaacggttacaaggataagctcctaagagaataactgccatcctaaaactcctataaatacggacaaaacctaggaaataagggacgaccaatttgagaaaaatcaagaatcatacatattttttcttgtactttatatacgctttataaagttcctaaataagatggacttgtggagtat

SEQ ID NO: 225652 - DNA, 4697 bp, Cannabis indica
gtcattttcctcaacggttggtatccttctatcacttggtattttagttgcatttatgtgtgttcttggttgcattccagcacctatttcagcttgtgtactagctcttcatattagcaatctattgaaatatattgagcagtagcttcgtaatttacataattcattgcttgatcaaactatctattctaaaatatgagaaataaaattacgtctttttcctgcgagtttgaaaatttaagcattgtaagtcatctatgggataactgtcataaaactgtaatgcaacaattatatttgctatgaggaaactaatattaaaccttaaaacaactaataatgcccctatgtaatcaaacaaaacttaccataattgagttttctctatacgagtcgtgtatttctaattttgagccttcttttaatataataatattatggtagcacaactatgattaaactaatatacaacttaattacaactagaaaatttgaatgagcatcatcatgaaaaaatttgtcattattattttgtcgctgataaataatctattgttacttaataatattatattgagaaacaactgttagcattttgtagactaattttataacagccaaatgaatatattaataaaattaaccaaaattttttaaagggctttgtgttggattgtcaatttaaaacacacctgcaaatattataaaaccattgcatcgttatcagtttgtaatcattgatatgtcaagtttcagagctttagtaaaatgttaatgcaactgcaatgcaaccatgcagaaaattaaataccagagcaatgtttctatgtacatgactctagatgaattcgaattttctcttgttgtttgtgatttgatatgagtaaatccaccattgaaaatttagaaaataatgttaatacaatgggagaaacattagctagtgtattgatacattttttttttcaatttatacctgatatggattgattcggaactctagatctatttaagataaatctactttttatgaactaaaaaataaaattaggagaatcagttttctacaatttaaatcgtaattcaaggttgaatataagtttcaaaccagtttttctgcacgattttgcataaatccaaaattgtatgtggttggattgattatagtctttatggcgattctccatctggctggatttcttttcgattggagtgctagtttgatcgttcgaagttactgttgttgaagatggtaatttgtgcggctgaatggttaaagcaagaggtattcttataactttttgttgttgggatgtataaaagtttatagggccgacctaatgtaattatataatatttttacattttagtatatacccaaaaaaatccctaaaaataaagctcaaatagttacttaccatgaataattacaccgtgcaaaaagaatatttgaaccttattttgtaaagataaactattaagttatccaataaatgacaatatacatgatcataaaaacaaactagaccaaaaaacaatcctaaatgacaaaatagataaaactatacgagaattatcccaatacttttaaaaagtatattataaaattatcctaacattttatataaattcccctgcttcaaagttattatccatattttttaccaaaatatgtggaaagtgaagaataggccatgtgtatacaaaatccatgtaagcacgtggatgatcaatattaacgtaataagtttttagtattctcctcaacgaatgagggatgtctgagagtgcacgactagttcccaaaagagtattgaaattaaagaactctatcttccgagaagacacaagcctcttggatcatatagcatcttagaactgcctgtgttcaacacgattcccaaggcaaaacactataggtgactacttcagtgcatgccgtaaagtaaacctaccctcgaaacggagatattattaggatttagtccatactattctgacattacgtcttcctatgaatgctaatccttatgctgtcccatcagccacgtaaaagacaagtcatgtctcaccaaactcctacttcggagcttagcacatgtacacgcagcaacatcatttcttacacctattagaaaggccatgtagagcctagaggtaaagggaggatgtacacatcgcccaagattatcccaactctcggcctataaatacaaagagaatgtaagaggaaatgaagatttgaaaaacagagaaaaaaagatagaactctgaaattgtaagagagaatgtactcttaagtaacacaaatattactaatcaataaaagtgactcatggactatagttaattaacacctgaaccgcataaaaatactcttttcaactcatagttaatttttttaatacaagatttaaaagttgtcgaaaatctcagtcaatattttggtactttcattgagagttgtaggaatctttcatcaaaaataaaccttgtgtcacaatagtattgacaagaaacaaccaacaacctccccagacacctgattatcaagagcgcctaaaggaagaagtagcctctcgcctctcgagtagagggcgaagaaggcgacaccaatgatcctgagtactcaagggctgaagacgaccctaaaggctacaaggagaatgaatacgctaagcttgtgtcattaagcaacaagctactaagcatgatgttgagttagatgaacaaaaagaaatgaataggtggatgcaagaagctttagcttccatgaagcaagacatggccatgacaggcctcaatgtaaatcccgtagctgtgctactcacatttagcgatgaaagagaaggtccctcacgccctcaagaaaaccaaaggtagaaagaaaaagtacctagtcctatcaggtaccctttcaaagatcctcctctctcaaaggataactgtacagtaatacctatggggatcagaaaaaattgcaaccctcaaaaggtgcattttgatctcccataagggaaacacccgtaaggggataaatttcctcgaaggaaagacaaaccccagaatagtggggaatgccaaagtgtatcactacaccaaggatgggaggaacgacgtggctcaaccaggaggactccccagtggacttaagggagaaaatcaatgcaaagtaaggggatgtcaggactcacattaactctcgaaaagatgatcccgtaccccaaaaagatattttgagaaaaggtatttagctgaacttgctatcccctagaaagacatgtcaaaggtatctcaaagacaaaagggtgaagaatctgaatatgatcatggggactaggagccatgtgcaaagaatgtcttagaagccaaactcctaaaaaaatttaagatgccaaaaatgatctagtacactagagatactgaccccagtgaccatctatcatgatttaatagggtcatgacagtattaagagttagcaattacgctaaattcttgtgcttcccactgaccttagggggattcactgaagagtgggttaaaaagctagagccaaactctgtgagtcgttagaacaagctacaaactaattttcatagagagtttgtcacagtgaaaatgataaatcttgaagttaatgccttagctaacatcaaaataattcccacagaaactttgaaaacgtacatccaaaggtttagggaagaggcctccaaaatgataaaggtagatgatgggcagtagttggctctattacaagcaggtactcagacaggtacccacttttggaatgagctttagcaagaaggtgcagaaactttgcaagacttctagaagcaagcccaaaaatacatcaaccttaggcccaaatcactgcttttagaggatactacccagtcggaggtccaaactacacttgtagagtacagtatatggcaagagcactcccagtgccattgcaacaagcatgaggagttcccgctcctagcatacagtttcaaatacctctagtttacttgcaagatcctgttgtggctctggcctacttgaaatacagagtaccaacgattggcagtaaagctcctggtacctttgtccaacactgtgctcccacaacatcccccgctgcaagcgcaacactgactcatcagataatgcaaagtaaaaggttagctaaaggaagtagcaagactgaaaacaaaaaagggaagaaagcattcaattatgagaagtagtatacccagtatactgagctagtggacactcaagaataggtgtatctggcaacccaccagaatgttcattatcgtaacctccacctatgttttgtgaccgacctaaaagggatcctaacaagaagtgtgagtaccgcaatgatatcgagcataaaaccaatgtatgtaaatccttaagggatgagattgtgaattcggtacaattgggtcatctctatgaatgggtcaggaactggttgtcgaattagagttcaagtgacatccgaaggggtagcacaagcacccagagcataagtacctcctttggtgcaaaaatcttgtgtagccagacagacctcccaaacatcctcctagagccaacaggagagtagccatgatttttttggggggggtcacgataggaggaacaaacccgcaataagctaaaatgttacactcaagcattagatcatgatgatgaa

SEQ ID NO: 225653 - DNA, 3872 bp, Cannabis indica
gataaataatcagattgtaaagagttttatttagggcataaaacccaatagtgtcgcatccccacacaccgagactaagctttggccttaatatgaggccttgagtttggggtcagggtatgacccttttgacttaccatgccccgagactgcccaaagctcacaaacaccccatgctacgcacacacattctgtgaccaagcaactcccataaagccatgattaccccatcattagggtgttaccccgacattggtggttcagggtacaccccaagtaagcttttttttttgaagtcttgaaccgtggccgagattggaggttaggggtgttacctcaagaccaccatatgggggtcggggtacattgctccaaagtcaacccatggtggtttagggtcggggtacaccccaagcttgaagcatgcccccttttcttagactgaagtgtgtaattgtcgttgttgcttcaggccactttgtcacttagaacaaaggtcgtttttgcctgatgaggtagaaccaaggtcgttttggctcgacgaggtatgctccaaaatagagcaatctcgaggcaccccgagattgggatttgttggtgccccaccccaagaccaccatgtggtaggcgggatgtcacccctgaggccggaccacaatcgtgacccccttcgagaccatactacaactatgacccctttcaagaccataatacgactgtgacccccctttgagacaaaaattcgaccatgaccccccttcgagatcataatacaaccgttattccccttcgagactaaaatacgaccgtgacccccttcgagttttttttgagttgagggtcagtgtagggagcgtttaggcaatgactattgattgattgttaggatgagtctttcattgtctttgagaggaggttgtattaccttgagatgaaatcgtgggggacgattgtaatggtttcttgcacacttgtttttcctttgttgtgcaccatgaatgtcacagatgtatgccttctttttttttttactttggagctatgtggctctattactatatgctactatgtgttaacttgtctgacatgtaccacagtatgcgtgtaaaccctagaattaagaaatgaattagaaaaactctaattagataattatgaataattgaggaattatattattatatagttcaatatatgtgaattaatatgatttataacatggtaagaccctgctggtgagctagggggcattttagtaattatgactcgagaagggtaaaataatgaattaaatttaattacgtgcttatggaacaatattattatattatattgtatgcctgtgctgtcttaattaagtgtgttctgacaggttggcgcgatatagtcacaactgggtatttcaggccgaaccaggttcaggcccgaaatgcaaattggattgaattatttggcattttatttaataatggataatctaaattttatttggaaataaatgagtaggaaatgactaaattatccttgtatgtgtggttatgagtgaattggccctaggggcaagatggtcttttgacctttattttctatatttgataaaagagtaatttcgagaaaataaggaatcaatttctggtgtgttcttccccaaacccgatccccctctctctctttaagcctttttgagtttcaaccttggcttgaagaaaaatttccttgggaattgcttaggaagctttgattctggtgctagtgtgtgcaaaggaattgaggtagtattcctactgttttatgctttgaagttcttgctggtttttatttgttgaaaagcatgttttgagttgttttgttcttgaagttgcatgttcatggttttggttttgatcgtggtgaattgagtgggaaattgcatgatttggttgggaattatgttgttgagcttgaagtaattataggctattttctagcttgaaaccttgtgtttttaaggtgtttgctgctggaaaattgattgagtttattgagatgaagctcttgttcaagagcttgaagttacttagttaagcatgagttttgggttatttatgcaatttgattttgggagtttaatgttggaatttaatgttggaatttaatgcttaagttgtatattttaaccctataatgtttgctagcaactttatttggtaatttgagagtttgattgtgtttttgattaaactgaaatggttttaggggctgaaaatcgtgtttgtgctgttggttttctgggtttggaacccagttgccacggcatggtctgagcatggctcgacccacccctgttgatggaacctaggagttggtcccaggtgccgcgacatggcttgggtatgccgcggcccgccgtcaaatttttgggcagattggatttccaactttgaaatttcataacttttgattccaaacttcgatttgggagttctatatatcgttgtaaagctcgtcctgagctctatgtgattatctaaattttcaatgccatgtgaatattttatgagtatggaatcaggggttaatcctatgtttgaaaatcccagattgtgtgactaggagtatcggcacctggtcaggagcacccgaggattcagaatctctgctattgcgggacaacaggtaagacagtagttagcacatagagtatgcgcggtggaacttgtgttgaatatgatatatgtgattaattgtaactgggatcagggttattaccctaatatgagcggttaatagcgtagggttattaccgtagtgatatatattgtgtaaatgccataccatgttaaatgtaatgaaatttaaggattatgtgctcaaggcataatgaggttggactcggtaatcatagctgagatgaaccattctaaagccttattgtatttagacgtgtgtgagcaacacgtaggtctacgccatgtagacataagtagatgtgtgagagaaacacgtaggtctacgccacgtagacataagtgaacatgtgagcataacatgcaggtctgtgtcacacagacaaatttaaatggcaattttgtttatattgtatgatgagcatattattgatatgttttatactgtcttgctgggcttggctcacaggtgctctactgtgcaggatagggtaagtcgattgctaatcagccagtgcaggagctggatgaagaatgtacatgtccaggccacatcagaccaagcgggttggggtctaccaatgatgtgtttttgagactctgttttgccacttaggtcagctgaaggaaaatgacttgtaataatattctgcaaatgtttttgggatcccaacttctataacttttagattgtaaagtttaaaatattacaagttttattttcattctgtttatgattcaagttcaattttcgcgctaattttattagtaatctcgattaagggattagggtttcataagtatcttgggtagtgtgcctaattatttatggcgttacaatttggtatcagagcgccaaggtttttaaacttcctgtagaccgaccaaacatgtacattcatcgtcagagacaagctcgactcatggtgcagtaagtattgggagtaaatactagactttttttgtgatcatctgtttaccgctttccattttttggcagtatgcaagcatctagagtatgtttgtgttatgtgatgccatgctttaaatactatttgattaagtgaatatttatatgaggtaaatagatgagttagggtttaaggaaataagtgcgtaagtgtggtattggtgcttaactcgctgaggttattgattacaggggcactagtaatggaccctgtgcaatcatctagaccatagggc

SEQ ID NO: 225654 - DNA, 6031 bp, Cannabis indica
ttaataatcactaacacgcctaggtagttagggtgttacattttatgttctaggttataatgcttcattgacaacatatgatccttcccaattaggccagagtaatcctactaatgcatcttttgtgtttaggaatactcgtcgtagcatcatatccccaggcttatatttcctatctttaaccttggagttgtagtgttttgcgaccctttactaatacgccccctttcatagctcaaacctttctcttatttcttcaattccatctaaagactcgactaacatttgatggttggtttgttggtcatatgttaatctctgatgtgatggtggtgtgagcactacgggtatcatggcttcatatacataggttagagtaaagagagtatgacttgttgttttcttttctatagtgcaataaggccacaacacttcgggttattctttaggccaattccctttggcttactctaggcgtttctttaacgtatccttaagagtttggttgattgcttccacttgtccattttcttgtggataagtgatcgttgaaaaactcttgatgattccatgtctgctacaaaaatcagtaaatagatcactatcaaattgtgttccattatctgacactatcttttgtgggagtcaaaagcggtaaatgatattattggccacaaaatcaagaaccttctttgatgtgatagtggctaagggctatgcttctgcccatttggtgaagtaatctatcgccactactgcttattgaactctacctttccccttagatagtgaacctatgaggtcgatttcccagacagcaaatgcccagggagattgcatactcttgagttcatttggggcatctctaggtatttttgagaatctttggtatttgtcacactttcttacatagtccatcgagtcttcagtcattgtaggccaaaaatacccttgtctaagtatcttctttgagaggtttttcccctagcatggttgccacaaaggccttcatgtacctagaccatgaggagcttggcttcttcttttgtcacacaccttagaagttccattgaatagcctctgttgtacattactccgtccatgatgaggaagcgagctacttttctaattaatctcctaacttcgttccggtcaattggaagaataccttgttctaattattgtgcaatctgggtcatcgatgatgggctattgatcataaagataggctccgtgtctttattatgcttcatttagctaggtatttgacaggaactacactgagagtatcaaaatttgttgtacaagtcagtttagctagtgagtctgcgtttgcgttctgttcacgtggtacttcttggatggagtagtatataagttaggctactaagtctttagctttgctcgggtatgctatcatgtttgaccctcgagcttgatactcgccgagaatctgattaacaactatatgtgaatcactatagatttcgagtgactcggctttgattgctagtgttaatcgtagtcttgttaggagtgcctcatactttgcttcgttgtttgttgtggtgaactcaaaccgcaaagcattatgagttcaaaatccctcatgagttactaagatgagtcctatacaagaactgctcattgaggatccatctacataaagcttctaggaaggtccagtgtccccctgagctacagtcttaggcgtgtggacctggtcttcacaagccatgggatccttttcttcgagaccaatgcattcaacaatgaagcttgctaatgtctgtcctttgactattgtgcgaggctggtaggtgatctcaaactgacctagttcaactgcctacttgagtaggtgccctaatgcttctggcttcatcaaaacttgcctaagtggttggtcagttaacaccttgactatgtgagcttggaattatggccttagttttctataatccactaccaagtattaaactagcttctcaatagggggaaaccttgactcagccacaatgagacacttcctgatgtagtataccggatgttgtatcccttcttcctcacgtactagagtagcactgattgcatgatcgatgatagccaaatagatgaacaatgcttcaccatctatttgtatgggtaggatgtgaggcctagctaggtgatgtttgagagcttggaaggcttgctcgcattcatcagtccattcaaacctcttattgctttcttttagtgaattaaagaatggaacacacttgttggttgactttgaaacaaacatgctcagtgcaataattcgtccagttaggctttgcacgtctttaattcgtgacgataacttcatgtcttacaaggccttgatcttttctggattcgcttcaatcccttttgagttgacaatgaatccaagtaattttcctgattggacactaaaggtactttagaggattgagcttcattcgatattcctgcaagatgttgaagcattcccctaagtctttgatgtggtctttggatttctttgacttgatcagcatgtcgtcgacgtagacttccatattgttctcaattaagttgtggaacatacggttgactagtctttgatatgtatcacttgcattcttgagtctgaagggcattactctatagcaataaagcctaatgttagttcaaaaacaagtatgctcttcatttggtgtgtgcatgctgatttggttgtcgcctaaataggcgtccatgaatttgaggagtttatggttggctgttgtatccaccagttgatcgatttgtggtaaaggaaaacaatccttagggcatgctttgtttagttcagtgaagtcgatgcaagttctccacttgccattcggtttaggcaccaaaatagggttggataccaaactgggtagaaagcttccctactgaagtttttctcccgtagtctttcaacttcttccttgagagctttggaatgctccttttcaaggagtgtgtgtttctgctgtgcagcacagaagtttactttgtctatgttgagggcatgatacatgatctggggatcaatcccaatcatgtcctcatgtaactagacaaaagtgtcttgacttctcttgaggtaagctaagagcatctcgcttaaaacctctgttaggtttgttttgatcttgacaatcttggtcaggtccattgtgtggaggggaatttttttgagctcctcagtcagaccaactcctgactcgatttccccaaaatggaggtcaatgtcgtccccatcttgggtacaccttcaagtggaatttttttgaccatatatgctgatctaacggtaaaaattaacttctgaggttgatcatcaatttttagagttcgagtcgcgactgtgggactagctccgcataagttgtagcttaaattcgtaactctcctgagggtaatttttgggtcaatattttcagaattgaaatttaagtatgatacatgaattgatagaggattgaaatagctttaaaatccaagttgaatcgcatcaattggattaatatagagtgagttatgaccattttattgaacgctgttatgggcccagcgcccaggttgacatgtgatgtcaacttagacgttaagtaagtgagaaaacatgttgggggtgtattttttaatgcctaatgatattttgatatcacttagtctatttctgtattctggcgaagctggtcaccagttctcgaagatgttgctattctacgaaaatgggagaatcaaaactacctgttttttgagtaaatcaccttgtcagaaaagtgaaaatatgaagttgtgaatttgactgttttgacttcattattcttagttattgtgaaaaactagacaaacagtcgagatggtatcaaaatcttataagcagaacccagcgcattagactatttgacaacctaggtgttgggtgcttatatcgaagcttctgggatgtccttttgatacttccaaggttttaggacttgaggacgcggtctcctaccttgttttgacaattttagaaagaacgcttgaagcaaaattggcatttgagtgatcaaaactagcgaactaagttgattgtcaactttgacgttgggccaagcaccaggtcaacctgggcgccatgctcagttttgatgcccttaagattgtggttttctccctgaatttacttgtatcttcgttatttctaatgacagagaaaataccttggacacttttttggaaagttgattagaaatagcccaagttgacaatatgttaacctagtggtgggtccagtttcaagcctcctggaagttctgtttggttcccgaaaatagttgaatcttaatctttggtgaaaacggagaatatgcctagtagattttttggaaagactccttagaattggcccaggttgacaaaatgtcaacctgggtgctgggccatccccatttatcaacctgggcgctgggcccttgttttggcaccctggttgggttgtttcttcctcaaaagtaattgtttcctccttttttatcaagacaaagaatatgcatgatttagattttttatctctagattgacagattgttaacttgggcgttggggtgcccgggcaccgggtgtccaggtgctcaaaattgaaagttctccgaatttgattatgatatctcaaatatatttgtggtatgtctagttcatattctaatgtaatgtttgacccatttgcactaagacggtcctagaaactgaagccctagttggggttgtcaacttgggtgctaggtgaaaccctaggtgcctaggttgactttcgaggtgctggttcatgtagtttcagctctcggggcctgtacttggttgctccatgtcttcatggtacataatacttaaagatagtgagatggaaatgacttatcaaaatctaaacttccattatggagttcccagagtaaacttgggcgcagggctagggacccctcccaggttgactgctatgactcaggactactcaactccaagattttatctttattttcacgtgtcaaacatctatgtccacgtcactagggaaagtttctaggttaacacacaggcactagtgactccaaaccttgttgtcgcataaatttattattaatcctaaaaaattaagaaaataagaaacaaacgaaattagaatgtgttagaataaatcaaagtagaaagaaaaataattaattttatattggttaattttgtgcccgtcgacggcactaaaaaatttataggtaaaatttataacacaagtatatgtctcgtttcaagtaataatagtgagtaagcacgagtatcgtcccacaaagactactaccaagtatcaataattatttttctactttctatttgataaacgaaaaatgagagaacattattaaaactagaaaaataatttagctataaaattaaagtaggcaaacaatgattatgaatattaatatatagaacctagggtattaatttcatcaacttgtcaatctattttattaatccgttctacaattccttcttccaattttaatagcgagttaagtaaagtaaatcctattcttttcaatatataagagctcaatctatatgcaaattttttactaatccatgataaattttaacatgtaaaaggcattaagattggaaattctatttaccacacatgtcatacgggtactcccatccaatatgtaacctatgtttatataactataacatattcaactctcatctctcgaatctcgaattgaaatcataaaaacatgtaaatagtgatcaagtatttacaagcattaagcataaatcatacatattaaaataaagaggaagaaatcaataaaacatcatagcaaagtaaaatagaaattaaagtcatttcattaactcttacataagaaaattagtgcatgaaaatcatgttcataaccattgcattcattataaaaaaaataataacataaacaaaattagagaaagatagaaaaaaaaaaaaaaa

SEQ ID NO: 225655 - DNA, 1409 bp, Cannabis indica
aaattttcttaaaaaaaaataaaaatatatatacatgaattagaaaaaattatgaaaataaaatcaatataaagattgaaattaacataaaataatgagaggaaaaaatttaaaaaaaaatatcaagagtaatttttaataattatttaagtttatattttttttaataatgaagtgtatttataattttatgcagtgcaaataaaaatcccctttatttatctattattttttttattacaaaaaagtccactgcgcaagttggtgtgtagactttataattaacttgaaaccaagatccacgtggtacataatgctaatctgaaagctcgcgtaataaaatgaaacaaattaatcataattatgatcttaattaatattgttccgttaatttatccaaaaacaaaaaataaaataaaaaggagaattgtttctttgcctgtcctagatctaatcggcggcttttctattctttatatcgaaaagataaaacaaaatccaaaaccatttccctttactttcaatcaactctacttaatttctacatttcaaaaataaaaatcaactcttctttccctatattaaatatgtttatttaaaactaattgttagaggaatattaaataacttacttaaaatcttttagttaatgtctgcgctcaaaattacatatatagatatttttttcaaaacaatattcgttatagttacaatattattcttgtaaatttttgaaaaatttcgattagtttactatactaaaaatagagctattgatattccggtctactacacgtgttagaaaaaaatttcgaacatattttcagcaccataaattatataattttttgaaaagttttataaggatgatgttgtaactataacgaacaccattgtgaaaaaaaaaaatatatttcaacatgtatttttagcatggttgaccctaaaataatatagtgggtcatagggaaagaaatatgtttgaacccttatttagaaaaaaaaaaatattttggcatgtgttgttcaacagggctaaccctaaaatatagtgggtcataggaaaataaatatgtttggcccttacttagaaaaaaaaatggtattttctaaaatcagtcaaaaaaaatatataattttaatattgaaaaaaaaaaaaattagggcccttgggctaagtgagttctaggcacatgcataatatgcctatgtcttgggccgagcttgatttttgggtcacggaggttgactagagcatctccaatggttcaattttggaggatatttgtttatgtggattacttatttgataaaacacatggatgttatactattggagataaataggtgctatcatagaatatcactaatattgatgctatttcttttttaaaaaaataaaaatagaa

SEQ ID NO: 225656 - DNA, 3922 bp, Cannabis indica
ctgaaattgattatgagaagaccttttctcctatggttaaacctgttatagtgcgtactgtcttgtctttggctgttaattcaaattggaaagtaactcagcttgatgttagcaatgcttttctcaatggcttgctaactgaaactatgttcatgcatcagccactaggatttatagatccatccaaaccttaccatgtttgtctccttcacaaggttctttatggcctcaaacaggctcctagagcctggaatgacaagctcagaactagccttattcaatggggtttcactagttcaaaatctgatacttccttgtttgttcatggttcgggtaacagtcttattatactccttgtttacgttgatgacattcttgtcacaggtctaaaccagcacctcattacacgattgattactgatctaaacaatgaattctccctcaaggatctaggtgatgtacactactttcttggagtcaaaatattcagagatagcatgggtatgttcttgtcccagactaaatatattactaatttactagttaagttacatatggagggtgccaaagtgtgttcaaatcctataagcaacacaaataaattgtcattacatgatggagaattgtttgaggatcccactctttacaaaagtaccataggagctttgcaatatctctctttgacaagacctgatgtggcctttgtgataaacaagcttagccaattcctcaaagcccctactgtgttacattaagaagcttgtaaacgattgctcaggtatcttaaagggacaatttcagatggtttattactcacaccagccaaggtcatgaccttacaaagctactccgatgctgactgggctaactgtatagataacaggagatccacaggtgattatgttttttttctgggtgagaatctaatctcatggtctgccaagaaacaaaatgttgtggcatgtttcaacactgagagcgagtttcgtgctctagccaacactgtagcaaagttaaagtggattgtttcattactcactgagctgcaagttcatctgccccattgccctgttatttgggtcgataatcagagtgcatccgccttagctgctaacccaatttttcatgctcgctccaaacatatcgaaatagacttgcattttgtcaaggatcagatattggccaagagtttctctattcgatatgttcccagtcatgatcaagtggctgacatgctcacaaaaccattaaccaaggaccggttcatatatctcaaatccaactgaaaatggctcctaccctttcgtttgagggggatgttaacacagttaactaatcctatagttagttttctgttagcttaggttagttaattgtgttggttaatttatggttgttaattgattctgttaagagcttattgctttgtccttgcttgtatatatactttcataattctctctactaatacaagtgaaagataattttagaaaattcaagagtactcaaataaataaaaaaaactctagacattttagtaaatataagaatagtctagaaattttagtaacaacaagaaaattaactatattaaaaaaagtttaatatttcaatagttatcctatataatttccaattaaaaaaagaataatacaatttaacagtacagctgaataaaattacatgtgtaatttggtggtacattgttacaagtagagagaaaaacacataaaatactaacaatattgttggaaacgaatcgagagatagtcaattttgtatggtaattggtttgtgcaaaagtggcgattaggccaatttggtggacccaagtgcaaaatactcagaaataacttctaatggcatgccttttgtctcaggaaccttgagataaacaaatacccatgccatgatgcaaccaacagcataaatggtaaacactccagcaagcccaatccattctaagaggataggaaaagaataagtgaccagaatatttgtacaccaatatgtcgttgcacatatggtaatacataacccacgcacacgagtaggaaagatctctgagcatagtgtgtttggaatcgatccaaaagccatcacaaacgagcataagtagattacaacacttggggttgagattattgcagtcactacagtccctaacttgaaaaaattgctaatcactagtaaaataagagacactataagcacaggtatagtgtacaacaacaataccctacaaaattaaacatgaatgtattagataatatctcaacacatttgaattatgccaaatattaataaaatatatttattatattttgaccaaattaatatatgagaatgggctgaaaataattagggaagaatttaattagttgatgattaccttctaccagatatatccatcaagcgcatgcacacaacaatggcaggaagcatcaagaacgttattattgcatttaaaagcaaagacgaagaaataagactcatccccatatttgttagaagtactgatatgcctgctttctctagaatttggggagcgtagtacagaactccatttatgccagacaactgagatgtatacaaatttgatcaacaacaaagaatatataattatatatatatatatatatatactatctaattttaactaatctattctaaaacttttcaaaatatagttttaaagaatatgattgtgtacttttgttttagaaaaaatttattttaactttgtaattgaatagcaatttatttttattgctttaaaactaaaatatgtgaaacataataaagcattagtattgagcaccagtcaagtactttttataagtgttgcctatgattggttagcaatattttttgaaattattttcttaagttatatgggacccgatatttaattacaccaataacagtacgacactaaacagtgctagactaatacttttcagccattctcgccataataatatgcatgtgacataaaatagtgttgtgcactaacttagcaatgtatgtatgagggattatatggtgggtggcgtgccttctgtgcctaccgatagcatctcgattttcttgtaaagaatatgatttttttttaaataggtttttttgttacctagacgttgacatgtattaaattatattttttaaaattttttagcagttaaaaattttatctgaattattcaaaaattattagatttaagaatttttgtaaaattacattcaattttactaattcttttatgtactaaatcatactctacaaactttgatatctaccatatcatacccctcgaactttcacatatattaaattatatctcctgaactttcatcattttagacttcttttactaaaattggataaaaatccttaaatccaataattttaatatttcaagaagatttttaatgactttaaaattcaaggattataatttgatatatgtcaatgtttagaagcaaaaacatttttcttcttttgtatgacaaagtatattctaattattttgtaacttccactatttttaagaataacttagggtaccaaaaacaaatttcaacacaactttttacacacgccacgcctataaaaacgtcttcaaaaacaacctattttgtgtctttagcaccataatttatttaaaatttcttaaaaatgactagatcataaataatcatatatatataaaaaattaagattatatatgccaaaaaatacaaaaatagtttattttttttaaatccaaaaatagtttattttgaagcttgtttttttttatacaaaagcgataataattgatttgaagcgttacatgacatcctaagttatttaaaattttacaaaaaattgtaagaggctctatataactaataggcgccctgaaacaaagtgggccat

SEQ ID NO: 225657 - DNA, 1476 bp, Cannabis indica
ttttttttgttaatattgtaactaagtagcttatgacaaatgagcctttacctacaatttctggctactgctaacctttttttataatgatggaaggtttaagctttttctataatgaacgctttttattaaaaaaaaaaaggttttctttttattttatcaaatgtttatttttttttttaaaataattttataaaaatcttttctttttctctgttcgtgaaagacaagacgatccttcatttttcctttccttcgagacggcggcactgctcgaactcagccgaggaccgagtcgactcaccattttcaaaggggtttttgattcgatagctaaaatgcagaagctgaaagctttgggacatgtccggacttgcttctctcagagtctccgctctctttcccatcagagacccttttctgctcaaccgaactatgcccaagaagacgacactcttcaaaaccaggtctctctctctctctctacatggtagttgaatttgcttgctttatagtcctgcattttcgatttttagttcattgagatggaatgagtaatagcaccggttaaagatttttctttttgtttgttatgtaatgtaatttaggttttggttgaaggaagagctacttcaagaacagctatactcaataagccatcttcactcaatgcccttgatacagctatggtatgtactttgtatttctcacatttgattattctgtttccatttttcttttccattgattgaatgtaagtttctgtttaaatgtaggcagctaggctaaagagactgtatgaatcatgggaagaaaacccagatattggttttgtcttgatgaaggtatttacataacaaaaggaaatgaaattcgttttttgttaaaagttgtatatctctttggcattgataatggtgacctaatagggtatttattcctaatagggtagtggcaaggctttttgctctggaggagatgttgtttcactgtatcattcactcaatgaaggtgagctttgcttatttcatacttgtttttaccctatctttagctctgttattacgtttaacattttactctcttggtggttggtgtaccaaccatcaatggcaatagaagaaatgtggtgtgacaacatatgactctcctttggaacaatacttgattttcgggactgaacttaatgtagatccttctgtttgtttttcttcttgactgttactagattcaacattttactctcttagttggtgcaccagtcatcaatggaggaatgtgtagctttaaaagtattagattcaacattttactctcttagttggtgcaccagtcatcaatggaggaatgtgtagctttaaaagtattcctttagaactatactttattttggggactgaaattaacccagatcctttaatttgttactgtcagtgagctacttccctcacttttctccttttcggggaaaccttt

SEQ ID NO: 225658 - DNA, 1652 bp, Cannabis indica
tctctctctctctctctgtcatttagttagcataacttgagctacacaatctcaaacccatgccttttcttttgatctcaagagatttatcaacagaagcaaaccacaaataagcaaagaccagcaacagaatcttactagatgggctgtaagttcctcacaatttatttttcatgtaattcataaagtgagaatttcttctctttcactttcaatagtctgtattagatgacaagtatagcagccaattttaatcctagttgaataagtttagatggcttattatactgcaggttttgtttgcggcaacccttttaaaaaataacaaggatttgcatgaggcccttataaccaaaatgacacagaatgccactatattggagtgcattgaagcgattgagaaggcttcttaatttttgaaacaaattattccaagtggagacatcagatttgcatcctaatgccatgttaattattatacttattgtgtagctacaaggatttgaaagactttgaactcgtctggccactaggccacaaaatttttctcctgtataaattaaacacgctaaatttaaatatttatccgattctaatatttctgttctatttgatcatagagcttatttttcatttccacaaactcaatagttgataggattttgaattgggtctataatagactatctactcatacataatacattcatagtggaacaataagtatatcaacacaacaacagacaaacaaatgaaaaggacaccattttattttactgaaaactggcttcacacgaatcaccataattaacaaactcacttctggtctgttaagtttatttaacaacaattcaaggacagtacctcatacaaatattttttatgatgctactctgccaaaaactaaaccttggctataaggacgaagaattcccagttgctcgacttagagtcttccatacaatgacagcatacccctcagtgcagaggcttcatcctccaacttatcgaagcttgtggaacttggtatcctccaactccagttaccaaactgtgcaataaaatgttctagttaaaaatcctccctaaaaatgttgtagtggtaagagagaaaataaaaaataaaaaactacttctaacaataggtatggtggcccatccctcggagctttctcatgtacatggtaaaaaatttaaacagtaatttttcaaaatttcaaaacaggataaggataatacaattacactgtttggaatgagttaatgttagcaagggaatggtaatgttaaacattatcttatttgttcggagggtttaatcttgaaatgtcattctcttagtaatataaatacccttgaggagggtaatgttgatacataggggtgtttgaaataggttaatgttagcaaggaatggtaatgttaaacattaccttgtttgtttggaaagtttaatcttaaaatgtcattcccttggtaatataaattcccttgaggacagtaatgttgatacattaaaaaagggtgggattagttattcccttccgttatattaatttgaataacatttttaaattaataaataaatttaaataccattaatattatgatttattataaataaaatattacgatatatatatatatttagt

SEQ ID NO: 225659 - DNA, 2728 bp, Cannabis indica
tgtatattagctgtaaaagaattagatatttagtagatatttaatagatatttagtctcctagctttgtatataaatatgtattattctatgaaatctatacacaattcgaatcactattttctacaatatagatctatttagataatgcttatgtatgtatgagatatgtatgcttggataggaatatgagaggtcaaatgacatttcattttgttttctttgttcttcttcacctgttgtatacctactacatcacccaccatatatagaaattcctattttgtctaccccagtctacagttcacaatgaacaattgactgatcaacaaaacatatggacactgaatcgatttgtaacttcttcgtgctaatttagtaaaacttagtcaaataaacaatgtaatactccaatatctgtatctgatatgcttttgaaaaaatatatgatgcatatactctcggaataaagcgacccttttttgagagatattaagctgacttgtcatttcatttaaacaatttctttagtagaatacaaaatttaagatgcatgagtaaataatccataagacatacagaaactttccataggctaacataataacttaacaaatcaaaagtttagttaagttcttctctaaagaactaaaaatcaaataagtagcaccaatggaccatcttatggtgcattgcataaattatcttgttcataacttcataaataaaacattaaagatatgatgagttatatagcaaataatcagcaggaaggagctggaaaaaatcgaaggcacacatcaaatcaatgtagagaactgatgcctggcaaaacatttcactcagcagtgctcttctcttcttcattactaatcttgttagttgcattttcatcattaacaacttgtaaatccggatagttccggtggttgagagagtgcaaccatagagccaccacaccttctttctgctcagtcaatgcaatatgagggtatatatgcttcattttgaaggctaaggcctcttgttcatactctttcatcgatacctcttcatgagtgtctttccacttttggttatatgatgtaaagaaacactcatccaagtacaacccaacttcaggggcagttggcacattcatgttaacatccttttgcagggccttctctatcaatgactccggggcacagttcctcatcactgccacagcaagcccaatcagcttccttatctgatgaagcatgaagctctgtcccaccacctcacacttaacaaattccatgccttcaactgttactacagtgtcagcattgaacgaaatgatgaagcgcacagctgcagggtcttcggcttttgttcgggtggtaaagttgtggaagttatgagtccccacataatggttcagaattctattaaacctttctttctcgttctcaccataagagaaattagtagtggcctttgcagcattaccctcgttagattccaagactccattttgaaccttgttgcttccagcattcccactttcgggtttaatttcgtttatggactccgaatttggattactggcattaccatttactgaagaaaagccaatttcgtcgctaagcgcagaaactacctcagcattctcagtgttcgacgaaatgtcaagctcaaaactcgaaccacttaactcataactacgcttgcccattaacccggcaaccttgcgccccctctcagagcattcatgacacttaaagagctcattccctgatcccaaactagccattacgctctccctattaggatgcgaatttggatcaagagcaaacacaggaataagatagacataccttctccgatcacagaactttttggcgttaaacgaaccagtcacacgcttgtagccaaatattctaatctgcggggaaagattcgcattcaggcggtccacaaagccgggtggatccacgtagaaccgtccggagactacttgccccacagcgctgacgcccttatcggtacgggccgaccgagcccaatcatagcgtttggggttgttacgatcatgttccggaacggcgccagcatgatagagtccttcctcaagatcaccctcgatggttttggcacctgggtttttctgcataccttgatatccgacaccgcaatgcaaagaaaattgcaacctttcggcgcttgtatcttgggatctttgtctcttcgcctgtagcggcagcggcggcagtggtgtgttcgtcatcggaagtggtggtcgtggacatcttgagcttcttagagtctggttcttgttccggaggaggcggtggtggagatattgtggtttctgtattggggttttccattttcagcaatgtaagaagaagaagagcttatagagttgatactccattaaaggtccgatgtctgaactgtgtttttcactctacccttacaaaaccctgttataatttaatgtaattatttgacattttttaaaatcttaagaaatttataatattttatatagtaaaaaaatatggtttaatagtttattttaggagaattactttatatactatattttttattttattttttaaaatttacgtatttaggtttttgtgaagtgatttctttggtagtttctatatgtgtttttattacgattttttgttgcgtatttaaattgcttgtaatacgggtttctatatagaattctgtaaaaaatataaaaaaaa

SEQ ID NO: 225660 - DNA, 2296 bp, Cannabis indica
gggataaagattaaaatttctcactaatttcctgttccgtctgcatatccttacttgaaagtatataatacaatcgtgtgtagtacttgatttgaacacgaagagtactccttttgttttcaattgtatattactctaagatatatttattttagagatagcatccctattgtggataatattttctatgtatatatatttaataagtaaatagtaagtaataatattataaattatgtttcactatgatacattattatatattaatataacattactcgaaagaaataattagcctagtgtggccagtaatgagtactattgacgcaatgcatgcaaatttcaaccaatgcataaaccaccaagaggaaagttaaccaacacatggtgacaatgagtcaaatgaccacagaaattaagttttatgattattattatttgatacatcataaaatatatatatatatatatatatattcatgttttgtgctgagaatagcatagagactttgttgtatattgaattagttctcataggttcaagtatataagataaaataaaataaagcaataaaaaagaaaaatcacgcaatgaattggagaaggcttaaagagtttaaatgctaagtgggtgaactaaacccgttaatgtgactatggagaatcaaatattttaatttacaaaatatatataaacaatccctaaaaacacaaaggccaccaacctcaccaagtcttcgattttgtcacttcagttagacaagtgcgtttaacagaattctcttgacgtactactgcttataacaaagttagtgtctttaagaaaaaaaattatataatactatataaggctccactaaaaccagatccattgaagggtcaaaaaaatatttaaaatgatagaattgaaaccatatccatgatttgtgtatattagttcttcagggcccattaattttttttttctttttactttctaaaagtaaaattcatagtggacctttgagaatcaagcttaaactactaatttagttttaattccataactatgtcacaaagtctctgactgatttatagttgctcgtccaaactcggaggtggggcaacaacccatgagggtattttggtattttcaaataataaaagttttggggtgggatgggaatgggatgataccaatgtgggttagtttataatgggtcagttgttccacctgatggttttcattgggcttaattaaattttatgaggtatatataatgtatgtgtatgtacgtatatatatattttataaatttaaaggtatgtttataatagacaaaaataattatagagatatttttgaaattgattatgtgattttttgaatgttacttattgaataatataaaaaaattaattatacaattaaaaatatatataactaaaattaaaaattaatctaatatacatatatgaatagatccttcaaataaataaaaattagatttatatgaaaaaataagtgtaacttccagtagttattcatcatacatgtgaagaaacttagaaaacagaattgagagaaaagaaagaagaggaaagaatgaaagaagtgtttattcaattctgttacaatttacaacagatgccaaaaccaagtatttatacacaaacaaagcaaagcaatgtaacagaaagttagttggaaaaccaactaactaacttaactgaatacaacttcaagtgacaactggacagtttggtataggttctctaacagcccccttcaaactcagtgaggaagagctatgaacactgagtttgtcacgaattagagagaacctattactggaaataggcttggtgaacccatctgccagctgatgttcagagggaacatggttgatctgaatctgtttggtgagaactttatcacgcacaaaatagagatcgatctctatgtgcttagttcgagcatgcaacacaggattagaagccatcatgactgaactgagattgtcacaccaaaccgtaggagctgagggaggtttaattttgagttcagtcatgagtgattgaagccatgtgagttctgtaacgactgcagccaagctcctgaattcagcctcagaggaagacctggaaatggtagtttgtttcttggattgccaagtgatgaggttgggaccaagataaatgcagaaaccggtcgtagagcgtcgatcatctggatcagccgcccagtcagcatcacaaaatgttgtgatatccagtggggaacctttttgtaagtgcaaaccaaagtcaagagtgc

SEQ ID NO: 225661 - DNA, 2440 bp, Cannabis indica
catctataccaaaaaacaacagacggagagcaataatcacaacacacaataatcttctcaatacccaacccaaacagaccctgttgtaagaacaagtcaacaacacaatcgacactccaacgcaatcccaaagaagcagaacactgctgaaccctcaagaaccaacgatgaaggagaagtccctctcgacgccaccaagcaaccccagaaacaatcttgacgcttctggaaaccgaggaagatcaacgagggaaacaatatctttgactccctgctccaccgatgaaaacgcagcaaagaaccgagaacccaatcgcaagaaaacagtcgcgcgcagatgaagagagaacccagaacccgtgagagaatcgatccaaaacgcagcagtgaactttgagaaccttcgaaaatatgaaggatgaagctacacatacgacaccaacatccaccagtgaagactcaaggatcggtacgtgaaatcttcaatcgcaagaagccgtcaacatagaaccagtcgtacgaaatttttgagagaaaaccctaacacatgccagctggcaagacgtacaaagaaaattattattaattctttatttattcaccgaaagttcttgagaaatgttaaaaagtaataatttgtattaatgggtcgaaatctttgacttgtgggaagtgaggcaaacaatatttgaagttaatgttaggtttgtggaaactttggtatccattttgctgaaccatattttggttaagaagaataattataatgtcacttgaaagtagggtgggtaaatgttccagatatcattaattgcatgagtttttctatttctattttttattttagtcaaatggactaaagagaatagtctgaagtcaagaccgaaagctccaatgtagtgcttacttgtgttaatttgctttatatgctcttgaaatctctaaataatttaggcttatcattctaattatatttatttatatatattacgcatttagaattggaattatattaaaattagtcccatattatcctgaattaatattatgatgaaactcaatacttcttacaattttaataaaaaagtccgattatactatttaatttaatggagaattgtttaagctacttatttgttcaagagtattattataggcaccaatagtacttaatacttataaatatgccgtcttgttattgactagtgatactcttaaaaaattattatattaaatgatatgtagctcaattcttaattggaccaatagcgataataatacataaaaaagtatacgttagacaccactaataccttttagtatttctctttgtttaatatatggaaaataaataatatcattaattatatcttaaatatggagtaaattgttgcattcaaaaaaaaaaagtaaacatataactctcttttgaattgaatgtctcactcagtttttaatgtgtatttatatatatacttgactcattttgtacattcatgtgaagtagtgtatactatatctagaagtaaaacatacgtgcataaataaatagctgtacaatgtacatgtaacatgtgtgatttattatttttataatgttttttaattttccaaattgtacaagagagttgaatgaaatatatattaaataaattaatagaggcagctagcaaattgggaactccagtaagaggaaatgacggggaaaactcctattaatcaaacataatttgcatttggtggtttaagtttagttttttattttttaaataaacagaatagtcatactacgttattgttcccacgtttttctttatcttctaattaatgttatcctaataaaaaagattaaaggtttattttgtagtaatattgttataaaacatgaaagtgtttaatattattacgacttataattcagttaaaagtatttcatattcatttattaaaagtaaaataataatttgtgtccagtactaaattattctaataataataatattaatacacctcacacgagtgctaactaggcattatgggtgctcatttatttatttattttgaagaaatcatacaattttattaatagttatccgcaacctaattggaatatctcctctctagaaaacacaaaaatgattagaatcagaaaaataagccaactaattggccgcctgattctcagattgttttacaaattaaagaaacataaatttagataaaaaaggttacaacatcatagttaagaacacctatatatttagtttaattaaatactcaatcgctcaattaacgacaaaatagtaaatttgttgtagtaggttcattcaaccacttagattgagcattcaagtaactgtaccactaacaatccccttcacgtcgcatataacttattattcctaaatctaataaaatcaaatttgaatgtagaggcatt

SEQ ID NO: 225662 - DNA, 2101 bp, Cannabis indica
gtgtcaaatatacaccataaatgagttggcctaatcctttattgagtgatgccattagtctatttcttagacataattttttattattattttattttttattttgatcctcgaaccgtagagcgaccccaaagaaaattatcatatgatccacaattgagaaataaaatgaaatatgaactcaaacagagaatacaaatttgagaaccaactcctacattaccataacatcatacaataaaatcacctcttacactacccatttgagaataaacactacgaattttaacctgtcacaccatatgtctatttaagtctaaaaaaacatgttttaagactaaaagactgaaatttaacatcaagaaccatcataagttttgagaagcctctcatattcattcgccactagcatacaatcgggtccactcttttgctgcaaacggttacattttaagaaaacagttagtacagaacacaccagtaactttaattttaaaggaaaataatatgttgaagactattgaattggtttctttctgtcagattacttttttgctaatctttagatttagaagctgttaagaaaataaaggaataggaaaccaccaaggaatatgaccatgattcagctctagcctagtgcctgctcaaggcttaacatagtataaatcttaactagacattagtccaacatcaacaacttatagtagattcatcttaaatgttaaatcaaactatgggttgaagaactaattgtgccagaaaagatagtttatacatctaaagatgtttacacaaagaaaaatacctgtctcaacagcttcggtttcattagtcttccagtgctttgcgatgttctcagaaagcggatcatccgggtttggagcactcaagagagcttgaatactgtttccagtaaaccacaaaatcattcataatccataacttgatacagatgtaaagtaaaatatatccattacattttataatttagctttagcttttacaacagcctgtaccacatatatgttcacgatgaagagtggggaaccaaatttcattagacaaagatatagccacactacattacctgagcaatacagttcgaatttgtagggctggactccacttatctttcaagatgtcaaggcaaatccgtccaagctacaaaagaagatttttctttcctttatattcggaaatttcaaaacacttaaagaggaacaactaaaggaaatgaaacgaagaagattacttgccttgtcaatgttaggatgatatatttttgtgagaaagcgaacctgtaaatcaaaaatagttatgtatggattgtgagactacagctgttctaattgcacaatgaaatctgttatagcatacattttaaaggcatattttcaaaaacatgtgttctcatttactattgtttctcttatattgtatacatataaaaaaatataaatatatcaatattagttcatttatcctattaaaaagcatacagactcattcaaaaaaggttaagaaccaaacacaactcctgagtaattagtcatgagtgttttccaccccatcaacaattttgatcattctcccaaccctaagcaaaaatgaataaccaaagcataccctacacagatgttggcatgttgcaataaatattgactacttatggacatttcagattttgccttgtcacacgttatcctcatttcttggatcctagcttcttaaccttttaaacacttcaactaatcatgtaatggtttgaaccactatttggaaaatacttaagatcctaacttctactatatgtcactaccacttctagcccaaaaagttaaaataaaaaatcaattgaactcagggacatctagcaatcacaagaaaatgcacctggacaacataaatagaccgaaaaacaaaagttatgaaataaaaaccagctttttgtaatggtaattaagatacaggggtagcaatcaactaaaagctagcatccatttatgccacacaaacaggttgttgctacagaataaaacaatatctttaccttgggaggtgccatcggatattcttcaggtagaaacaactccaactt

SEQ ID NO: 225663 - DNA, 2549 bp, Cannabis indica
tatatatatatttatgtatactatattactttgtaaccaagcacatcaacaatatatagctacatttggggtgataactaaaagtatagagaagaaagatatataacaatagtcaaaagtttaaattacctagcagaacatcccttgatgttgtgagcaacttgatcaattttgctaaagttgaaatcatcattttccacggacctgaccacaaattaatgagctctataatataaaagtaatcatcatcatagaggtattaaccaaagattaagtataaaatataaatttttagtgaaaaagatatataaaatatacataaatgtggtaagttcttccatcttttcatcagtatcctttatgaaaaaatcaataatttctgaaagaaaaagaggatttccttcaactcgacaagtttcaagaagatcaaagtcggaatccaatataccctgccacacaacaccaatataagttatttattcttaaatcttgtaataacaaaatacacattaacacattatcttgtaataaatatgaggagcgacctgctcttgcttggagcgatagaagtaaacgagctgttgagaatggttaaaggccaccatttttttagggaggcagaaagagaaattcagaaatgggatctgcaaaatagatagagaagtgaataagtgtgtgaaatgtgaaatagtatggcaatggctatacctatttatgggagtaatggtgggagtaggggtcatgaggaaagaccctctcatggctttgtttggagagttgcatgaaacggtaagtatgagtagagaatggcatcattaccaaagttgtcactatttgagctatagaatggcagttttggtctttgcttaattaattacgtgtggagacctttgctaattaactaacagttacaaaagaataagatagtatttatctttaaaagggagaaaataagtaggttttttttttcttggtagaaacagatcaaattctagatatgaatttatcaattaaaaatatataataataaaatttaaatataaaaatgaatattatagttctataaataaaactattaaagcacgacaaactaagattatatattgatttatttatagagtgtgatataaaaaattgaatatttataagtaaatatttaatttttaataatactaataattttttatatgattatttgtaaaatattgttaagaagttatataaatacaactaaagctataaaatttacatatactttagtaattgtaaaaaaatatatgaaaaagtaaagtacgaatttaagctcagatatgaaaacgagctggcctattttagaaatacgggccaacacgagaaaagcatgacacgaatccaagcacgaaacgaaaactaccgagcctatgggcagtgtcgggcctaccctttgaaaatgttggcacgacccatatttttctgtggcacagcacgacacgacccattttttttaagcacggtgttaatccgaaaactttctctggtgacgtggacatcaatgtttgacacgtggcatgaaggatgacgtcgcagagttgaataaacccgagtcataacacactactacaaattacactattcacgtcggtcaacgctactgttcatagcgttgaccgacgtgaatagtacacaggttataggacccgtctgtttaaaaacgacactaataatatctaattagcggcgtttattaaatgaggctaaaaataaaactgacgtaaaaagttattttcttaaaaaaaaaaacttgctttcatttagcgttgtttatcaacattcgattattgtttttctcgaggatttaaaattgacgcaaaaagcatttctaagaaatataaacaaagctaatttaataaacccccacgctactgttcatacacatcgaaaacccactcttctaatgctctggcgaaaccacccttatcccttcccgatcgttctcttcgaatccggctagtgctctctgaaaaccaacctctatcctctcggtcgtcctctccaaaactagcctctcgtcccttccgattgtccccttcgaaatcagccactcgaacccttcgaatccagccacacgaacccctcaaatccagccacacaattttttaggtgtactggttagcttcatagttgaaccccttcctcccttccgatcattctatacttgtatgtgctttatatttgggctcctagggtttctgcaccagaggcagacgcagaggaggaggaggaggcagcgccatcagtatcaacatctcgacagccattgtctcatgtaagttcggttgttacacttgtgttttggaatttcttagttgttttttttgttctctttttcgaattagatgggattctcaggttttccaagacttttagacctagtcgatcggttaatttttttttttcaaacagatatttgaaatgcattgatagaatatatgtatatggttgcttgattttttcttttcttttttgacagcatttttatgatgtttgtagtgtgagtgagtgtatatgta

SEQ ID NO: 225664 - DNA, 1945 bp, Cannabis indica
agaagaaagaagaacaggaagaacagaagaagaactgtagactaggaagcaattatataaagccaaattagtatggtgtacattgatgcctagcaatatataatctatagacaatagactgtatgctgaaactattgacagggtactaaatgaggtcatatgcttattttgtaatagtaacgaaatgtcatttcaaggtaaataacatgcatgtccttttctttttaccattaataaccattgatatcaaaatatatctatatgtatatgctcatctaaaccctagaagtcaatatcttttagtttctttcccgaattaattattagagtggatcgtcgatttcttttatccgtttttcacatatccttacccctctccagctcatcttatgttgtatgagttggtttgttgtttaattacaccgtacgtacacatatatacgatatatcataaatgaattaagattaagagataaaataagagacctcatttcttctctatacacacttctgtaaagcctgtaatggatatatgtaccaacggtccacatgtaattttgtgagcagacagggcagaaaagctactgtgcacatcgagacacttcgaagctatgtaattatactatatataatagaaagaaacaatatatctataaatgtatgtgtatgtatatattatgaagtccaacagtaactggagctgtaattttcgtagactggagtctttccccaccaaacctttcgttcatcgtttgtttgtatacaatattttatcttgttggatcttgtgcaaaaatatagacaattctctgatcatgatcagcagtgtactgatttcatcactccgaaaaagaaaagccttcgtttcttttttcgatccccacctattatttactcctcctctatcaacagttttgaaactctgtccagattctacataactttaatctctacatttttctcgtcttatgtccatcggttcagagaaagtgatcaggcatgtcccaatgatgtttccaaatccgacactttttttttttatatatatatatatgtgtgtgcatttttcttcttcttttctttaaactaatggtgtcactaagtgataataaatatcctatcatatatattttaatttaataaataatataataaagggctaattactattcacaactaaagttgaacacgctatgatcgatacatatataactatacatacataatatttatggtgtactagtgataattaaatatgtacattacatatatgacaaacgcatgcatgtagtgatcatataatattttgtaagtatatatatataccattagacccagtgatataggatagcatgacttttttagcatactcaatcaatttgcacacgtatcatttacttacaacaaccaataaatgcaaaaattacagctgaaggaaaaaatctgatatgaattgatgaacttctagctaagtttcaaattcaaacactttgaagaaaacaaaattaatttaatacaataagttgatcacacatcttataaataaaacatatataagaaatcaaaaatatatatataaaattaagtctgcaaaccggtctgagtaaataataattaattagtagaatgcatgccctctaattataatatatgtacctttcccttatccatatatatagtgatgaagcactttattttcttgaaaaagggcagggaataagctggtttttgtagtactttgaagaagagagagaactgatgagatggatccctattaatccttattttggtgatgatggacaagcttgttagaatcactactcgtagcactaaagtggagtggtaaggtagctctcattgtctgatgaggattattattattagggtgcatatcatgatttggcaagagcccactttgtggattcgaattgaacatctgatgaaa

SEQ ID NO: 225665 - DNA, 1174 bp, Cannabis indica
tttacataaataatgtataaatcaaaattttacatgatagttttttcactttttactatatgatatttaactattacataataagtttcgattttagtgaaatagcaaggaattaacatagttttaaattttatcgttcccatagatggcgccaaactgttgacggctagaactcgtcaatgatcttagtagccagaacctctaagtaattatgtcagaaaataagaaagtagatgagattgaaatggaacttaggaaaatttgcaaaatagcaatggtcaaaaaagataagctcttttgtatcacttcaaaggtatttattataaagaatttacaacccacttttcaaataaaaaaaatgggatatttataggctccaatattttgaaatacactagtggtcccctggggacaagctgacgtcctaacgttataggtcgcaactgcaggaggtagtcttgcgccttgtacagttgtttggtaggtggtctcaagatataggagtggttcctgcaatgtacccttggtccggatgtcaagatgtggaggcaaggtccactacccatcctctttgttgcaatcaggccttacatggcgtggttgtaccttgatatgtactcatctctgcgtgcttaccatgttcttttgattcttcttccaacaactttcctctctaacatttgggaagattcactatgtgttggctgcatggtgtgtttgacgaatagcatgttgaacatgcatgtagagtagcctgctacaacatgcatgtcgagtcgcctgatggagtgcacgccaagtagctactgaggcatgcttgcagagtgggtgcatgatgagtgtatgtcgagtgggtacttttacaatatgcttgcatagtgggtgcatgatgagtgtatgtcaagtcgctgattgtgcatgcacgccgagtgattacttgaacatgtatgtcgagtggttgcttgagcatgcatgccgaataactgctttggcatgcatgtcgagtagctacttattgagtatgcatgtcaagtagctacatgagtatacatgccgagtggattgatggtgtgcatgccgtgggtcactcgtgactactggtggaagctagtcccactaatctcttaaatcaatgttgactaaagttgaaggttgtttaggggttctagctaaa

SEQ ID NO: 225666 - DNA, 1383 bp, Cannabis indica
actagaaacaaagagtgaaaactaaccgaaatatgacccgaaacttaaactaatttaagcctaacatagtgtatttcctagagtagttatttactccctccctacaagtagttgtgatcatagatcccccttgtcttcactcgagtggggttgtgtcgaattccaagcaacaatttaaatttgagagttggtggactaaggacactcgtagtaatatagtggttaatcatgtgtggagctctgttgactatgggtggaccccgaatagaatatttagaaaaattggcgtgactcggattgccatcctcaaatggaatagagaataatttgacaagttggactccaccattaagaaccttgagattagtctccaaaaaactcaggctctacctacgggtactcaagactgaaatgtggagtgcaagttgagacaatctctaaatgatgtgttggcaaggaatgtgttgtattgaaagcaaagatcgcgagtctcgtggctaaagaaatgtcataaatgctcaaaaaaattctttatctcaactactattagaagtagacgaaacactattgaaagtattttgaataagaatatgaactggtacaatgatcgtagccttaagtcggagtttattaactttttcagtggcatttttgctgggactaaccatgctcatcttgctatcctcaaggatttggttaaggaccacttttctagttaggagcaacatgacttatccttggtcctaaatagagaggaaatcagacaaatcttggtttttatgagtggtgatgaagccccaacgcctgatgacatgtcggtcctcttctttaagtattattggaattcagtgggaaaagaattttgtgactcagttttgggattcttcacttctggggttatgcatagaggaatcaatgatacgaatgtggtgctcatccccaaagtctcaaatcctatgaaagtttcccagtttaagcatatttctctttacaatgttacttagaagatcattgctaatataattaaatcgatccttccacatattatatgcttaacccaaacaacttttgtaccaggaaggaacatccaagacaacaatatgcttatccaaaaaattatccattcgctcaagaggaaaaggaaggtgaaggcttcttcgcaatcaaaattgatttggttaaagcctacgataaactcaggtgagagtttgtggatcatgtattgcagacctttaaagcgccaaaccatttcataagatgggtttcctagtatattacaaactacaaacgcttaaatgtgtgcttaaaatggcaattctgtgggtaagattttcccaaagtgtggcctcagcaaaggtgaccctctttctccctatctattta

SEQ ID NO: 225667 - DNA, 2993 bp, Cannabis indica
aattataaattatcattcctatattgtaattgaaaggttcgtatctaaaagtattaatcacaaaaatcacaatttattataactacatatgttttttagtcacaataaaatttacattagtaacaatttgtatctagtaactatgttttaatcataaataattttttgttatgattaaaaattatatgtatatttttttttttttgagaaaaaaaaattgtctgtaaatttttttttagtgatagttgggaaagacaaaacttatttactctacaaataattagatgtgttagatattgagagattaggaggacttaattgggtgatataattataaataattaaggaagcaaaattggttttgtatcatataattctgatgcaagccgtgagccaagtttagctaatattttcagtggaacggggaaggtagccgaaatagttttggcggcctaatatgtaatgattgcccacttacttttattgattaagttttgcctaatattggggatattatccaattatattaggattaattacacatcccaacgtcaattcaaaattatttatgaaattatctccaactattttattgtttcaaataccgttaaaactttttgtattattttaatacacgtaccgagattaaaacatgagatttttcccaatttctcttacttttttgttacattttctctctctctctccttgctgatatatcaaaaatgggttagtggattcttttttcaataaacatggcatattatagtctttcattctttatttttttaaaaaaaatttaaagaggtttttcagtaacactatttattatttaaactcaaaagttatgttattgtaatttatttttcaaaatgaacattttaacatgtggaaaatatatattttttgtcgccacaaaaataaattttcaatattaaaagtaacattaaagtatcttaaacaacaaaaccattacatttaattaacataatttaacttaaaaatctaaaaaataaaattctaaaattaaacattaaccataaaataaataactatgtttaagataaaattatcttaaaaaaatatataaataataaaataaattttataatatatgaaaaatatatatttttcaccgtctccagaaaagaactaccagtattaaaagtaaattttttttcttttttatattttgtaaagaaagtaaaaaaagtcttaaacttaataaactttaacatatcacgtaacatcataaattactataaattcttttgttatgttgtatttaaaagttacaatatagtataccaataacaaatttatttgataaagaaattttaatatattaatatgaaactttataaagttaccgaatagtatcttaaacataatagaattagttacattataaaaattattattatatatatattaattttaaaattaattgatcaaaataaacaatcaaatgtgtatgagaaaaaaattatcttgaaataattttttttaatataaagtaacgaattgatatattatttacatcaaaagaaaccaaaatgttactttttttaaaacttgcaaaacactgaaatttctggaagcggatttttcaattttttttcattttaggtattttttttaaatttcgatatttatgctgacgtggcacgtcagtatttgtataaataattttgttgaaggtatttttataaataaaattaattttaagtataaaattgaaaaaaaaacccattatattattggaaaatttacatggtatattaacttttgttggtttttatttacttttttactgtattttttttataaatttcatactgcatatattatgttaaattttcactggtgttctactagtattttttagttgttctactgttgttttaagttgttctgctatgtgttttattggtgttttataaaaacatagtatttttgaaaagatttccgtgtaacagtatttttgtaaaaattaacccaaattctaatattttcatagtttcccttattatttgcacttcacttttcatgtttaaaaagacaaaaaataaaaaaaaaaagcctactatagaaaggaaaaaaaaaatatgtcagttttggttcgtgttactcttggaggttgtcatataaacctataaaattatagaaaaaaaaaaaaagaatggctaaaaagtattattggtttttacattgttattggtataattatgtattggtttcaatataacttaagaaaataatttttaaataatatcgctagctaatcgtaaggcactacttataaaaagtactggacactattggtgcccaataacaatgctcaaaaatatgtataaaaggaattatacaagaatgtaacaacttgttcaagtgattatagcgtgtattaggaggtgtgtgtcgagtcatgtgatcgaatctgagttatataattctaaaatataatataaaaatgcttttatcaaaaaaagaaaattatgatagatagataattatatttatttattttgaaagaatctcaattcaattaacttcgaaagagatttgagattcacatggagaaatctctttcctttgcatttcgaaaaccgaattatatttatttaaatgggcattttttatttttaaaaggagcattatgttactaagtataatattatttttttcatattttattttgagtgtttatatcaatctcaaatacataacatgaaaaatgtgctaaatatgttaaaattaataagtaggtgtcataggggtatttgtttttataacttaaaaattattttcacaacttcaaaacgaaaaattgtttttttgaaaactgtgtttgaccacgtatattttaaatacgaatttctaaaaattaagttaaaacaaaaaatagagaacatcaaaatgtttgttttctatttttttttaaattattcttttgacaatagacatatatttacatttttttattatttttt

SEQ ID NO: 225668 - DNA, 2065 bp, Cannabis indica
ataagaagtttttccaaagcttggatttttgtttgacaatgcccaaaaacttgcacattccattccctcagagctttggccaataatgtccttatttatttattttcaaatgagaacaattccatgagaacaactcaaataaaccaaagaatcaaacaatacacgtgcttttagaagggatgagaccctaaattccattgtgaccaaaaaaaactaacatcgtactatcaaatatagatgataaatcatccacataaagaagtggactaactaaactcttaacaataagacttttattgaaaacataaaaatgacccaaaaaaaaacaacaaataaataataataataaaatatgtgaaaaattaatttatgagacaaaaataaatgtgtgggttgaatacgataaaattatatacaaatggtctaaaggaccctacaactgctttgtctctgagactctaccttgaagatgggaattggaatcttaatttttctcgaattaatggctggagcagatagctccaattatgtggaagatttggttaatttgactaatagacttgcggtggagcaagaagaggattgggagttaatgaagaagcatcgacggattttggtaaaagatcattaatgggtaggattgtggctaagaaaggaatcactggaaatttattccaaagcatgttcacaagaatatggaggaatgtttttaattggaaggtgaaagtgctcgaagggtctacagatgcaaatttgatagggcctccgtttcaatcatcacaagacgctaaatgggttttggataaacaacccatgctattcaatggagggtttcttattcttgaataatggccaatgacggggaattggcaagacgcaaagcttgaccaagttttctcttgggtcaaaatacaaggatttctattaaatgtcttcacattgaacaatgttaagaggattagtgcgatggcgggagaagtgtcggatatcaaatggaatagcacccaacagatttttttgaataattatgtgcgggttcgcatcggatttccattgcaccgaagcatctttgtggggagattcattccatcaaatggtaataaagtttgggtccaattcaaattcgagaagcttctgttgctatgctttaaatgtggcatttggggacatgaacaacttgattgtgagaaagaggaagccactgagacagacgtgaatgggactgttgtacccaaatatggttcttcgtttaaggatgaagagccaaatagtcaagggccgagtgataatgatgctccaggggtggatgatcaacgaccgacagtggtcgaacaaccggaatctcctccggtagtggttgccaaaagcaacgatacaccgatgatcgtggaatatggggagggtagttactagaatggcgaaaaaatttgggatcgtgaggagtattactcggattggtggacatgatgaaaggagtgatgtgtcacgaaatgggcctactgttgggcccaatttgaactcttccaatgtcgtgatgggccgattaagtgaaggggacaaagttgtagagaatgaggaagtggggccgggtcttaaagggcttgggcttccaaatatcaatcagattgatatggcatgcttagggtcttcttctttgttggggtcaactcagaaaactaggaaagaggggatggggttgagtgacaatacgaatgaagaggcagatttaaagaaacggaagtgtggagctcagggggtagttcacgattagggaagatcaatgaccatgggagtgtgtgattggaaggaaaagggaaggaggtggtttttgagcttcacgaaagctggtgtgggggggttcttttgttcagggagtgggtgtgatgccatcgggggcgactgggattaatgaatggcgaccggtttctattaaaaataaggctcgtgctttaggcaagggaaaggatatcattgactctagtgcctcgtgcgaagttgttggtggaagccacagtgggttcctgaagtgtaatgaggccttcgataaaagcattaatgttgaggt

SEQ ID NO: 225669 - DNA, 2980 bp, Cannabis indica
agacaaattagatcccagagttgggatagaaaggaacttagaactaatggaggaggtagaggaggtaagcatcagtgatgaagaccccacaaggactattagagtgggaagaaatctacctctgtccataagagagaatatcataaacactatcagaagaaaccaggatgtgttggcatggagctatttagatatgactgggattgatcgtaacaccatctgccatgctttcaacattcgagaagatgcaacgccagtccaccagaagggaagactgctagatttggtaagagcgaaagttgtgaaggtggaggtggataagttgattgccaacaatttcttctgggaagcgttatatctggcttggctcgcaaacccggttttggttctaaaacccaatggctcatagaaaatgtgcattgacttcactgatctgaacaaggcttgccctaaagattgatttctactcttttggatagatcagatggtagatgccacgtccgagtacaagttgctcaacttcatggatgcctactctgggtataatcaaattaaaatgcacattacggatgaggaacacactagcttccaaaccaataaaggtgtttattgttacaaggtgataccaattgggcttaagaatgctagagccacatatcaattaagattgaacctaaccatatcaagattaagatccatagacctacgatcaactagtgatattgacttagaaagatataacgataagtttatgatatcttatccaagatcaatatcagtccaatccaatgtatactccatacatccgatactggtattctttgctagtgctctagaaaggacataatacttattcaaaatgtaagtataccttatcgctgattatcatatcaggctaaatcttgtgtactgacaaatcatgggacttaaaaaacatataattgtgattatattctactgtgttgacaacactataatcatgaataaatatatgttctggacttaatagaattcacacattaaacatataatcatgaaataaatcatgtgaatcatgcaacataaaatgatttttgatgttttattaattagtaaatctaattatattgaaatgagttttatttagggcacaaaacccaacagttcatcgtcatctgaaattccacagactgcttagtgataggaatgcgccttgctccaacagtcagttaatcgtttggctaagtgatgaacgtcaaagaaacacagcaacgaagtcaagaagaggggattaaattttagttcagagagataagtaggggcgagggtttgtaggtaaagagttcgtctgagataattctctgggtgaaggattgttgctaaagtggggaaggaaaaatgattccaatcgcctaagttttcatatacatatatggggtcaactattcgaacatttttgaaatacattgtccagattgaattaatcaaaggcaacaatatccaacggttggagatacaaaaggtttgcattaaatgcacctaaagaaaaagaataagtatttattattcatcatttcgtggctacatcctcgacgtgccagaaacttggcatcttttcaagaccagccgtcattctctgcccacaacaaacgtgcttaaaactcgtagtgcgagcctcacagctccactaaacaagcaccacgcttcaacaaaatgaaaccaataccacagaacgtgctaaccgttaagatgcctgaggtaatgcagaagatttcttccatatcctaacacttggtcaactagttaaaaaaaataagacaaacattcgggagaaagctgcaagctccaaatacatatgagtcctaggagattagccgtaaatgtcatccatattctcggattaagtgtacgtggaaattacagaaggatgccacatcaaattatgcatgattagtatataccctctgtccctcagcatcacggaaggtgttatataccaaaagctacccagaggctcttcttgttagtaaaggcggaaaggactctaggattctcattaataaaattggtatgaataaggatcagaaggtatgagtgctctaggatggtagctggttagtctaatctaggagagccttagccaaatattcctagaacctattcgggtgtgtcctatccggagctgactacgacggttgcataccttctaacactaaattagattttgtcctctgtgtcagaccttggtagtgcgcgtacgtcctctgtagctcttttttctccaacgacttgcctagacaccaacttcttaaggtgaaacctttggacaacacgcgtccttagtcccacaaattggattgcatcagccgaacaccacacgatgaggaggctccatacctaccaatagttagattgccttgttgtaaataccagccattggaatgtgttgagtacgaaaccctaggttggtggagggtttgccttcaccaacacatgtgcctattaatacctctacttttcatgtgcaaaaggtgaacgatttttacttactgaacctctgctgaaaattcctatgagctttcttcttgtccaagagaaacgaaaggaatacaaagttaatatttatactataaacacttgtaatacttaaacactcgctggcaaggctaatacaatggactcgtagactaggaattataaatgcctgaatcacgtaagaaactacttgtttattatttatcattttatattttccttaagctctaattaatcagtttttgaaaatctcaataaacaggactcataattaaaaaattgtttcactttttaaaaatataattttttaaaaaataattttatgaaactaagttaaaaaaaccaaaaaaacatcaaaatattgttctaatgtatttcaaaataatttttatttttttttctaatatttattttcatattttctctcacatactcgggtccggggtctgggtcgagtttggggccg

SEQ ID NO: 225670 - DNA, 1881 bp, Cannabis indica
ttataccaaaccacctcctaccacaccagaacctgtggtacctaagccccctccttcaacaccagagcctgtgactcctaagccccctccttcggtgtgtcctccatcgtctccaacgcaggaaacgtgtcccatagacactctaaagctcggggcttgtgtggatattttgggcggtttggtcaatataggtatcgggggaagtgcaaaggacaagtgttgtccagtgcttaaaggcttggtagacttagacgctgcagtttgtctatgtacttctattaaggctaagctccttaacgttaatgttatcttcccaattgctcttcaagttctcgctgactgtgggaagactcctccacctggatttcagtgtccagcttaaattcatcacgtctcgtatttgattaacttctaagagaaaattggtttggttaattacttatcaggttttgaagttacaaaaaggaaaggttaatcaaataaataaaaataaagatgttctcgttatttttattattaacatttgatgttatttgtttagtgccttggatattatgtgtacctaccaaagaagtaataaaatcaagatattacttcttactaaggagattttctaccatttgtttgtttatatatttcaacattgtggtgatctaatgaatcatggtcaatattttaatggtattgtgcgtgtgtgttttgcttttttcatggaatgtatcagaactacattgcaatttttttttttttttatgtttagtactaatatcagttatagtttatactagataattaaccaaacttctattatatggttattatatattttaaaattttatacaaagtactattttttaagcttttttattagtatattataaaagatacacaattactataatagtactatacatttttattacataactatttataatatcatatctcaattctaaaaataatgctacatagtcaatttgtaatatgcatttatacaaccatattatatttcttgttataatatattcattttataaatttgtgtatattaattgcttatactttatcatattgatgtttttttagagaagagtaactcgtcaaatcacaacgggcaaggaaatggatcactttcagaccaaatccaagtgttaactaacctaatagacacttgggtaagattgtgagtagttgtattcctttatcgattgatatgcaaaagaaaaatagttgggaaaggaattaacacatctttaagagcatcaacaagaactccacaatcggtgaggatactttcttgagatttgatgtcccagacaaggttcagctagttagtctccacctggtggaataatatttgattatcttgacaccaatgcaatgcttgtgataatgcccaagcttcagcacttttagatttgttatacccgaaattcggttggaagacatgtgtcaagataaagggaatgtgaatcgatgcaattgcttcttatggaataactcattaattatataagtatcagactatatttgtaacccgctgactgtaaggtcttaggtgaggaatcaatgtataaaatggcacttagtatattagtgagaaaccatatgtcgctaaatgtgaatagcaaggcaccaaagaaagcgacacgtatcaatcgtaaaagtccttagcgtaaaatgaacaaactaagtgcaaaagtcagatcgactcaagaacaagcaagcgaggtgcccatctcgctatgggaagacttcttaaaagcttcatctagttagcgttagcaaggcctacaatcctggcgagccagaatataacattcaaataagcctcgaagaactctttaagaaccgagatcgacatcagacatgcatcgtcga

SEQ ID NO: 225671 - DNA, 2302 bp, Cannabis indica
ctgcatctagagaagttattcctgtccatcaattttttacaaagttgaactctattattattattgttggtacatcatgtaagcgcaatgaccaattaagaattgcttaaggcgcaaatattgctcatttacttgagatggatgaactagaaagtggtaaatggcttaatcaaattggttatttacaaatggttggtgacactcgttgaagttcttacttgaaatctatttctagtttgataaagatgtttagcataacatgtgaagttttattaaatattaataacgacaacactacttttgctcaacgacgagatacagatacaacttatgaggtagtaactatttttaaatttgtttttattttgcatctcatgaaaaaaattatggaaatttctaatttactctgtcaagttttgcaactttagtctcaagatattttaaaagcaatacatcttgtttcatctactaaaattctcattcaaagattaatagaagatggatggaataaattagttgataaggtaatatctttttgtgaatctattaatattcttgtgcctgattttaatgctcattatactgccaaaagaggaagagctcgtggtcaacaagatttcattacagtggagaattatagagctgatatttttaatacagtaatagactataaactgcaagaattaaacaacaaattcaatgataacacaatagagttacacatttttagttcaactctagacccgagagaaatgcatgcatccttcagaattaatgacattttcaaattagtagaaaaaatttacacaagatatttcacagaatatgaaatgatacatctaaggacacaattagaacgttttgatcatgtgcaaaatcttcatgattttatagtcttaataactatttttgattaatgtcagtggcttatagaaactaaaaaagtagaagttttttaacttgtgtataaagtggtaacttttacttttacacttccaatatttacaacaacaacagagcgatcgttttcagtaatgaatttagtgaaaactacactccacatcaagatgtaatatgaatttttaagtgattgtttactagtgcatattgaaagagaaattattgaaaaatttagtatagattcaattgtagataactttggtgacatacaagagagacgttttttattttaatgttattatgaatttaacaatatattttatttttttaaaatagaaatcttaagttttattatgtttggctcctactcagttgaattcctcgctccgcccactatattatgactgtcaaataaaagcaataaaattataaatacaatgattactgagatgacaacatcataggttcatcttggacttgaccgtgataaataaggcatgtatagaatttgaagggatgatccactagaaagggtagataacgagttctttaaggcttaaagctcattgacccacatactcattaatatgttagaaaaactaaaggatatgagcaaaagacaatctatctcgaaatgtacataaatgatgtgagaggaatgatcctaaggagcacaagagattcaatcctaagtattgtcttaaaaattgtcttaagcaacaaaagcgagaaagacacctcaataagcgtcttgcaaaatacgcctagtcattcccaatattattgaagaatgtgaggcatattctgggtatgcaacctcagcaaatgaactttttttagataaggacaaaaagcagttaattcatttataccacatgttgtaaatatgaaacgtggggattgttcatgtttcataaataattatctagataagaccaaaagggaataattttcatgcccaataatcctatagatagggatagaaccaacgaggtaaatgataggcagattataggaggaaaaaccttgagaaattaagtgtagaaaaactcagagattattactttgtaccgaatatattgtaatctaaaacagatcaagaactaaaaaataatatggactcgtggattatgtagattaactacaaaaccacataaaaattcttgtgtttattaatctccattattaacagttacttttaattttattcaaaaggtctcattattgctaacgaaattatgtgttaataatttggtgctttcattgagcggctttgattgggattaaaactcaaaaaagccatctccccaagaaaaccaaaacttcctcataatggaaaactctcaacgagaagagaaaataagggaagaggagatggtgctgttgagttttgtgccctaaa

SEQ ID NO: 225672 - DNA, 1377 bp, Cannabis indica
tctctctctctctctctcgtgcagctcttgggctggtgctatggcaaaaacaagggcgagacaggggaagcagcaaccggaagtcaaaaaacctaagaaaagaggtccaacctctatggaagatgctcggaaaacaaaatctatggacgcagtcctggggattgaaccaattgagttctcggaggatgatggagaaggtgaaacggtcgctcgattgcaagatgctacaatggtagatttattcaagcctccactatcgcctcgatcttcactaaaggaaattcagcggcaagaagagatcagcaaggagtttgaattcttccttaatgccaaacaagaatgtgcagcaagcattcagcaaggtaattctgctactccacctattcttagatctgtaaatgtagttcgtaatttggacaattctttcaagaatactggaatagctcctaaggtcaaaataactcaagaggatatagaagatgagattcatttctggagttcctctattgtgtgttatgtccttggagccaatcctcctctctcggttcttgaaggtttcattagaagagtttggaatgggaaagtggataaggttggctcattgtcttatggtgtattcttagtacggtttgacacagttgaaaatagggatgaggtgctaaatggaggttatgtgtttaatagaccagtggtgatgaaggcttgggatccggatataaactttaagaaagaagacataagaacggtgctgatatggattcaactccctgatcttgatttgaagtattggggtgagaagtcattatacaagattgtgggacaattgggaacgcctttgcaagttgattctgtaaccaaggagagaaacaaactaaactatcctagagttcttatacaagtgtcgattaaacaagagtttcctgctcaaattcagtttgaagatgagcatggtttcaatgtaacaacatcagtttcttatgagtggaaaccgatacaatgcaatcattgtaaagggctaggacatgaaaccgtggactgtcgcaagaaaaatgggaaaaagcaacaatgggtagcaaaagagagtaagcaagacgcaatagttaaggagaaactacctgatgcagatggctttcaggaagtcagaaaggggagtaaaggaaaaagtattcagtagcagaagggacaaaagtggataattcctttgttgttttatcagatagctttactggtttggatattccagaatcctctcatgttcaagcacagcaaacactcacaggagcagtatatgatgaaggcaatatagaaaaaacaagaggagggggagtgcctcctgtgggagatggataagatcgtgagttggaacgtccgagggat

SEQ ID NO: 225673 - DNA, 1333 bp, Cannabis indica
gtgagtctcaaactcggtttatggtttatgactattcatttttggtaaagattgtaccttttatgctgattggttcttttctgaatgtagatggaaagaatggcttatgaagttgttctagaggatggaaagttttactacaagcaatcgggggaacagcttcacacgagcttagaaggcaaagacgcgaaatggatcttcgtgctaagtacttctaaggttttgtatgttgggaagaagaagaagggtacattccaacactctagctttcttgctggaggggctacaaccgctgcagggagattagttgtcgaaaatggcatcctaaaggtattgtcaagacataaaaagcttaaatcttttccctttttgtttgtgttttactggtgggatttggtgttaacaaagattgttcttttgtgattcttaacaggcggtttggccacacagcggtcattacaggccgacagaacaaaacttcaatgattttgttgcgttccttaaggaaaacgatgttgaattgaaagatgttcagatgagtccagttgatgaggaagatgatgctcttagcaagcaaagaagcagtcttcatatgcgaagcaactcatccgatgaggacttgtctccaactcttgttggcttagaaaccgaagaaaccaatgctaagacagactcaactgcacttgagccacagaggactaaccggttcctcaacctcaacaccaaattgactaatctcgaaattccaaaacaacaagatataattgagagtttcaagtgtgatgaacaagaatgcttgattcaagaaaacatgtttgatgaacaagagcatgatgaagaaaatgaagtggaaaatgtccccgaagaatcgattctcaagaggataaactcgcgcaaaggaatgaattcataccaattgggaaaacaattgtcttgcaaatggacaacaggtgcagggcctcgaattggttgtgttagagactatccatccgagcttcaatttcgagctctcgagaaagtgaacttgtccccgagaggtgttgctcggtctagatcatatttttctcctaagatcattagtggtttgagtccaaatgtctcaacaccaacagattgcagtagtgaagaaatggcagagaattcattaagaagttctgttcaccattcaagagtacattcatctccattgattaggaaagtatgaacaaatccatactcactaatataatatattgtcataatttttacaagtagtttttttttttctttattgattcattcttttgtgtgaatagaaaagatggtataggaattctttatcattcttttcaat

SEQ ID NO: 225674 - DNA, 3605 bp, Cannabis indica
tggcataacagacttggacatccctctgaaagggttgtcaagactgttcttcaatcatgtaataaacacattgatttcaataaagctttgcattccttatgttctgcatgttgcctagggaaaattcacaagcttccctttcccaaattttccaacactgaatattcagcacccttgcagctggtagtctctgacttgtggggaccatcctttactccatccacaaatggatacaagtattacatccattttatggatgtgtactctcgttttacctggctctatctgttaaaaagtaaatctgaagcattgaaaatgtttcaaattttcaaagctgaagctgaacttcagcttggtaccaaacttaaatccctacaaactgattggggaggagagtacaggtctttcacaccttttctcaatcaattaggagtcattcataggcatccttgtcctaccacacatgagcaaaatggtctagctgaaagaaagcatagacatatagttgaaaatggcttgacacttcttgctcatgcatctatgcctctcaaattctgggatgaggcttttcgaactgctgtttacattcacaacaggttacctacccctgttcttgacaataaatctcccatagaggttttgtttaacaaaaaaccagactatctcagtctcaaaacctttggttgcacctgttttcccaatattcgaccttacaacagacacaaattggagtttcgatctactccttgtacctttgttggttacagtctaaaccacaaaggctacaagtgtcttgatgcatctgggagattatatatttccagggatgttgtgtttgatgaacacagctttcctcatgctcatcaatctgtttctagcacaccaatccttaactcagatacatgtttgacatctggtcacatacctcataacacttcatctcacactacacatcaccctcctcccatacctgttcttactgtcccacagtcacctcctaattccatgacagaacaggccactgcagacttacctgaatcccctggtgtctcaactgagactttatctcagtctgaacctcatgtgcctagtctatcaccagagattctttctgaatctcaatccattgcaccaaccagtgatcctaccccatctgatacttgtcctaataatacacatcccatgaaaaccagatctaaatctggtatttccaaaccaaaaacctacatggtgtgcagagagcctcttaccttgaaagaagctttgcaaaataagcattggaacaatgcaatgggtacagaaatagttgctttaaaaagaaatggtacatataccttggttccattacctgcagggagaacaccagtggggtgcaaatgggtgtacagaattaaggaaaatgcagatggttctgttaataaactcaaagccaggttggttgccaaaggattccatcaacaacctggtttcgattttacagaaacgttcagtcctgtagtgaagcctgtaacaattcgagttgttctctctttggctcttgctcaagattggactgtgaggcaattggatgtggataatgcatttctaaatggggatttacaagaggaggtctacatgattcaaccacctgggtttgaagatgaaactgccccacacttggtttgcaagcttcacaaagctctgtatggactgaaacaggctcctagagcctggttcgagaaacttcaacactgtcttgttgctcttggatttacttcttcaaaagctgatcactctttgtttattcagcataccccaacatctacaacactaattctagtgtatgtagatgatattatcattactggcagtaaccaagaacatatctctcacatcattgctaatctcaacaagcaattttctctgaaagacttaggcaagctaagttactttcttggaattgaagtttctcacactgataatggaatgcacttgtgtcaaaccaagtatgccaaagacttactgtgcaaggccaagatgcagggagcaaagtccatttccacaccaatgacaagtggcctcaaactttctgcctatggtagtgatcctgttgaggatcccaagctatatagatctgtggttggtgccctgcaatatctcacaattaccagacctgaaatagcatacagtgtaaacaaagtatgccaatttatgcaaaatccttcacaagctcattgggctgctgtcaaacgaatactgaggtatattggaggcactctggattatggattgcatcttactaagtcattgaactttgagctcactggcttttgtgatgctgactgggcatcggatcctgatgacagaagatccacttctggttttgctctgttcttaggcaacaatctcattacatggcaatccaagaagcagcatactgtctccaggtctagcactgaagcagagtatcgaagccttgccattatcactgctgaaatagcctggctgcgttctctcttctctgaattgcatattcatctgtctaaacctcctgtggtctggtgtgataacctcagcaccattatgcttacactcaatccggtcttacatgccaggactaagcacatcgagttggatctgtactttgtgagagaaaaggtccaacagaagcaactggaagttaaacatgtgcctgcttttgatcaagtggctgatggcttaacaaaagctatctcaagctccaggtttgacttctttcgaaacaaacttaccattggtagtattaccaattgtaagtttgagggggcctgttagtgtgtattgttgcttgtgttagtttcagtttgttagattcagttataggttagttggtagttagttagctgttattttacagctgtcatttatcaactgatttgtaaccgattctgttattcatgttcagagtgtaagcttgtatataagtcatgttcaatgactgtgtaaatcaatgaaggatttcattctctttgttcatctttctcatcatctttcttctctgtcttttctctctctctctcttttcttttcatttctggtttgttcttgttctctcttgacaatgtcaagaagatctaataatgcatgcatgggattggggccaacaaatacagctccatctggggtttcgatatttccaattcctaaaaggcctttaataatttccaccattgctatacctacctagctatagtagtactctccctggaaaaaataaattaagactatatatcatgatcacttctaaaaatatttgatcctaatatataaattagtaactcttgatctatgattacatgattatttactaaacaaaccatgcatttaccaaaaaaaaaaagtttatgttatgtaattgacctttaataacatattagcaattgtacatgaggtcactatagttaattattattagataactgaaacctacattatatatacccttttttatctgtactcttttcgttaaaggtctaataattatagacttcaataacagatattcaataaatattaattgcttctcatttttcttaattctaattttcttcttggtaattaatttcttggctagttctcttggttct

SEQ ID NO: 225675 - DNA, 2726 bp, Cannabis indica
aacattaaatgttatttctgatctatattaataagtaaatttgattatattgagatgagttttatttagggcataaaacccaacacaaggttggtttcaatcctttcaggtactgtaatcattgggccacttatcctaattttaagaagagtgttctaacttgctgggataagcaatcagatggcagaagtctcaagaggattgttaaaaagatgcttagagttaaacatgcgttaaagaagtttagtagacatgaagttggagatatcagtgaagagtacaaacaagccaaagatgagtactgcagaattcaagaagaagccgctcctaacccaggagatttaggtcttcaatcggcaactgatctaaagcagcaagagtatcttaaagccaaaaatagatataaccagttcgttggtcaacagagcaaaataagatggttgaagtttaataatgagaattccagcttttttcatgctactatgaggaagagaaggcttgaaaatagaattacaacctatgttaaggatggtaatatagttgatgactatgaggatgttgtgcaccactttgtcagccactttgagaatttcatgggtagtagaagctctgcctcgaccattatagaagaggattgtattaaacatgggaattgcttgaatttggaacaacaatctacgataatctggcctttctctgtgggggatgttaagaaagcaatgtttagtatccattcatccaaaagcccggggttggatgggtttggatctagcttcttcaaggacttgtggagtgagatagggaacgaagtctctaaggctattttggatttctttgccactgggtacctgccaaatgaattgaatgaaacggtgatctccttaattcctaaggtgtcagatctgaacacagcaaaggactatagacctattgcttgttgcaatgcggtttacaagtgtatttcaaagatgatctgctcttggcttgctgaggttcttccatcccttatcaaaggaaatcaaggagccttcatcaaaaactgtctgcttgcccacaacatcatgatctttcaagaccttctaaaggggtacacaaggaagaatgtgtcggtgaggtgtatcttgaagattgacctaagtaaagcttacgatactgtagactggcagtttgtggaagccatgctcaaccagctttgtttcccttctcgatttttcaattggataatgaattgcctgaagggaactaggtaccatctcttaatgaatggcagaatccaaggtaacttcagaggtgaaaaaggtctccgacaaggagatcctatgcccccacttttgtttgttttaacaatggagtacctatctagactgttgagtttctattcagagaaagaaggatttggctatcaccctttatgcaaccaccttcgtttgacgaatctttgttttgcagatgaccttgttctttttagcaaaggcaacttgaattcggtaaaaataattcaagaagccttcactaaattttgtaatgctacagggttatcagtaaacaaagctaaatcgtagatcttctttggtggagtcaaagaggacataaatttgaagatcctggagcttgtgcaaattgaagaggggacttttcttctaaaatactaatggttaatctccgaacaacaaaatggaaggctttagaatgtggtgtaattcttgataaagttaacaagaatctgaactgttgggaaagcaggaatctttcgtttacaggtagagctcaattaattcactcagttctgcttggaattcgtaattactggatgagcatctttataatcccccaaaaaattgctgaagccatacacaaaagttgtcgagatttcctttggggcaagaaggagaatagaagcaaatttcatttagcttcttgggagaaagtttgtctccataagaagttaggtggaatttggtttcgagaagggaagaaatggaacaaggctttgatagtgaagtacctttgggctatatcgagtaaacaagataatatgtgggtgaaatggattaactcgatctatctcaaaggtcaatcaatttggagttaccacacaaagaaggatgctagttggtacttcaagaagttgttgaacctaagggtatcaacgagtgaagctgagcggaaccttgctgtgaatggaaggaaatttcatgcctcaaagttttacaatatgcaggtgaaagagaacaaagtcagctatgctggtgcagtgtgggataaacttgtgttgcctaaacataggtttatttattggcaagttgtgaacacttagcttattacccgagacttgcttaatagaattgtgccaattccggatgtaaactgtcctgtttgtgatcaagcagaggaaaaccataatcatgttttttttttactgtcccttctccaaacaggtggctctcaaagtgaaagagtggcttgggcaagtgcattggccggtttttgtcaaagacctcagcgacagttgctcgacaactcagcgtagccaccagaacagagtgataaactttgtgattgctgcttctttataccagatttggttaaatagaaatgattgtctttataatctaacttgtgccaccccttgtaagattagtagagttgttagaaccttggttaagataagaattttatgcttaggcctttcaaagagggcagaatgacaaggtatttacttaatg

SEQ ID NO: 225676 - DNA, 3812 bp, Cannabis indica
atttcactttataggcactaaaaataactctataccatagagttatcaatgcttcttttaaattaatcaatttcagctcacagacctgattacgctctctaagcgctgagtaaagcttgtgagttggtcttgagataactttggttgtctcttaagtgagttaaacactaccacccatgaatccttggataagtggagagtgctcacacgtgctcacaggtgttaggatagataatacataacgatttttccgttattactattaaagattagtttttctgttatttggttttcttacttttgtactctgctattgaatataattaaagcttctctaagtttaagtttagtttagtgagttagttaataccactgttctagcttagtgtatgaattcagaaactctctgttcttcatcttcttttccactattacatggtatcagattgttattgactcacgtcaatggagtcctcctcgattgatcctgctaaaaattatgcttctgctacacctcctaagcctatggctcagccaattcctgctacgaacgctgcttctgcgacacctcctgcgcctatggctcaagcaattccttcttagaatccgttttccaattctttgtcatcctatctcataatcaaattagatcgactcaatttcctggcctggaaatcacaggttgttcctactatgataggccacgatcttgatgaaatcttgtttcacggtgttcctcctccctctaccctcgttaatggcggtcccaatccaatgtttgcttagtggagagagaaggatcagctcctctatcctggcttcgctcatccatgtctgaaggagtccttgcatctgttgcaaatttccaatcttcttacgtggtgtggcaagccctggaacaaaggttcaatagtcagtcttgtgccaggcttcttcaactgaagaatcagttctccacaatccgtaaaggtaatctttcaatttcggattatgctgacaaggttcaaaatcttgcagattccttagctgttgcaggttatactatgaatgatcaagatatcattctgcaactcttgaatggattgggacccgagtatgattccgtggtttctggtattacagcgaaaagtgatcttctttccctcaaagaagttcaggctcttattctctcccatgaaaatagattagagaatcacaatgctgtgaatgaaatggccatgaaaatgcaagccaatttaacatatgggaactcaagatccaatgtctatcgacctcctcaaagcaccaagaacatgggtcgtggatatcaaaaaccaagaactcaatctactcgaccataatgccaagtttgcctttgatttggtcataccgcacccacctgtcactattgttttgataagtcatgggtcacccccaaaccaagaactgtgccacctcgtgcatttgttacaaaaaaagaatgtgaatatgatcccaggctttctcagcttcctttgttccagattcttgtgatgatgagggctggtttgtggacacaagggccactcataatgtaaccaacaatcctctgaatcttgaaacatccatctcttaccatggacatgactcccttgctgttggagatggtaaaaagctggttatttctcacattggtaccacttctttacccacttcctctaattgtcctttaaaattgcattatgttcttcaagtgccggctataacaaaaaaccttgttagtgtatctcagttaactaataacaacaatgtcttccttgaatttcacaaaacttgttgttttgtaaaggacaagcaaacggggagagttcttctcaaagggaaagttaagaacaagttgtaccagttaggagacacaacatcaagccaaagatcccaagaaccacctcagtgtcatactacctctattgagtctgcctcttgtatttctaattcatgtcattgcaatatttttcaatctcaaaattgtactgagtctgagatgaataaaattgatcaattttcttttgattcctatccctctgcgtttcatacatttaaactcaatgatattaatatgtgacacttaaaacttggccatccctctcccaatgttatgtaaagaatcctactctttattcctcatacaggcaccattaatcaattgcaattttgcaatgcatgtcaactaggaaaaaactacaagcaaccctttcctatttcccttagcagagcatccacacccctagaaataatttacaccgatctttggggtccctctcacatcacagccaaagatggctataaatactatgtacatttcctagatgactacagcaggtatacatggatttttccatttgtttaaaaaaagattaggcctttgatacctttattagatttaaaagcatggtggaaaagcaatttaatttgcccataaagaatgtttaggctgactggggtggagagtataggacttttgctagatttttgagtgatcaaggaattcttttcactcactcatgtcctcatacacatgaacaaaactggttagaccagtttctgagagaaagcattggcatatcacagaaactggtctaaccattcttgctcaatcgggtttggactttacttactggtggttttccttttagtgtactatttataccattaacatgttacctacaccaatgattggtcatatttctcctattgagtgcttgtttggaaacacacctgattacactatcttgaagcctttcgggtgtgcttgttttccatacttgtgaccatattatcacgataaaatggagtacaagtctcaataatgcatcttcttgggctactctaataatcaaaaaggatacctatgtgagaataaagatgggagactttttatagcaagacatgtggtattcaatgaatcttgcttccccgctcattccttctctgcacataatcaggtaccttcaactcattccactgtaaatccttccacaatatttttttcccatcccctaatagcatttctccacttgttttgcattctgcatctcaacccacaatggtgagcttcctacacctcaacctggttcaaccatgcaagggtaaaattccaacattggtgctgcaacattgccaaatgaacaaccaattcaagacaacccccttgatttggcaccagcatctactactgctacaactgatgctgtagcagtaacaaaccagtagcatcataatcctggcaccataaatgaaccagttgttgcttcccaacccgttatcaatgagccagttgctacaatccctcataacacaccactgattactcccatcatcaatgcgcctctcaatattgtcttgcctcttacagatatcacaaaccctgtctcccattctactttagttccttccggttcacgcaaacaccccatgataactaaatggcctttctaaacctaagtcctatcttgccacaaaacatccactcccttaatctctacttccaacagagcataaatccctcaaagctgcattaaaagatccaaaatggcttgcttccatccagtctaaattagttctctaaagaaagctggtacttggcatctagttccatatggaaatggtatgcatgtcattggaaacaaatgggtgcaccgtgttaaacttaatgcagatggctcgttagacagatgtaaatcacggttggttgctaagggctatcttcaaacacctgggatcaattttgaagaaacttttagcccagttatcaagcctgcaactgttcgggttattctttctataacagtttcaaa

SEQ ID NO: 225677 - DNA, 2255 bp, Cannabis indica
ttgagaagagttaaactcttcggggagatatcaagctgtctcgaaaagcttggaaactttgtattggatgacttagtttgacctctgacagttagttacagttaactgttatttcagttatttgctattcattgttttgtttctccttttgtaaaaatcagttagttgttaggctttgctatctttcagttgttggtttttattctctgttcaaggttgtaacaaactctcatatatataaatatcagctcacttgatcatattcatcgatcaagcttttctttcttcacagtcctgttttctaaactaactgttcaagacattttcatggtattagagctcgtgactcatgtccatggaaacgacttcatccgatccagcacaaggtcatggttctaccatgtacgacaacaacaacacaactccggcaagctctgctataccggcaaccacaaactcatcttggaatccattttcgaattcccttacatcatctctaaccatcaaacttgatcgaacaaattacctggcctggaaatcacaagttgtgccaacagttattggacatgagcttgatgagatcttgttcagtaatgttcgtccaccgactactctaatcactagagaaataaatcctggtttcaatcaatggaagaaacgtgaccaactcttgttgtcatggctaagatcctcaatgagcgaaggcattcttggatctgttgccgcttactccacatccttcgaagtttggaagtcccttgaacaaaagttcccaggtcaatcaaaagctcgattgctgcagttgaaaagtcaattaatgaacattcagaaaggtaatatgtctatatcagattatgttgataaaataaaatccatttgtgacaatcttgctatagctgggtgcatcatcaatgatcaagacattgagctgcaacttctcaatggtcttggacctgagtatgactctgtagtttctggtattacctccaacaatgaatctaaaagccttgaggaaattcaagccctattgatggcccatgaatgtcgtttagaaagacatcatgttgtcttagacattaccaacaaaatggccgcaaatcttgctgtttgaaattcaagaaccggcttcaacaacagcagtaacggaaacggaaatttcagaccctactatcaacaaaattgattcaacgaggcagcaagaaattccaacaattttcccccaagatatcccaattccaattcaagacccatctgtcaagtttgcctaaaaattggacatactgcctctgtttgtcactataggtttgacaaaaattgtcactccaaagaacaactcacaatctcctaaggcttaccttgctgaacaagaggcatctgaagcaaatgatcctcaagtttattcaactactacagtaccggattttggtgatgacatgagatggtatgtggacactggggctacgaatcatgttgctcttggcatggaacatctcgacagtgccactccatatcacggttcagagaccttggctgttggagatggtaagcaacttctaatatcacatattggtaaaaaatgcattcactctaattcttcccctccactgaaattaaactctgttttaagtgttcctgctattactaaaaatttgattagtgtgtctaaactcactcatgacaataatatttttcttgaatttcacaagaattgttgctttgtgaaggacaaggacacggggaaggtcttagttcgagggaaacttaaaagtggcctatatgttcttgatgagaactcctccaagttttctcaagccaccctacaatgccatccacagtttcaaaattaaatagttcaatagacaattcttcccgcagtgtctttcattcatgtaacaatgattgtacttcaaattctgtgaacattagttcacctatcaattgtacaaatcactctattaataaagattcaacagcttcaaattttcaatgtcaagtattgatatctactgctggttatgatatcaatctgtggcatagaaaacttggtcaccatggaccaaataccttaaaacaaattctatctcatctatcattacctaactcattaaaagaattaaaattccgtgatgcttgtcaaaatggcaaaagtcataaattacctttccctgtcaaatagcagggcaacacagccattagaactccttcacactgatgtgtggggacccctcacacacaccttctatagatgggtttag

SEQ ID NO: 225678 - DNA, 2435 bp, Cannabis indica
tttcagtctttcaaaaaatttgttattccacagtctgttccaaagagacggggcaacctcacaaagaggtgctctgtcaaacacttgggcaagataagctgatttgttcgagaactgtccattccctttcaatgtccaaatccatttatcgttgcctagagcagatggattacccccttttaagatatcagagacagtttccttgttgaagatactgtttaacaaggggatattctagcctccattatctaacataagatcaacaactttggtaaccccaaacgtggaggagccattagtacgagggaagaaatctttcctgtgagcgatccaagggtcatcccaaatattagtatctttcccgtccaccaccaacttacaggctcctttttttaagatagagttagatttaaccacatttttccaaaaccacaaatcaaaattcttggatgtattaagaataggctttccttattttgcttccaggatccgacagtaaaaggattggtttccttttaaaaggttccacccccatttagccaagaaggtgaggttcatttctctcgttttacgaaaacccaaccccctaaagacttaggaaggcaaagcttattccaagcttttagatacaaaccatggttacccttttcagacccccacaagaaatcacgaaccattccatcaatcttagccacaaggcgatttgagagtatggtcgtttgcatggcatacataagtaagaataggcgaacgaacttttatgagagtggcacgacctgctttagacagagacttagctttctagccctgaagtttaaacatgaggtgttcgatgatgaaattgaagtcagcgtccttaattttgtctggagcgaaagagaggtaaccctaagtatttgatgttaccttctggggacccaatgcccagcaccgacttaatacctctttcatgccattggaactatttttactaaaaatagatcgaggttttgagtttattgacttgttggctcgactaaacacaaaacctctcaatgcattgccaataacttttagcttcttccaaatttgctctcccaaccaagattaaatcatctgcaaagaaaatgtgggagagtatagggccacccctgcttagtctaatacccttaatagaccgattacattgtgcgtcgatcaaaagtctagacaaaatttctgccgcgcaaataaacaagtaaggagacaagggatctccctgtcgaaggccgcaagagggcgtgatgttaccaaactgaccaccattaaggcaaatattgagagaggtggtagtgatacattgggaaatccaacctcaaatttgcggcgccccaaacccaacaagcacatggtcaataaatttctagctcagtttgtcatatgctttcataaggtcaatttttatggcaaaacaatcttctttgcctttttttctgttgaaggagtggataatttcctggatgatgacattattgtcctgaatattcctccccagaacaaaagcagcttgggtaggacaaatcagggagggaagcagaggcttaattctattagcaatgattttagaaataaccttgtacataatgttacacagcaaaataggcctatggtgatttgttctttttcgggttttggaccttggggataaggacaatattcgtagtggtgaaacatgctctattattgaatgaaaatatttgttggatgggaaaaatttctccaccaatcttttatgtgattgtaacttgtatgaattatattgactaataaaagaaataatcttcctttaggctatgtttgaaagttagattttagagcatctctaatggagtgctaaaaaagtggtgtattactatattttagcacacttaagaaaaatactactccaatggtgttctaaaaagtagggctgttcaaaaaaaatttacaaaccgtccaacccgaataaatcgcccaaaccaaataaaccgacaaaagtataacccgaataactttacaaaaaattcaaaccgcccaaggaatatattggacgggttgaatattattctaacatgcccaaataacacgaacaaactgaataaaccgatttacatatttttactaaaattatctataatataatatataaattacgtttaatagttaacttaatttacatttaaagtttgtattttatagtatttaatttgaaatttagaatttatagttgataattttgattgtatttgaatattgaagttgaaatttaaaatttacatatgggtatatttttattctatattttgaaaaatattctttaataatttaatatttattcaatttatatttattttttaacattaatttaaactataaatattttaattttgaaagacttgtactatacatttattttttcaaatcaattatttgaatac

SEQ ID NO: 225679 - DNA, 2899 bp, Cannabis indica
tgtatattatgtcactacaaataatttagctactaaaaaatataatgctataaaagaacaaataatatataagctcaatcactacaacaaacatagcatttgataatacatcaatataatatttttaaaaaagtattattattgatggaatgttaggggcatattacggtgggctgtgataattttttaaaaaataaactttaaaggccttaagcctaataacaacatatacattactttcttaagcccaactaccacactttcagaaaccaatttcacgaagcactcttctcttcttctccgcctctatgacgaagctctttctccacctccttgacgaattgtgagaaacaatatgagaatgaccaacatgtttaatgtgcaaacctgatccatctcccatgtatagctgatctgaaccaccatattcaacactgtttccaagattttgtgcttgactggtgcaatgattcgtagcacctgaatcgggataccaatttgtatcattgtaggtgctgttggttgcaagattggcttgagcttgaatctgcgattgagattgaggtgtggatagagagctgctgctgccattagctaagggtggtcctgagaaagacttgtcaaatcgaagaggacagtcttgcacaacatgaccaaatctcaaacagagttagcactgaggccggttaggaaaattaaagccaaacctattacttctgataggattgaaattaaagttacctcttcctattgaattctgattgggattgggagaaaaatgattgaacctgatatttggattgggattcctattaaactgtgcagaagaattgttgagttgggaattgccacggccaaattgcttgaatcttcgaaaagcaagattggcttcagcattggaatccagatcattggtcaccaagttctcacttagatcaatttctttattggatttttcaattcttgacttggatgcaagaagtaaggcttctatttctcccactgtatagttttcaacccttgtgttagatgaaatcacaaaggtatcgtactcacttggcaaccccttgaagatggcagcaacatggtctcgatcactaaggacttcaccaactgaggccaaaagatccacggtttgcttgaccttaaggagatactcattcaaactcatcgatcctttattaaattctgaagtttcatcctaaattcgagaatcttggaagaaacctgtagtgtgaagtgtttttccagtgcattccagatctgaagagaggtattgcacccaaccattcgtgtcaagagactttcagtcatagacgacagtaaccaagatacaaggagctgatcttgaacctcccaatctgaataaaatggattaattctgtcaagatcacgatctgcatctatcaaaaaactcagctggtggaggttctttgatatatttcagcaagcgatttcctctgatagccgcaagcacttgttgcttccatagcaggaagttgtgatcgtttagtcgaatagagatattgtggttgaagatcacaggttcttgatgtgttcgagttcgcacagtagctccatttgcaccagcaggattcgcatcggagtttccaccagaatttcccacagttgccatattcacgcccaaaggacggaactgctctgataccatgttgaagtttctagccattgatgaacaccaagtacataacagaacggagaaagaaagataagaggaaggagaagaaagagaaggaaatacttagcaaaagattctcattgattatgaacaagtgttacagcatttatagagtagcagtaaatgaaatccataacaaactttctaactaactcacaatacaattacacgtgtaatcaatcacaactaacagctaacaaccatgtaacggtttcagctatcttcaacacaaacggcgctagaagcttcagttcaggtgagttagatgctttcttcgtcggagatggtgccgtctcggagacgacatgagctgctgtgtcgtcgaatcgggatgggcttcatggcgaccgacgtcggaggtcagagatgcaccttggctaccctcggctagaagaggtagaaattttaggttaaaagttgaaaagagaaaagagaagagtttgaggaaagattcagagttttttatttggtatcaaaataaatattagtatattttttttgaaaaaattgcaatataattgggatatgttttaattggacaactaatatatataaactcaaattttcattttattattttcttgatctaaattcatattattattattcaactaatattgtcctttttagaaaaaaaaaaaaaataagtccaatatttattataattatatttatagaaaatagtacaaaatgtaaagatgacttcaatctttttaaaaaagttctgacaatatagagtactttttctagttaaaataatatacacgcaactctacaataattagtataaatcttcaaaattcaacttaatcaatggtctataaaatgttcttatactataagaacaaattaggtgttcctaatttcctatatatatatatatataaaagagaaaattaatctaaaataaaggtaagaaattcaatatgtaattgacaattgtaatgaaactatagagccgggcaatacatttgattaatacacttttgttttaacatagctctgtgacagccatacatatcattctaatcgtgctatatttgaataagaaatacagggtgcgtttggaaagccacaatgtaattggatttgtgtgtaattggaggtaattacacaatttgacatatttgtctgaccatgtaattacactataactgtgtaattggaagtaattgaggggttccaattacactctccaat

SEQ ID NO: 225680 - DNA, 5819 bp, Cannabis indica
gataactaatcagattgtaaagagttttatttagggcataaaacccaacaatctatgggtaggtttggaacgaacaattgaccctattaaagaggtagaataagtatgcattgatgatgaatatcccattaaagtcaccaaagtgggaaagaatctacctccagcagttagagaaaagattgtctccacagtcaaggcaaataatgatgtattggcttggagtcattctgacatgactgaaatcagtccccgtgtgatttgtcatgcactgaacatagatcccaaggcaaatctagtttgacaaaagtgaagacccctagatccagtgagatcggaagtagaaaagttaaccgacatcggcttcctcaaggaagctctatatcccatatgactagccaatctggttttagtcccaaagcctaatggacatggaggatatgtatatattttacaaaccttaacaaagcttgcccaaaatactattttccacttgcgcacatggatcagatggtcgatgcgacctcgggatacgaactcttaaggttcattgattcatactctagttacaattaaatcaaaatgcacatggctaactaagagcgtacaagttttcaaactaacaaagacatttattgctacaaggttatgccctttggattgaagaacactggagctacctaccagtgaatggttaataaaatgttcaaaaatgtactggggaagaacatggaagtgtatgtcaatgacatgttggtgaaatcaaagacttccatgagccataatgaagatttagaagaatcttttcattattcgagagtatggaatgaaactaagcccaaagaaatgctataagtgccatattagtgcgagaagaaggaaacgtacaacttcttgtatattacatgagcaaaaaattgttgggctcagagtccagatgtcccatgaatgaaaaactttccttttgcttgctaattgcttcatggaagttaagaccatactttcaagctcataccatcagggtactgaccaaccatcctctttgtgaagtattacagaagtcaaagtcatcaggaagactcctaaagtgggaaatggagcttagcgagtttgatatcaaatatcagccaagaattttaattaaaggtcaagccttagcaaatttcattgtggaatgcatgtggataaattacaatcctaaaatgccaatcccagagcattagaaaatatatgtagatggagcatcaaatgagaagggttcaagagccagaatcattctaatttctcctcaacaacttcagcttcaaattgcagtcgaatttgaattcaatgcctccaactacaacgataaacatgaagcaatgattgttggcttgcaattggctaaagaggttggcgccaagaacattgacttgtacgatgatttgcaactggttgttaaccaagctggagaataccagacaaaagtcaaaaatatggttggttacgtaggaaagaccagggagctattgcaacattttaagcactagtctgtgaaacaaatctgtaaggataaaaatgcctttgcgacatactagctaaattggaaatagatccaaaaatggagaaatacggactagtccccatcccccatctactcactccaagcacagggacactgggggtgttagttattgatcacttaacttcttggatgaccacaatattgaaaaatctagaatcaggcacactctcgaaagatagacttgctttgtggaatatccaatattaagcccccaaataagtgatcatggatgtaaagctatattaaagaggattatcgatgtcgtatttaaggtgcatagctagaaccgagataatcgttgccatgcatgagatacatgaaggattttgtagagatcacacatctagacccagtctttctaagaaaatcatcacaaaggttatttttggccaaccaggaagaaggattgcactgaatatgttcatttatatgttctagcaaagttggtcaccggttcttaaagatgttgctattttgcagaaatgagagactcaaaactctttatttctgagttagttggaaatgagaaattcaaagttgtgaatttgattcctttgacttcatagatcattgtcattgtgaaaaactagacggatggtaaaatcaacatcagattcgtagcacactaggccatttgttaacctgggtgctgggtacttacttccgagctcctaggatttcgtttttgatacttccaaggcttctaaacttgaggagaaggtctcctaccttgttttgagaatcctaaattcaatggttgcatctgatttggcctttgagaaattgaaggcaacatcctaggttgattgtcaacttgggcgctgggcctagccctaggtcaacctgtgcgcgctggaacctaggtaagtgttgtcatgcatgagatacatgaaggattttgtagagatcacacatctcgacttagtgtttctaagaaaatcatttgccaaagttatttttggccaaacattaagaaggattacactgaatatgttcgcaaatgttagcaatggtaacgttattctaaggtcctaggagctccaccaacagagttaaccctcatgaacagtccttggctattttctatttggggtgtagacttactgggatcacttccaactagaacatagtaacttccaaaaggaggagtcaaattcgccattgtggctattgactacttcaccaaatgggtggaagctgaacccatgaacatagtaacttccaaaaaggccttggacttcgtaatcaaaaacatcgtgtgcagatatggacttctacacaagatagtgtctgataacgaaaagcaatttgacagtgatcaattcactaactattgtatcaagcacgaaatcatcaaaaacttttaagctattgcatgacctcaagcaaacagacaagtggaagctatcaacaagattttgatgacaaccatgaaaaaaaagcttcaagcttattatgaatggtttctggaagaacgtccaagggttctttgggcttgtagaataattgaaagaacttcaataggtcacactccgtactctatgacaatatggatgcgaagcagtaatcccagttgaatccataatgccttcacataagagagaagctcacgacactactcgaaaccatgctttacttcaagaatctttggatctaattgaagaaatttgagattagtcacaagttcaacttaaaatgtaccaataaaagatcgctaaaaacttcaattccaaagtcaaaagcaaaagatttgaaattggtgatctagtttggagaagtgtatttccagcctctcaggagccaggattgggggtcttaggaccaaactaggaaggtttgtatgacgttcaagatagaattggtgatggaacctatcacttgaaaatgctagatggattagaaatcccaagagcatggaatgctgaccacctgcttaccaaactaggaaggtttgtatgacgttcaagatagaattgatgatggaacctatcacttgaaaatgctagatagattagaaatcccaagagcatggaatgctgaccacctactccgatactatcagtaaactgagggtggcaagattacttttctttttcttttctttgatttttattttataagtttaatttccatggactcctcagggcatgaaccatttgaataaaacaagaagggatttccatttcatattcagtttttaaaagttttgtcttctaacaagtgatgaaaagtctaaactcttaatctcttaggggtaggatacaatatattgttagatgttatacctcttctataagaataactaaattaacaacaagtataagagtaggaagtatcttctgaaacttgagctccaaggaactggaagtaagccactgccttattatacttaaaattaatttagcgcacttcataattaactcaagttaatttaatttagaattttaggcttcataattaactcaagttaatttaatttagaagtttaggcttcatgattaactacggttaatttaacttagtacttcaggtttcataattaactcatgttaatttaacttagaagttcaggccttgtaattaacttaccttaatttaactaagttgtttaggtttcttaaataactaatattcaagttaattaagtatttaagtttaaaaagtcgtagaactaatggacacttactaaaaagttttgattttctcgagtaattaattactttaggttaattaaatatttaagtttcaaaattcttaagtaaaagatacttatcaaaaattttctaaaagtatgctgttaaattacaaaggttcaggccattggaatcatgttccaaggaattaaaaaaaattgtttaaaagaaaagtcaaatctaagcatttaatcgaaagcccaaaggttcatgcttttagaaccagaacctcaaggagttggaaataagattaaaacttagtaaattcaatagatgaaaccacaaatatctatatagttagtaaagtatacaaatatccaaaatgtgatcacatacttaaaagccctatggtaagggcatacaaattgtctctatatacgcaaaaagggggatccctatcccccaaagcttaataacaaaaaaaatagtaagagttggatagaattcggtcaaggcatgaccagttggtggttgagtatcaactggcttaacatgagtagagacctttgggactgaagaattgactattgaaggagcgtcaattgctgaaagagctgggtcttctaagttctctccctccaggggaaagttccaagatcgaccacctttactcccctcgctgctttcttggcttctttggctttagctagttgaaggacttgaggcatcaattgtatttaatcttcatcatatagaaaatccatcacagaattgttcagtttccaaatgcgtatagagaatacacgaaagactgcttcaacactcatgatgtcctagcctcctggtcttacttctcctaactcattttctgaatttggccctctaactctaaagtctttttctcagataccttacgagcctattgttcttaagccaaggttttcttggtagagcttaattcaacttcaatttcctcaacctttttaagagcacccttctcaacttaccctaccttctgctgcaagtttgaataaagtttcaccttcctctctagagtgatggtagaaataatcttgtcatctagaagttgagatttcttgtcatactcttgagacaaaagggttgccttagctctgcgtgtttgaggttctgcttagcttgctttaaatctacctccaagtcactaattcgagagagagcctgcgtgtatttcactttgtatctatctccatgttctctctcagtcttggttgccttctttttataaacaacaactttatctagagattcatttactctttgcttaataatggactccatcttggcattggcatatgctaaagcttttatagcctcttctctcctctgttcagcattggtgcgttctaacttcaacagttcaagttcataggctagcttgttaaccaaagtgcaactcctctttgccattaggctaacctgtaaaaagagatatgaatgaatcagataaataaagtagacaaatcttttgccttagacaatttaagtgaaagttaacttccaacattgacttgggtcctcatagtatctttcatgttgatagggtccccactcaccatcatcgtaaacctgtaagtaccaagctt

SEQ ID NO: 225681 - DNA, 1374 bp, Cannabis indica
ttgtctagttttcctggagcatcactttcccatgttagcggcaactttaatgttgagactcataaagcatgcccttaagatagacaataaactttcttggatggaagaaatccctctttctttctgtgtaacttttgttaccgttgttatcttaaccattatcggttaccccagcaaaaaaaaaaattcttttactttatgtttttggtttgagtgcgtgtgcgattggctctggtagccattgttttatgctgtcatcattagtaagtgagagatcgatttgcataatagttggatatttgcgataaagtacataaattatgctaaaagtctcaattaagcatgcttcttagcaaaaacacttaagaatttcgccaaatattattttaaactaatctataccatattaacaacaaacgacaaaattaatattaatatagagatatctaaactgcaacgtatttttgccatataaaaaataaactaattaatttctctttttgtcttagttacttgaatctctctcagcccaagattcacatgaattgcgcaacaagaccattaaagtcaactctcctaatgagagatgtcagatatgtttgaatgaataaattttgaaaaatttcttgctggacacttactcaagctcatacatatctatcaatgggaatgactagcttgtttgtcgtatgtgtgaaattctgtaatactactgttaatattaatgtgaaagaaggatatatcttatcaatatatatattatgagagaacaaaattgtacaaaagaaaagagtaggtggacacagctgaggtaaaccctataaggcttgttccccactaaaaagcatttattcgaaatagtcacactgcttagatttgcttttgagattcgcccatttcagctactgtcatatgaagctttttagagttaattaaagaaaagaatcacccacaaccaatttaggcaagaactagctagaaatctcaaactttctagtcattccaacatcctaagtttagtaaaatcactgtgttctttggactatctttacctttggtgatatcaatgaaatgccttttgaagtttatttatgtcaaatctcaattattttatttaattatattgattatcatcatatcgagatgaatctcatatcttgattagtttattaccatatacgtacataataatataaataacactaactatgacctccattgaattgatatagtactatttttttaggcaattaatatttagcttcttgaggctgaaactttatattgctagaccatctctgatgataattaatttcagattaatatatattaatctaaagattgcttcaccgcttaccatatcttaagactggt

SEQ ID NO: 225682 - DNA, 2873 bp, Cannabis indica
atatatgtaaagtccaccaatgtaataatcaaacattcagtaacgggtactttgcagaagaaaaaatattattcagatttttttgaagtaaaatgttacaattattatatatgagatcaaaatcaaaattataccacaagataatgccactggtccgggaagaaaaatcaaataagaattagtatctttttccaaattttgggtatatcttttttatagattttctcaaagaattgaaagcgatagtgccatgaaagcaatattattagttagtagtagtagtagtaatactaagtgaaagagtttattcatggattatgtatgatggataatcaagtcaaactgataaatttgaacgttgttgttgtgtttttcaaatggtagagtcggcgtcaacaaataaggtttggatgtatgtgtttttttattattataataattttaattaatatagtttacaagaacaaaaagaagatttttattgaatgataatgaaactttgaagacttgttccattctaggttattggtactactgctgactgtggctgtgactggcagcctaaaatgtacttttcctacaaataaatatcaaaagaacatcattacatttttgtgagatgccattcatttcatttgactaagtaacatacaacataatcaattttccttttggttgttttaagtaacaatgaataatatcaatttgctttatttgagtgagtcatgaatcatcatggttttaacaaaatatcaaaattaaattttactcacaactatatttttatttttatttcataaactatttctattgttaatttattaattcataattaacattaatatttatacttaattagtttattgatcttgtcatcgtaaacggagacaaagggggtcaaggtggccgtgactcctctatattttatcaattttttaatacatattaactataaattaattatgattagtaagaaaataattattaaatgtatttcttttttaacaaaaaaaaatatttgattgaagttataataaaaagactcctaatattcgtccaaaaagtggcccaaatgctttttttcaaaatcttattaattttctttctaagcccatgaatcctttaattcacacctcactaaccctattatactaacttacttgcccaattatcatctcactatttcactattctcatatcatctagactttttttttcccaattctagagtcttctttcctaacttatgaccccctaaatcttcaacatcaaatttcattactataaggaactcaaattcaagactttttttttttctttataatttcaaattcaggacttaataaagaagaaaagatcattagaaattgctaaaatctttgatagtttcatcataattcattaggtaaatttcaattaattattttgtttttattgttttgtatgaatatgatgaattgatgattttatattgatcattcaagattcaacattttttttggttgaatgattcaataattattgtgtgagtgaatattattcaatgctctacatatagatcaactttttaactgtattaaatcatgctattattaacgttagacaagatttttatgtgattttatctccatgtaaatatagtttgtacttaattaatgcataacgttttaattttttggttttcttttatagataataaaggagttttagtagaagaaacactatgtggattttctttgtgttttgatttttttcccatttgttttttcctttaattaatacaaattatgttttgttataaatattaataaatatatgaatgtttaaatcttttatttattattattaattgtaattaatttttttttcttagttttctaatctttgactctcagatatgtataaataggagattacccattagaataagatgctaagaaaattcttatctcttttctattttgtttctctaaattataatattttataatacattatcagcatgagtctttaaccaagatataatagtgtttgttatatcatgatcttaaaaggtttcaaaatcatgatacgctaaatatatatgcatattataagtttataacagtacaaacgaaaacaaaacctcctccaccgttcgaacgaaacccttacctccccatatccattttcttcgatttttaacctgaaagctagcgatttaagctctagtagtagcaggatagcgaatcattgaagaaggagagcctaagataaaaattagtttcgttttatgtcgaatacatttagttttatatagtggttttgtgaattagaatagttatgaaagttctgaccttataggattgttctcgggtagtcatgggactagtttcgatgtattcttactgaaattgaggtgattttggattagaaattaagttttgaactttctatagcttaagtttgaatattagtggcatccctatagattaagacgttacaactttgtatcagagcaaccatagttttaaaggtcctgaagctagttgaatatgtacattttcagtgaagaaaggtcgactcatggtataggaagtgtttatattatttgctattgaattacctgcctagactattagaaagtatgttgaaaaaagtagtatagtgacgattatgataagaatatgtgtatggtatatgtttattgatgttgatatctgtctgagttctaaatgcttagaagatgtagactaaatgtgtgataagttatgcaataagtgtaagggcaattgaatagtctgattagcgagccatctgggctgagagttggtggtggggaagagcatcctccaccccctcaagattggaaacaactgtttgctgccatgcaa

SEQ ID NO: 225683 - DNA, 1785 bp, Cannabis indica
ttataaattttaaattatgttatatatatatatatatatttttaatgaaattaacttaaatggtagttaaaatagatttgatggatccaatccaatataaaactactcaatgcacccaatgtttagaaccgatccaatctaatatatttattagatcggatcggatcggatgactgaaatttattggattgaattagatgacaaagttcaatatctaataaataattatattggatcgattggcttcaaatccattagttgtgattcaataaatacccctatacttaattatggaaccaaaatagacgtaaaaaaataatttgtatttaacttattataaataattattttgtcgtttctcaaaactctttaagaatattacttgaatttttttttttaacatttaattacaaaatattaaaattttgataaataaatttactgaactcaagttctgtttggtttattacattttcgtccaaaaaaaactcatttaaatgacacaataattttttttttaatgtccatgtaatgctaattataaaaatattatgaaaaaaaaataattaaaaattataaaaataataataaatattttttattttatttttttctttttcttcttcttctttcttccatgtccttctcgagggttcttccccgaccttctttcccgacggtcagctcaaccccaaccgtccagcccaagatgtccatccccgaccgtccagcccaagccgtccatccctgacagtccagccccacctgcccaaactcttctccgttcacaaaaccgaggtccgtgtcttctctggaaatgccgacagcagcccaaacaaggcggtggtcactcacaacctcttctcctcactcccttcaaaaaccacctcaaattaaactctatcaatttcctattctctttcacctcccaaataccctcctcttgctttttgtcattgatcacacccctgaacgtactgctcaaaattccctcctcctacttttcgaattgggccttgtggttttcaggtctgggtaatttgttttgtttcaaatgtttttattgagtttggaacagagattttgatttggagtgtctttatttgtactttttcgattatgtttaaggttattgattgtggttgtggtgatagtagtggtggatggtgtgatagtattgaagaagaagaatgaaaaatatttatttatgtatttattcaatatttttatttatttttaaatgatttttaattttttttttaataatattagtgaaaccataaaaatttattacaagtttttactgtatcatttaattcaaaattttaaaaggaaatataataagcaaaacggaacttgaattgagtaaattttataataaaaattctaatttttataattaagtattaaaattataaaattcaaataattttaccaccaatatattaatacgacgcgtaccatctatatatgcagctttctgttatctgttatatttaataaattatttaaatttgaaacttcttataattatgtttcacttttctttaattttttttaccaggtcatgtcgagaggacccgttacataaaatacaatttcatttggactaaatatgggaccaggtacgtatctacagactacggctcattaaagacacattgttgactagtctttggtccaaatctcatgatctcacccaatgcatatatctaatactttattttccacgctttggaaatttctcaccacacattattattatatatcatcatattataataa

SEQ ID NO: 225684 - DNA, 2356 bp, Cannabis indica
atctttgtattattttacaatagagttgtaatgtattttgatttatcttctattgtaataaaatctctaacaggtacttctattactattattcttctaagaggatttctaattgtagcattctttaaaaatgctatatatctccatattatttaaacatataatattttattttttttacattatttttagcacttttacttttaaaaacactctaatagtataacaccttctaagaatattataattataatcttacacagtattatatataatctttttctttataaaactattatatggatatattgtacctttaattttttatttttaaaacatatagcaacaatgtcattgtgtgacattaatgcaaatttcaataatagtattttttttttatctctaatgaaatagcatccctacattttaccacttaagttttccacttcatcaaacattttccaaaatactactattggagatgtgtaagaaagataaaataatattatattgtatctttggataatgtggagatatatgacacctttaaacaagaaaattttacattaaaaatataaaaagtaactttatttacaaaaatactttcacaaagctatttaaacttttatacctttaactattaataactttactttttaaatttttatatttacaaaaataccatctcctcttaccttactccttatacccaacagccacttccagtccctcctaccgttggaagtccgtctccaagcctcatcataacagatttcatctccaagcttcgacaccctcgtcatgaccccataaacagccttcaatatttttatattaaggtcggtaatttttttttctttcttatcatatttaaatttcatgaatagaagttttgaattgagtaattgttgctaatgtatttgtttgttatggattatgcaattttgccaacaaattttgtgatttttttttcttttatagttgagcttttgtgtatacataacaccagccatatgtttgataaaatgccttaaagaaagaaagcatctctaattttgatttttattcttctttaagttaaactttttcccttcatgatattattttggtattctttttgttgatgtgatttttatgattagtatgtttattacaaatttttaatgattttgttgatttatcattgtatattagtagctttgtagttttgttatcattttcttaatcactttattatttttgttatgcagtgattgtgatgtttttattactgtatttgttgaagtcataaatcaaggagaagagtttcctacaatgatattttttttgaaagagtcctacaaggatatttgaatttcacattagtgaattttaaaatgagtttatgttatttaatagatgaagcatttcattgatcttagttagattaatgagtactgatactgtttttttagttccatatcttatgtttaattggtatcacttgtagattttattgttatatttttggtgattatatctttaggtatgcattgtcttgttgctgtatagtagcaatgtagtttacttatcggtgatctgatgtggattaagtgtattatgtgaatgttatatttattcgtttaagtataatttcagaataattttattaccgtttctattttttatcatatttatttttgtttgtttatatgtccaagattgaggatactagtttcacatatgtgactatttcaagttcaagttctattctatttcacttacaatgttattgagaacattaaaaatactatttcaaaggatgtgatgataatatttcgtgccactcaattctgttattcaactcttggtccattgtcaatcattagtactgcaatcaggacttgtgtaactaatgactttgccattggaaaaaatgaggtgttgttagttgttgttgtgttgctgactatgttcacacataatggacaccttgtgacatcaggttctttgagtttcagttttatgtagaagaatatgctatcatcgttttttatcatcaatagttggtaactttctttcaattggtattttagttgtagttgcgtgttttattggttgtattccagtacatatttcaatttgtgtacaagttcttcatatttccaatcccttgagatgaatttgccactagctttatcattttacataattcattacttgatcaaattgttattgaactgtattagaaatggaattggttcgtttcttaaaattttgaaaattcaagtatggacagtcaactattagaaaactgtaaggcaactaaaatgcaacaggagttgataatatagggtacatcagtagatatttctat

SEQ ID NO: 225685 - DNA, 2504 bp, Cannabis indica
aaatattggatgaattattggctgcgaaagctataaatctcctaaagcttaaaaacacaaaagaagtcaataatactgacaaaatcaattattgtcagtaccatcaaaatagcactcattcaacaataaactgttgagccctcaaaagtatcattgaaaagattgtccaacacgaggatatccaaatagtctcaattttaaaagtcttcattttaaatgagaagaaaggttgttactcattgcaaccaaaaaaaatgcgtgaagcagaaaacgaaagcgcaaacaaatagagcaagcgaaagcgaatcctcgaaaaaaaaaaacaaaaacaaataagcaaaaaaatagaccaagcaaaaaacggatgctaaaaaaatagtgcaagcaaaaaaataatgctctaaagaaaatagagcgaacaaaaagcgaatgctaaaaaaaaaaagctaatagagcaaacaaagagtgaatgctaaaaaaatgagtgaaaagctaacactcaagaaaaaaataatagtattgcagaaagtgaaagcttaagaaaattgagcaatgcgcaaaaagttgattctcaagaaaaaaatgggcaaagaaaaaatgaaatcccaacgaaagaaaaggccaaagctcaaagaaaaagagagcagcaaaaagctcaaaggtcaaagcagaaagcgagaactaaaggaaaaaagccatggcacaaagcaagaagctaaaatgcgtttggaaaaacatctcaaagcataaagcttcagcatggtgtaaagaagaacaaaaactcaaagtgcttctctgaactacgaaaggcttgatctcgccaagggtacgtaggcaatctaaataatagatacaaccaccaaatcaaaatctcaaatttctctccccaagttcaaagacaaatatgcaaaatatttgtcctttcaaattaagattggtagaataagaactctacaaagagaggtaaaaagttcaaagttactcgagcatcacacgtgtccatataaattaccatgcgcatgctcgagggggcatctgttgaactatttttctcttaatttattatataaaaaatagtaataataaaaggaatcgttcagaaaaaaaagaaaaaaatatattattttttaattatatatccccacttttctcttcactaacccataactacctaccactcacctctccactctttgagaaaatatatcgtaaaaatgagtttataaagagaaagaagaaaatcagacaaaagagggggagaaaataaagaaaagaaaactctgtgaaaatttacagagaaatagtacaacatattctcatcttcaaagaagttctacagagtatgtattaaggttattccctatttcttttcatcattcaaatttttcttctcctgtaatttttcttattttgtctttcgtccactttgatctaggctctaagccacaaaagatcttcaaaagtgagatatagcaaaagagaaaataagataatttaatgtctccatgccgttatgctgcccaaatcttctaagatttttatatttctcttgattccctagacttcaaaaaataagtcaatatgggagtacataatccaaacggaagatagaaatcttaaacaaagaaaattattctactatcaaattttttttattagtaatataaattttgagaaatagtaactggtgtctggtgcgattcattcccaagagctaatataggaactaaacctcttggaaagtttgccgagataatatgcatatttgatacaaaataaaaaattatatatacaccatccacgtacgtcataaatttgatgattgtttttttgtacatatataagaccatatgataaaaattcatagtgaaagggtcaaaagtaaaatattcatctactataaatgtatttgtgaatatatgatcaaacatatattcatctacttagcatttttttcttattaagatggataagaaggaaaatccacgttcaataggattcaaccttcttagttagcataaccgtccaaaggataaaggcaaggagcaattgggtagttattaaatattatcccattctatataaatgaaacgagggaaatatctgcgtttcatgagcgatttaaatcaatccgaataaaaataactgttaatccatatacctataaataggggcacaatctacaggaaaaacgagggcaaaaagagagcgaaaattatattatttatgatactgaaaattgtactctatattcaagagaataccccttataacacagactcgtggagtatgtagattttaactacaaaaccacgtaaaatacctggtgtttattattattaaattatgtagtgtaattattgcaaaaaggctatatatttggttaatgaaaatctacattaataatagtcatctccagctccttgtaatactcatcaacactcttgtaaccttgacgaagaccttgcaacttgaggtacaagtctcgataatagtgagatggt

SEQ ID NO: 225686 - DNA, 1946 bp, Cannabis indica
gaacctccccaatcctcctatcaattgaagcaatggtttggttgattggggagctagtggagccatggattattttatttctctctttccaaatgcggtcaaagataatggccgcaccttccaggaagacattgaaatttaagcacgtcgatctcctagtgtcttccttgaacaacattagccaatcttcccagttggagatggagtattcatctgttttgagatgccagatgctcccaaaccagatcgcccttgcatgttgacaggaccagaacaggtgcagagattcttcctcagaagtgccacaaaaagggcagcttgaatcatttactctgaatatcaaactgagcttgcttcgtgtgaggagataattggcaagaattttccaccaaaacatcttcattcggttgtggatttttgccccccaaatcatacgccatttggagttcaagttatggcatcgtccatgtttcttaccaatctataggccgatttgatgctaaattttccattaggttctagagtccacatccaagaatcagctatcgggtgtagggagggtgatattaagtattctgctagcatcatcagaatggaaccagtgtttcacccggtcttcgtcccaatgattacggacgatgaagttacttacaaggcttatgttggccgaggcatcctggcaaggctggggttggagagtgccctttggtacccatggatgaaaccaaatagaagtagacttcccatctccaattttcctgcaaagtcctttggagagatgatctctaacttttaaaatgcctttccaaagcagggagtccgaggagttggagtcgatatccaagaagctttggttttttaagtatttggcttctacaacttggctccataggcttgagttgtctcccataattttccaagcccacttcatgagaaaagctttgttggtagcttctgtggagcgaaatcccagccctccacacaccttgggacgacaaagaacatcccaagcgatggactgcaaagttcttttttcaatcgagtctccccaccaaaagtctcgtagagctttgtctaccttattggcaatggtaattgggatcacgtctgaggaggcgacgtaattggaaattgctgatcccaccgatttgattaagcacatcttgcccgcgctggataggagcttcgctttccaaccttgaactcgttgaagaactttatcaactacatactggttatccttgatacggttggctgaagtgaagagagggaggcccaaataagaagcattgtttggaattttcttcatgcccaagaattgagagatagctcgtgatttgctccttgagacacctctagtgaatagaatggaagatttctgaaaattgatagactgcccagaccacttacagtacttggtcaagcattctacgataaccttagcttccttcattgtggcttggccaaatagcatgatgtcgtccgcgaacatgaggtgactaatggatagattgttcctacccagttggaatccttttagtcgccctctgtcttcttcaagggtaaggagccgcgacagtgcttcagctgccaatatgaaaagagctggggataggggatctccttgcctcaatccccgctctggtttgaatttgcctgcgatggagccattcagcagcaatcttatttccttaaccctgatacaagcctttacccagtcggtgaaaggagcagtgaatccaagtctcaataagaccaaaataatgaaatcccaatccatcttatcatacgccttttccatgtctagttttatcatcataaaacccttagaccctctttttttcttcatggaatggacgatttctctggccatcatagtattttccgagatacacctcccccttacgaacgctgcctgatttggggaaacaagcttctgcagtaac

SEQ ID NO: 225687 - DNA, 1961 bp, Cannabis indica
gtttagggagaatttttaacggccaaaaaaattcaagggtcataatgtagtacatgccaaaattcaggagaaaaaaattgaccttttaattttataaatagccctctgcctaaatgtatagtttggtttggtttgcctaattacgtatgtgtagctattttactatgtgtacaaactttgaaatttgtgaagctgtaaaagcacatatattattctcattataaatagttctcaatatggcatcaactttaatcagtctcagttgtctgatcatatcctaaaattagattcctttataatcaaaaatgaaggacgaacaagttcttcctatgaaaggtggtgtcggcaacggaagctatgcagaaaattcttcaatggaagtatgtgcactagtaattttatatatatatatatatatgtactaatattgttataataatatacatataatattattacagaatgtggttatttcaaaggtgagaggcatagtagaagaaggtgcattggaagtttatggtaatatattaccagattgtatgagaatagctgaattgggttgctctgtagggccaaactgtctggctatgccatcttatattttggaagcaataatgtcatcattaatatcctctgatcatgagcatatcaaaaagaagcttattgagccattgacatttcaagtgttccttaatgatcttcttgggaacgatttcaacaccatctttcaatcgctttccagcttttatgagaggtttgataataataacaataataaggaaataataataaagggagacaagtttgatcatccttgctcatgctttgtcatggctatgcctgggagcttctatggaaggctttttcctaataactttatccacttgtttcattcttcttacagtttacattggctctctaaggtatatatatatttatatactattcccaacaatatacaaaatcatatatatatttatagagatatatatatatttctatccagtattatagagatatatttctattttcaccatgtatcctaatcatatatataaccaaatttttttcataggatctataaatatatatatatagttatagttataagatttactaaaaaaatttaacaatagcaaaggaaaaggaaagagttcaaaataaaaatattgcaactaaatatttaaattttatttttggtactataaattattgggtcattctacaatacacccctttaaaagagaagtactgatgcacccttaacttgttaattttgacatccagaagaattttttagtctaattttttttcatattcatgtacgttatagctatttaagatattctacaaaattttgaaaaattcagaataatttacaatatagaaaacaatgttcaaacagtctattttacacgcgtataaaataaaatagtcacgcgtgcaacacactgtttgaacataattttcggtgtgttaaatttttctaaatttcttaaaattttgtaggatgtcttataagaaaaaatttcaataaaaaattatttcggatgctaaaacagatatgggtacatcaatatatccattttaaggggatgcattgtagaattttcttaaattatttatgatttttaaaaagaagaattattccatatactattttttaacttttttttaaaaaaaaattacgaattaggttgctccagtagtttctatgtggattgttatacaaattttaattgccatttagattgctccattagttactatatgaatttttgtatggaattctgtaaaaataacaaaaaaaaaaaaaaaaaaactgttttaaaatgtaaaataatgaaaaaactccttttaaaaattagtacaattatatcatcatatagaaaaaattgatgatttataaattttaaattttttcaaattccaaaaataaaataaaaaatgataaggtaaaa

SEQ ID NO: 225688 - DNA, 4949 bp, Cannabis indica
gatattataatcttaccgttgtatctttctaagtcaatatcacttgttgatgttagatcaaaagatcttaatcttgacatggttagacaaagaaaaacaaatgtatacaatgggccaaagaaaaagtaaacaaaagagctactagaaactctaaaaaatgtcttgcaaaactctcatagcaagggaaaattcaaacttcgaacccacatttcagtttgtgcctaaaataaaagtacctctttaaaaatcctaaaactagaaatatccacctatgaacctagcgcataaattccagacatcacaaatcctaatccctaaaaccacgttctacgcatgcaaaagtgatcgaattctcctagtataaaaactacatttcaatcaagtattgaaatcacagtttgaaagaggaggaatacttacttgtactgcgaggaaagagtcgggggtggtggtgatgcattgagattccacgggttgcacgacggtgatggtcctcctagctctgattgcaggacggcctgaggtaacagtaggtgtcaatgggatacagtgacaaggattgggagaaaggaggttgattttagggcaaagatgtatgaaaagattgaggttttctgagcaagaagtctgtgcaagaaaggaaagggttctccctggttcaaaaatggctgaagtgaagaaaatgacttcattcatcaaaagccccatttatatgggtggcaacggcttgaaggatttttaaatgcacgatcctgatcaaatggattgaaatttagatcatccaacggttggggatacggaaggttgatatttaatatatatgaaagaagagaataaagtatttattattcatcatttcacaatagcatccctaatgcacctgaggatagacgtattttcaaaactagccgtcaatcgtcctcccaagaaacacacctaaagtgaagagtgtcagtctcacgactctactaaacaagcattaaactttggttagtcctcagaaatgtctctaggaaggaccatcacggaatgcatccctttagtctcataatgactaaattagaagttaaagatacaaaatgaacctccgggaaagatcgcaagctcccagttattacaagtgcttgggggtaaatgttatccctcttcccggatgggttctacacagaagtagcaaaggggtgccacatcaaatcgtatggaaatatcctgagttccacttctttttaagatagtatcaagaaaggcatcagagtctctgggagagcgcatccactgtgaaggaggaatcgatccttgaagctatcacctaacgttttcggtatttgaaggcatacacgaagcccaagccttcagggagctcttgggaattggttattccaggaggtcctgggttgcgcttcctataagcccctatgacctaactaggacatacactcaacggttacaccttacctgacaccaagtcagatcttgtcccctttgttagaccatagctgtgcgtgtacgtgcctttgtagtgcttattgtccaacaacttgtctaggatatttcttttaaaggagaaacctttgaacaacatgtgtccatatcctcatgtgataacttgcgtcaattaagcaccgcacgatggaagagctacctaccgaatcaatggttagatggtcttgtagtattgcacaaccccatttgcatgctgagtaaggaaccctagtagggtaagagggtaagccctcatccacctatgggcctataaatacctcaattttttatgtgcaaaagtagagtatactctgctaaaattactattgtaaacacttgtaatactcaatcatttgccaaagaaggctaatactactgactcatggactaaggatcattaacggctgaaccacataaaaaatatgtttatctattattaaatattttgtatttccttaagctcttattaatcagtttccgaaaatctcggtaaacaaacataaattagaatattttcagaatatattttattttttgaaaaacattttttaaaatgttagaattttgaaatttaaagtttaaaaattaaattaaagttgaaaattaattcttaattaattttagatcaacttaaattcagtaattttcattattaattaattaaaatatatcataattagaaaaccaacacttagtttatgaaaaaaaattatagataattaatttctaagtaagctattttgtattttttttcttatatatttaattaaatagaaaattaatatttcagttgatttaatttaagatacttaaatattggctaatattttggtgacatttaattaaatggaaaattatatttatgatgaaaaattaatttattaattgattttagatcaacataaattagaataattttttcaagatttattttattttattttaatactaatttgaaaatgtgttttatttgaaatacattgaattttgaattatgattattgtatttatagaaatttaagttgaaaattaattcttaattaattttagactaccttgaattatgcaattttcataatactaagaaaataaatttttaatttattttcaaatcaacctgagtaaatattttaataatactacatacttcacttgatctggacataaagatgatgagattaattgcaatacacttttagttttatattaatgcaagtgggagtttgttgagattttatgccataaataaaaatatttcaatataatcaaatatactaattaataaaagatcagaaattattttatgttgcatggttcacttgattaatttcatgattatatgtttaatatataaattccattaaatcttgaacgtatagttattcataattatagtgttgtctacacagtgaaaaataatcatgattatatgcttcaaactacttagtcctacgatttatcagtgcactgaatttacactgacgtgataatcaacaatgttatttacttacacttttataagtggaatgttctttctagatgccttaggaatctcctcagtaaggggtacttcagcagacgataccttaggaatctcctcaggattcactagggccaaatgaatgtcactcccttcactagacactgaaaaaagcaaaaagaaaatccaagcagtcagtaccctacatccaaaagacaaatagggtacctagggaagcctcccccaaaactgcttggagaggttcccgccgtattcatcaccattaccatcactaccatacagtagcctgcacggtgatgaatcgggaacccaaacatataataatagtggaaaagatatcataaacttactatatgtcttttctaagtaaatgacacttagttgatctatggtcaattgatctcaatcttgggatggttatgttctagcataattgtattatatgggttctcttacttgtttgttacagctgaccaataggatcagactaatacttaatgttggaagttattgttatcccacattttttcctcctgacgtggcatgctaacatggaaaaaatcagtgctacgtggtagtacaactaaccaataagaaggccaagtcagcacttgagcaaacagagaccccgacacccaaacaggcatcaagtgacagatcatctccctcttaggagctggccgaccctatggtcggtcaaccttggtactgcaccatggttggccagcctgacctccacaggggcctagccggccattaggtgctctgtagggtttcctgtgcacttctacacatggacaacaatttatgggttgcaaattgggccctaaaagcccaacagaatggctaaataatatctagattcaagggcattttagtcttttgtaattatctaacaaactatgcaaatatctagggatctaaaactataatctggggttttaggcttcctatataaaggccttaaccttagcctaaagacctaagttgaatctaagcctgaaacttgcctccaactctaagtctaagtctaacaagttctctctccctcacttcctctctcacatgcctacactagaatcatctcagcacttgagttttgccattattgattcatagcttgtattcctaagggtgctatagcagatcccacctgtagtgatctggatagtattaaccctcagtattaatacaactaaaagaggagtaggttattactcgctatcattgtcagagacagctcaacaatggtacttcaaactcaccccaaggagattaagctcttgggctgagttctcacgagaattttacacataattctcgtcctcaagacttgtaccatcacagctagaagaccttgtcaaagtcaaatagcgacaagggaaacctttgaaagcttaaatccagaggtttatggctgaggttaccaaagtcaaaggccttatagaagaaggccagtatatggccataatagggggcatactcccattgagtgatttctagaaagatatttagagaatctccaccaacaacatgaaggagttccttgatagagcttgcggctttatcaaacttgaagaagccatacgacaagcccaaatagggcatgtcaacaataggcaggcacccagcaaccttatgacccaccaagcgcataggaagatgccagcaattctgtccagacttctagtggtaaaaacactagaaacaagcgcgacaccaacaactttggaaggtacaatggcaaaaaggggaagtttaacacttctcccatgccacagaagaataaggaggagaagtacacctgcttcaccctcctaacagagaagcctgaggccatctttatggccactcagggaacagtcccataccgaaagccctttcttatcagaagggagatgggcaagagggacatgtcaaagttctgcagatatcagatcgactttggccacgacaccaatgagtg

SEQ ID NO: 225689 - DNA, 1386 bp, Cannabis indica
aatcacgtaatacgcctatgttagttagggtgttacagtgtggtcagtagtttgttagattttgtataactgtatatagttatttataatgtattgctccattaatgaacagactccattttctccattctattttctttctctcactcaatctaacatgaatagcttctcctttttttttttcacttccacgatcgttttccttcttgtcaaattcgatttaacctcaaatctgaaggaggagttttttttttaagagagaaatgtgaaaaaatggcttagggaaaaaggaaatttgagattttaataggcacactattaaaggcgacaataggagctacaaagtcgcccctaatgccttgactgtgtcagtggcagggtggcagggcattagcggttaatagtttgaatgggaaaattctcgcctatttgcaactattggttttcaactttttagggagcgataaaagtcgccactaatactattttgtcgcttctaatagttttaggggcgacatatatcgcccataatatttgatagattaaaaaaaatcaaggcgactttatgtcgactcaaaattggtcgcccctaaaagtcatgttttgacggtcaaataggcatcagttttagagactagcgataatactatattagactgttaaaaatagtcaaaaaatactaggtttttttttttttttttggtagtgtattaacaagtattacaatttcttttgggatcgaagttgctaataaggataagcaaatgccatgcaatgaatattagcaaagtttcacattaattaagttgatatatagtggctatactatatttaatataaataaactcattgtgatatatactatgctttataacaatgaatgtctggcttagaaagtaaagaaatgacattaaataacttgtggaattgacaatagttgaaggacaatctaaatttgacttaagacatgtcactacaaaaaatagttacttttagtgactaaatgtgacttttaggtacaacaaaatattacttgtgactaaaatatagcatttagtttcaagttgtcactaatttaattttagtcacaagaagtattgtgacttataaaaatatatttagtcacaacaaattgtaatttttgtgattaatacctttagccacggaccttttagtcacaacataagaatgatgttttataattagttacaacttttatacttttagtcacaaattttgttagtgactaaaagtaagattttttgtagtgtgtccttctctgatctcacaaatcccactatcgcgtgtattatttttgttttattttagattttatttgatttaggtaattttgttgggtatgttgaagatgtaaaattatgttgg

SEQ ID NO: 225690 - DNA, 3385 bp, Cannabis indica
ggtcgactacacgactggtagcttagggtcccacagtctggggtcttgcatgaggtcaacgataggtttgataggaagtggtcttgatgttcttagggtttcaagatttagatggtggtaataatgacataagaaaaagaagaagaagttgggttgcgccaggggggggggggtttatatataatttttaaattatttttattatatttaaaattaaaattacatggacaactaaaatttttccccgtgttcttttgtgtacatgtaggcgacccaccgtggcagttaactaagagttttggacggaagtgtgaagagcaaaatagaatgtgagtttggtaggttttttcgttaaaaaattaatttttgtagttaagttttcaaaaacataaagttcgggtggtttttccccaatatccccacctatataaagccttgttgtaatttcaatacacaaaaaaattcattttagactaataaaaaaattccattgtcgttgtaatattcattcttttcactccgattaattaataaaaaaattataataaactaattctacatatatatagttgcattacaaaaagtaattaaaccatatatgtaaatggattatacttttttttaatgaataatgttagataataagaagaattttggagagaatacttaaatggaagaagttatattttacatctcaatttgtgtaatttttaacttggtacaaaatgatgggattacatctctatttataggactctatagactaatctagaaacatattttttttgcaatgactaatctagaaatattattaaatgacaattttctacatttttctgcataattcccactactaacaagtgaaagataattctagaaaattcaagagtactcacacaaacaagaaaattcttgacactttagtaaatataagaataatctaaaaactttagtaacattaaaaaattctagaaattaactatattaaatcaagtttaatatttcaacacccccctttgtactccaataatacttcgtagtttgatgaatgtttctctctagagtgggttcgtaaaaatgttcggtgcttgatcttgaaatttgatatattctactcttacttcttttctttcaatgcattctcttatataatgatagtaggtgtcgatgtgcttactcttttcgtgaaagactagattctttgctagtgcaattactgatttgctatcaacacaaatctcaattggttcctcttgtggcacattcaaatccttcagcaactttcttagccaaaaatcatgacaaacgcatgaggttgcaacaacgtattcaacttcataagttgatagtgtaacgattcgttgcttttttcacatcaaagtaaaatgttgtgttttccatgaagaacacaaatccaatagttctctttctatcgtccaaggctctactccaatcgctattactatatccaattatctcataattgttagaggatggataaaatagcccataattggtcgtacctttaatgtactaaagtgttctgtttgcagttttcaaatgagttattgttggagcttccataaagcggctaacgattccaacaacatagataatatttggccttatacagtttaggtagcaaaaacttccaacaaggcttttaaaaagggttggatccactttttctccttcgttatgatttgacaattttattccacattctagtggtgtgctaactggactagaatcatgcatcttgaacttcttaagtacttccttagcataaccttcttgagtgacaaaaatgctttcgtcttcttgcttcacctcaatgtcaaggtaataagacataagcccaatatctatcatcgtgaactcttttgtcatatctttctttaactcctcaaacatactttgagttacttccagttaagatcaaatcatccacatacaagtatacaatcaagatatattcattcttaattttgatatagagtgcatgctcatatggacaattagtaaaaaaaatttcttgaaagtacttgtcaattcaagtactccaagatcctacgcttgctttaggccatagaaagcactcttcaactttaaaacttttcattcatgcctttttacttcatagcccaatggttgcttgatgtagatgtcttcctcaaggaaaccattttggaaagcagactttacatccatttggtggatcttccatctatttttggctacttaaaaaattattattctaataatttcaagatgagctactggagaaaatacctcatcatagttgatgcttttcctatgactataaccttttgctacaaatcttactttatatctctctccctcgcctttagcattcttcttttccttctacacccactttactccaattttcttgcatccttgtcgaagattagctggctactatgtgtcatttttttgttgttgaattgatttcttcatctatcgcatctctccaattcttgcttcttactacttcttggtaacttcgaggtttacaatcaccaaatatacacaatagagaaatgtcattttgattctcagttacctcataatgttcttggaagcttctaaagcatagcatctttttatttgagttctcacttgaatcttcttgtatatttccaattggcaagattggtagagtagtagtttcttgaagttcttcttctatccttggttgcttcgctgcatcttcttcttcaatgtaaggaagaaaatcatacttgttttcttctctgttccaattccaacaatcttcttcatcaaactttgcgtcgtgactgatgataggtttgccggtaattgggttgcaaaacttgtagcctttggatcttgagtcatagccgatgaagatgtacttctcacttttgtcggcaagctttgttcttttctgatcagaaacatgaccactccatgcttcttgaggtatattctcatgtacacttcttgttggagagcgattcaccaagtagactgttgaagctatcgctttagcccaaaactcctttagcattcttttacttttgagcatgctgtgagccatggtgagtgtagatggattcttcctctctgcaactctattttttgggggatcttggcactattaatggacgaaaaattccatgatcttcacagtatttgttgaactcatttgatgtgaactctcctcgtcggtcaaatctcatggcttttataggaagacaattttttttttcaactagagctttgaatttcttcaaattctcaaacacttctaatttttccttaaataaataagcccatacttttcttaaaaatcatcaataaagaggagaagtatgtactcttaccaaatgagtttggt

SEQ ID NO: 225691 - DNA, 1756 bp, Cannabis indica
ggacccaggaccctgacccagacccggacccagactcggatctggacccaaacttggactagaacccaaacccgaactcggacccaggaccctaactcggacccaaactcagacccaaacccaaacttggacctagacctgacccgttgttggtgttggggtagagtttattaaaaatatattatctttacacaatctattaatacatgtctatatttaacatagtattgtatttaataatacaaatacaaaattaaaatggatataaaattataagttaatattaaaattcttaaaaaaaaagagtcaggtcggatcagatccgatccgaataagtcaggtcagatctgatctagcagggcgaggcggggcagatccttacatgatgagacttggaatcaatgaatcttggaagttgggtcatgaacacctctttttgaagtttccaattcaaaaaattattgttcacatcaagttgtcttactgaccatttgtagaacaaggcaattattaagaaaatcttgattgtaactggtttaattactggactaaaagtctaagtaaagtcaaaaccatattgcgaaagaatgaaatggtgtggatagtgtttgagatgttttttctgtttgggaaatgtatacaaatggaggaggttgtggagagataaaagaggcagctttaggtggtatagagtgaggcataggagatacagacacacgagggtaaggacactagagaccaggtacctttcttatgaagagcctcaataactgttttcatagcagtgtgccattcaatttgttgtaatgttgttgtaacatcgtgaggttcatttgtggcaagaaaagctcttggtttggagatgtcttctatagctcgagttatcattgagtgattatctaatggtactagaggtggtggtggtttaagggagggtgacaaaggactagtaggagacacgacggtattaacagaactattaaaattgttaaaacttgcactttattatttgaggaatttgattgataagaatgagatggtgtggattgtgtttgagatgttttttctatttgggaaatgtttacaaatggaggaggttgtggaaagacaaaagagacatctttaggtggtatagagtgaggcataggagatacaacagaagacacacgagggtgagtagagatttgagacatagcaacataggaaaagaaatgctcatgaaaaataactactggactaaaagtctaagtaaagtcaaaaccatattacgaaggaaatcttttagccacaagcgagctttgtgctttgcaactatcccatcaggattttctttcaccttaaagacccatctaagattgctttccttcttggaggtaaggacactagagaccaggtacctttcttatgaagagcctcaataactgtttccatagtagataagcccaaatctatgtattacatgtaaactccccattagaggaaaatggtaattaagtatgacctctaaaatactataaatacacattgaatcctttatgaaaagggtagaaaattcttgacttacttattcaagaagagaatagagtgctcatactcattgtaatcccctaagcttttctagccaatctcataatactgactcatagactaaggctcattaacgcccaactatgtaaaaactttgagtatcttcatcattgttctttcaattatattttatttagctctaatattaaataattagttttctaaaaat

SEQ ID NO: 225692 - DNA, 2804 bp, Cannabis indica
taattcaaattatataattatgtgaatgtatatatgaaagtggaatgattgaattgcccttaattaagttatatgagaaatattagccctaggggcaaaatgatcttttaaccaattatacaagaaatgaattaagccatttgttggctaagtgtaaaataaagaaaataattttttgggttttactctctcaaaacgacccctctctctctctcaaaatattcttgaatttttgttgtatcatgaggtgaaattaaagctttggtgttggattttgtgttggaacttaaggaagacacttgaagtaaaatttaatctattaatcttggttttaaactttgaaaagaaaaagaaaagagttgttaatatatgaaaatatttgagttctaagctgaaattgcatgcctttgatttggaaagattagtataatcttggattagttatttgtggtcaatcttggtaatagtttgggttcctttggtgctgtttaattcttgtttcatttgaaattcaagtcattttgtcactttgttatgagcatgaattctgaaatgaatgatttgagtttttaaagctttgaatgtttgaatttgaattagatttttaaagctttgattatgtgatttatgagagatttgagcttgattgattatgtgtgtttaggcatgtatattttgatgggaaattcacctattatgctttggtattggatgtgtgaatcagttatatgacttaagtgaagtttgggttgagtttgtgtattgttggagctttaaaattggatttttgggtttttcgaacccagttgccgcaactagacttatggtcaccgcgaccaaaccttagagggagcattcctgatttttccgaatgtgttttggtcataacttttgactctgaactcggatttgatgttctttatatctttgaaaagcttattttgggctctattttttggtctaataggagtcgtaaatgtaaatatttataaaatgtaatttgggattaaccctattatgtaaaaatacgagaattgtgactaggaataccagcacttggtcaagatcacccgcggattaggatttctcctcatacattagaaatcagattagacaataaattaagcacatagattatagtgtggtggcacgatttgtattatattattaattagataaaagtgtgaattagggttattaccctaagtttatatgatgagaattagggttactaccctaattaaatatattgtgagttagggttattactctaaatatatttattgtaaattagggttaccaccctaaatatatataaatatggtgaattaggattattaccctaaaaatatattctcttgagcatgcaataatgtattatgtgagtgaatgattaaaattatgtaagttagggttaataccctaaaacttcatacagtagagtatatgttgaatgtattacatgcatatatatgtcaagagttatgtgtataagacataactgggttagacctaataaactatcatcaggataaactattataagagcataatgtatggattatgtgtatatgagtagagttatgcaagtagggcataaccggattagattcggtaactataatcgagacaaatcccagtaaggccttaaatgtaaaagagacatgtgagtgtagcacgtaggtctatgctacatagacattaattatagtgacattatcatatggaataatgtaatttagtggagtatcacagtatatatgcagtagcgtactgtatgaagtgtaattattattattataatttttcatgtagtattattattttgtcttgatgggccttggcgcacgagtgctctaatgtccatgcaatagtaaagcggtgtcggttcagccataagttcgagagttttgaagatgagttctatatgttccagccaaggtagaccacgaggttttggtccaacgaagaattgtgtagaaattctaattttttcgcttaggtcggcctgtgagaaatgacttgtaatattttaaaattaaattttataggattctggatatgtaactttaaatattttgatttgaaataaagtttgtaatactgtaagatgtttatttaaattaagtttaatattggtcttaaatcacttggcttatgaaccccgattaatgagattagtttattgtaatcatgatacatgttgtttctctgagtaagacattacattaagaaacaaattgattgtcacagtgcaatatctatgattaaattggatcggttatttgagatactatcaaagaactattgattttaaaagtggtcacaaatattttcctgttacacttaatccatgaatcgttttgcaaataaaactattttgatatgtattaaaaattaatgtagtgcaagtgggagaatgttagattttatttgaaattacattaacattttgttatttttattaaaatttaatttgttagatagttctttgttgttaccacatatagttaatgaatttaatatttatgtgaaatttaaataaaacagaattgtgagttttttgtattaaacagaaacctttgcaataaaaattgtataactaaatttcttctctctctataaaaaattatataattttgatttatcaaataatcttagaaatctaatattactatagaggtaccttttcctaattattatcaactatcattgtgctttaaattacatacaaatttatatcctgacgatacatcattttctaagatatatagctataaagcttagtaaagtgccatttagtg

SEQ ID NO: 225693 - DNA, 966 bp, Cannabis indica
atcaaggagactttgagttggataaaggaaaaaaggttggaatgatgtggttattgaatcaaatgccttagttgcggttcaagcaatgaatagctccattcacatgccatctcaatttgggttaattggttgaggatcgtcaaatgcgccggcaaatgaaagtgcgaatttaggctagctttgctttatgccggcaacatttatcggcgcattttacgaaatgtgccggtaaaaaggttttttcttgtagtgtcatgaaggtcctggttatgtttcatagaatcatctttgcaggttaaagaaaggaggaggttgggcttttagaaattgattcaatggaaccagacggatttgggaaagtatgtttaggctgtggctacaaaataaaatattttgtgggataaatgggtgaataatgtttattcgaacggagataattggtggaactatgaggctactgctcaaggaagttggtattagcgtcaaattgtgaatatgaagaataaaattaaattttatatgactgagtatcagctactacaatgtaaatacacaattagatttggctatgaagtgttgagtacaagagatgggtgcactctcaatgggtaatattagaaaaatttgagtttttataattaatttttcttaattaaataaaaaaaattactcatttttacattatatagctgagattggttcatcagctaaagaaaataataaaaaaaaagtttttctacaaaaaaagtgataaaaaaaagttgattttgacttttagatatattttttgatattttgtttaattaagtaactaaattaagcatagaaatttaaatttctcttttataattcgttatcggaaaaaaatttaatggtttaatatttttaaaattattatttatagttaaatttatttagtaaccattaataagtaatatccatcaaaaaatattctatatatataaa

SEQ ID NO: 225694 - DNA, 2160 bp, Cannabis indica
ttgtcgaggcatagaataagaactcctcagctaaagaagtagtagctaacttgaaattcagatttattgatgaaagacgccatacttccttggccctggtgcacagaaagagtgcatgaggtatggtttcctgctgctgtttacacaaagggcagtaaggagtatttgcaatgtgtttcctgtgtaattctgcagctactgggattgcattatgaaaaaccttccaaacaaaaatgcgaagcttagaggacaactttagtttccagaatttagaccaccagttctcataaacataggtactgcctgcatcttgatgttcagcgagtgaagtagcaaagtaataaccagatttaaccatatagttacccgaagtggtaccatgccaaatgagtgcatcctctgatggaaaaatgctgagaggaattgaaagaattcgatcaatgtctgcatgtccaaagttagatgaaactgctgtcaaatcccattgtcgatgttggtctatgagatcagcaacttgaagagagctatcagtgcctataaagctgaaaggtgtgaaatcagtgtgtccaggtaaccagggatctgtcttgcaagtgatccgagtaccagagccaactctccatcgtaaacctttgacaagaagttccttgccccatacaatgcttctccaagtgagagaaggacaagttcccacaccagcagtaagaacattcccattcaaaaaatatctgtgatgcaatatacgactgagtagagagtttggtgattccaaaagacgccatgcttattttgccaaaagagcttgattaaaatctataaaattccggaatcctaatccaccatgaactttagccttacatagagaattccaatttttccaatgaatggcattaccagatgacgttgatccccaccagaaatttgccatcatactctcaatttgatgacacagtgtaacaggcaaacggaagcagctcatagcatatgtagggattgcttgtaccacagctttcaaaagaacttcttttcccccaacagaaaatagttgttctttccaactacttaacaatttccaaattttatcagtaatgccactaaagagttttgtcttatctcggccagaaaaggatggaagaccaagatagaataggcatattgagaagttgttggaagaaaacctgattatggtgtcttgtattgggagaaaaaaataggacacatttatccggattgattgcttgaccactagcacgatggtagatgtctaacacttgttgaattgacctggctgattgttgattggctctgcagaagagtacactatcatcagcaaaaaacaagtgtgacactgatggggcagttcgtgacaccttcaacccatgtaaggacccatcattctcttttgattgtagcaaccttgagagaccctcagcacaaataagaaaaagatatggcgagagaggatctccttgccttatacctcgggtaggaagcacatccccaagaacttttccattcagcagaaaagaatatgagaccgagcgtaagcagcgaagaatgagatcaactatgactgttccaaaacccattttcatcataatttgagcaatataagaccattccactcgatcaaaggctttggacatgtccaatttaattgcagcatatccttgcgagcctcgttttcgagtctttaaagagtgcaacaactcaaaagcaatgagtatattatcagtaatcaaccgtttggacaggaaagcactttggtactcagagatcactaatggcaagaaaggttgaagcctgagcacgatcgacttagaaaccagtttataaaggacggtgcacaagctaatgggccgatgctgagtgatgaattgaggcttcttaacttcgggaattagtgtgataatagttctattcagaagagcaggatctgtaccattgttaagaacatctaataccgattctgtaacaagtggccccacaatatgcagtagttagtgaagaacatgactgacataccatccaagccagggctcttatcatcactcattgagttgagggcattgagaacatcatctgctgagtaggggcttatatgatttctctgaaattaacatcaagtacagtagggacaacttgttgggttttatgccc

SEQ ID NO: 225695 - DNA, 1610 bp, Cannabis indica
accctgaaactcagggtcgcctatagccatgaatattttataatggaacgcccaagggttggggaaccctttgacggtgcgttccttaacttccctagtgaatcaatacaatcctaaaatggtcttcatttctgaatcgaagattggtaatgttcgtgcataatcattgagagtcaagttggggtttgttggttgctttacggttgaagctcgtgggaaaagtgggggtctcattttactatggtccatggatgtagaaacccatgtgcagtccttttctcctttccatatcgattctttcgttagaattgaggatggtcaatggtggcggtttactggcttctatggcaacccggatcctagtcaacgatttcactcttggaagcttttgaaaagaattagtcgaatgtactccggaccatgggctgtaggaggggattttaatgaaattgtgagccaaagagagaaaaagggaggcctccctaaaccgagttacctcattaacaatttcaggaaggctttggatagttgtcatttgcgagatgtggggtatgagggaagtgattatacatggtgcaatggtagaaaaaatgatcttatctttgaaaggctcgatcgggtttgtggtaattcaaattggtttgacatgttcccttcaacgaaagttcgtcatttggatcgtacaaactcggatcattgccctcttctccttatgggctatgaccccaacttaaagatgcataatacgactagatggcgaactaaattccactttgagagtgcttgggctgaagatgaagagtgttcaaacattgtgcactcggtttggcatcaggacaagcagatttcgaacactagggagttaaagactcggctgagtaattgtggggtggcccttcaacaatggaataagacaaagaaacgagagatgacaaggcacttaaaggaatatgaagataaaatttttttactgtctcgaagtactaatgcaatggattggcaacaaatgcaggaattggaaaggaaacaaaatgtttggcttgacaaagaggagagattttggaagcaacggagtagagcgttatttatggctgaaagaaggggacaagaacacaaagtttttccataggaaggcgagtaataggaaagcaaagaataccatccaaggattgatagatgatcggcttcagtgggtcacggggaatcgaaacataggtagggtggcgtgtgactatttcaagcagttagaagatttccaaagaattattccaaactgtatctcccgagctacaaacgactacttgttggagcctttcaccatggaagaggttttcaaggcaatgcgagacattcatccccaaaaagctccaggcagtgacgggttgcctggcctcttttacaggaagtattggtcaacgattggagctgaagtgtcaaaagtgtgcttaggaattctcaatgaagggatgcaagtaaaggacattaatgacacactcatttgcctcattcctaagatctcaatgccaacccgaatatcagaatttcgaccaataagcctatgcaatgtgatctataaaatagtggcaaatgccttgctggccgaatgaaga

SEQ ID NO: 225696 - DNA, 2890 bp, Cannabis indica
agtaattctccttggggtagtttagtaaactattgttgtaccgtgttcgtgaggattttcgggaagattcgacacctgaggtcattcctgatcccttaaaggtccatttggattttgaatttctcaacatgtgttagggggtcttcactacccgtgtacttgccagtgggcattttgaatttctctagaatggagaggtcattgattgtttgggagaaggcagaccctctcctcctttccaactctaagttagtggttttggtacagtaaggtccttcaccaatcgggtccactcgtccaactaagcctagatcactggatatgtggctgcttgaggttgagcaacattgacaccagcattcacttagtctctttgaatcggctcaggtgggttcattatgttggaaccacggttgtccctatttctgttaagggcatctcgaaggtctctagccccttgggggcctactcgttcaaaaacttacccggctcttggccttcctcctacattttgactgtcagcccttccatcaactgggggtggtacttggtcattcctacccctctggggcagattctcaggttgatgttgcctactaggggcatacagccctccggcttgatgacccccagctcaggatttggttggttgttggcccgactttcagcttcatcatcatcgtgattgttggtgtagttcggacgataatcattgttgacttcggggtcttcttttctcccctagacctatttttcttgggtaatcatcgtcgtctcgtggttggccgcgttggtcgcggggtttccactccctggcggttggggggggggggtccttccaccgttgctaccacagtcaccattattgttcctggagtttcctcgaccattccgcctgatacgaacattatgggagtcatcacgccccatataatgaccaggtaagacttgctcatcgacaaggagtggttgattattgttgcagggaaccctgttggaggggtgactcctagccctcccttggttccttgggagctcttcaggtccatagaccaccctttcccgttggttcctcagggtagggacttcctgaggataggtttgaggtatctggttattgtgggtgttagtacccaacccttgagtgttttggttgaagtagctttgtatcaagccgacaacctcttgagtgcgacggtcttggtgccttcttatctcacaagcatgatcttcaagctaagactggaactttctcctttggttggagagactttcggtcaaggttgctcgagcttaagtttgctcttggtgcacaatctggaactggccttgcattcgacctatcgcatctcgagctgatccatctcaaggtcaattcctttgatatccatatggggttcgctccgcggcctaaagacgccagggcctcggccagtttgtgcttggcccgtgccatccgtaggtgggacaaaatttccagtactaccccttgtggtggcaccatcagtagtgtcgcctcctgcgacgacagcattggtggtacacccaatagttgtctacccagtggcaatagtttgtccagttgctccatggccagcagtttgagcggtggtggatgcgccgctgatggaacttgctaggcactatccatctcttcgtcaggtcgctcttgagatcttcgggttaacaccattttttccagtaaaaaacttcaagattttggccaaagctctcaataaaagtaccaaaatattgattggatttttaggcaaccgacgcggagtcgtaataaatgagacttaaactaaaatcatagtaataaatgcagttaatagcaccagaacttgtaataaatttaaataaaagacaccagagttcaaagaggttcgaccccagaggtcggtaatagcctactccccttgtgttttattgatctaagttaaaaagtcaagaacagactcttgattggaaaaagaatgataaagtgtttagttttttaagtgttcagaattgtggatccctcttcaggtcatggatgaccccttatataggggagggggtcggtgcttctcgcttcaggagacgcgaccaatgcggagccacttcaaccgtccccttgaatttcggatgtagttaaagtctgatttttatgataatataccgttattttcgtgggttgacaactgtctttgagcgtttcatgggattcgaacatttgaacgagttactgacgatgatggtctcttatgggtgggacatggtcgtcaatcaccttcagggataaagcctatacttgaggggagtgacaaccgtcatcgttgggtgacctcccgggacccaacttgagagggtgacaaccgccattgttgggtgaccccccgagatccaacttgaggggggtgacaaccgtcaccgttgggtgatcccccatccgttgtcagcagttatggtgtaatgtggatgtccctatatacctttgagaatgccattatatctatgaataaatgcatgacttgtgccatgaaggtgtaaggggtaggggtatacccctagagtagcccctcatggttggcggtcatcctaacgatcatgactttacatattctttattaatttatttctgacatttttgtatcacgtgttgctactcttgacatgtcgtcgttgtaaaaatttgagtaaacaattagttaactttttatttatttttcccacttaattagattctataagaagacatgtgtattttattatttcttcaaacttcatttttttaaaaatattatttttcctactttaaagtaaatatgttatgccaacttttgttgaattttaaataatataatttttaatttaaagcaaatatattgagttgtttagtaagtgaatt

SEQ ID NO: 225697 - DNA, 1435 bp, Cannabis indica
ataaaggtgatttagacaaggcaccaaatattcaaattaggtgatcttatatattactttacaaccacacatcaaacggttacaatttcattttcatttagatttcaagcttaagttttcttctcaatttcaaaaaattaaaacaaaaaagctctaagttttctacctctaaatttgtttgacttatataaatactatttaatttcaaactaattaattttgtctatttaaatattgtcccatatcaaaattgtggtagagaaaaaagcaatgattcattcaattatttcaaactattaaatttataactatatatatatatcagggtcacggttaggtaaatagggccaaaataacgtaaaattatgtatgagacctcttaatatacattgtaattatataatatataaatacttatacagacttatgtcactatactaatataatattttgatttgtgaaaggataacgatatatatatttattattatttttttttaattttggggccctgtaagatgtgagttctatgcacgaatctattctgcctatcctaaaattgactctaatatttatatatattggtcataaattcccttttattcatgtgaatattattatttgttcacttaatttaaaaataaagaagggagttggaccatacaagactttattatataatagtgttttaaataacattgtagaactctcataaatacaatgttataaaaaaaaaataaacaaaatagtaatgtatgaaaaccatctttaccaaagttttcaaacccattttagcaaaacacctaatcaacatgaacacaaaatctcaaaatgtaattaaaaggaaaatcaaaactttacctttcttttaacagaaaataatgtaatttagagatatgtgtaggagttcttactaagattttataagtctatagggtagtctttttttttttttttatcaatacgatatgaatgttgttgagaatcataaggttccatctcaaaaccaattgacaatgagtggagtaacccatattatatatacaaaaatgtatccgtaaacagtttatagtgacaattaattgaataatatcttaaattttctactaattcagtaatttgcaggattttttgttaaaattcaaatttaaaaaattacataaaaataaaaggacaattaaaaggatttttagtggccaaaaactctaaaataaataaaagaaaaaaagtaagaactaaacaaataaatgacaaaaaacagtagttaagaaagaaagacagcaaaaggtggggacccacaaagccaaacaagacagctgtttggcaacaaatgtcctatgtccactctctcctcacaaaaatctcatctcaaaattacatgttatatacaacacatatatacacctatatatatatatagctacatacaacccac

SEQ ID NO: 225698 - DNA, 2281 bp, Cannabis indica
cttttgttgctttatacttgtaactatatattttttttatgaagtattaaacttaactaaatgataatatatagattttatgtatttttcttatttttctaagttaaccaattcaattggatcggtattatggtgttttttattttaaattgaattcttattaacaagaatcaaagtttaatacaacaataggaaatgacagaaaaaaattcaatccaagcttgtttaccatccacattaaatggatacacaactaattcataagtaaagacatgaactaggaatacctcagaaaaattgaaaagtaatattataaaaacatctaattcattaccaaaagtgaaaagctttaaagaagctaagatcaaggctaaataatcacactctataaaatgaataagaagccccaacatgagagagcaatttagtagtagcactcccatccaaacatctgcatgttcttgattgactggaaaattccctacaataataacaaaatacaaagaatgagttcaagaaattaaccaatcatataataaaagaaaaaaaaaaccttatctcatgtaaatgactccaaaagtgatgtaaaaatcttccataaatagtcatccaataaaattaacaaaataaaacaaaaagtatcataccataccacatagtataacataacatatacaccttaagggttaagagtttgggataaagagttattgcttaaggagtagatgaagagtaggaactggtaataatatcatctgcaaatctaacccttggatctcagggcacacttgctttaaaccttttttatttaaaggttctatatcaagtttggtagttgctaatttaataaaccatagtaggcaattggatttggtggtcttacaatcaaatttttgtcaaattgatgttgacagaatttttagcatcccacagaatatttctctatcagaagatacaatgatatgacacaattcgttcacaggatgctacattgtaaaattgggctatcactttgcagtaagtcttgctgaacaggaggatacatgtagctctacctcaacagaacattggtggataactttttgaaagttgaatcttccatcaaagattcgtatttttgtatggaaaatttttcacatggcactaccaattgatgttgagctacatcgaagacatattgctgctgactctctatgtcatctctgcaaatctcatactaaataattaatcatgtattatttttctgcaaaagagcaaaggaagtgtggcgtctcttgaacttacaaattgattttaaacttgtttgaccacttgtgaagatttccttctacatctgatctcagcaagcctttcaactacacattttaatcaatttattgtcctttaatggtgcatttggtatgaaagaaatattgaattccatggaaaaatgcaaaaaaagctgatgtagttttactatttgcgacatcatatctgcatgaatatcaagctgcttgtgctactactcaaaggcctgagacacatccaccaataacaacgcttcaagtgctccttctcgtcctacttcaaagcccaaatagttagctccaccttccaaaagactcaaacttaacacagatgttgctattgacaaatctaaaagtgttgttggtgttggtggactcttaagagaatcttctaattctattgttgcaactttatctaagcctcttcaggactgttttaaatttgaagaaatagaagcagtagccttgtctttaagtctgcaatggctcctatcactcaatttgttagcagattatattgaaactaattcactcctggtgatttaaggattgcaatcttttcatgtggcctattttccacgagcacaaatcactcgtgtttttatatttgttaatacttatgcccaatttggctaaatttgctcttacggtagatattgattgttattggttggagtaatttctatctccacttatcactatatatgtaattttatctaaattaatataattgtctttctctaaaacaaaaaaaaaaataacctatatactgttgcccctgattttgcccaatatatgtggaccaaccagacaaggacgcgtggatcaaacaacttagcattcaaactatttgctaagtctttatgtaataaggcagcatccgggacatgcctcccggagaaggcatagggagccccatatgctcccagaagcccaagtaacactaaggcatctccgcgaggtgtcaggcttcccctgagcaatcaagtcgcatt

SEQ ID NO: 225699 - DNA, 1348 bp, Cannabis indica
actattttagtctacaattataaaattaaaaaaattacaatttaattttattaaaagataatattttattagttggggactataaccccatataagcactactgggtacgtccctcatatcaataaaaagattcgtctcttggtctcatgatcatcttatgtatagttaatattcgtatattaaaattttctaattacgtatacttataacccaaaaaaaaatattaaaccagaaaataaaagtaatactaggaaatatatcttttggaccaaattaaaactgtgtatcaaattgagttaattgttcttaattagaaaaaattaataaaaatatattgcagtactaaaatggcatatcaatagttaccaacaatatttgctaatgatagctatggaaaaaaaatagttctctcaaccactaattaggatatttaaaggatatagaagaaactctaaacatatacttccttttatatgtatttattttaatcgattaataatgtatatcatgacgaaggtaccacttactaacagttaattataaattaattaatgtactcataataatatgcaaaagagcgaaaatgaacaacatataataagttatctaaatggcaaataataaagtatagtcataaaaccaaagaaaataatataaaagtggaataaagttatttattatattgtataactaggctatctctaatccacgattccatagtctatggaaagtgacaatttttcaagtttttgaaaggagttggtgataatatattttaattttttggaggtttagaaagttgctgaaaattattttaattctcttaattaatagtttatttataaagttgtagtagtcggtagaaatttcggctaaattgcaattatgagtacattaaagtgtccccacaccaaatgaactataaaccctagctaattcatacattaacattgaaaatgacatgaattagtcttataatttataaatgtttgttctttcgacaaggacctgtcgatagctcgctacaaacattttataaatataattattatcaatgagaatatagtgtaaaataagaatacatattaaataaattatatcatcttaataatgttgtgaccaaaatttaatattggaatgaaaaatgttgatatatgcatatgtgactgctggcattcgagcccagctcttcacggtcacaacggcaagttctcaaggataaattgaaaagtacattttttttatatctattaatcaaaaatacatttatgggcgtttgccgtttggcatgaggtgttcaaaataatttgatatagaaaatattacgaatgagaatatgattatagg

SEQ ID NO: 225700 - DNA, 2377 bp, Cannabis indica
taaccattagatatcaaaaaaaaatcaatctattcaatccaacgactatagtgctattgcagtttcacatccctcaaaatgaagtgagggacttcataattggccaattatcaatatcaactacgtaaacatatatatatatataaatataaataatgctttatctacaaaggtaaagaaaacaatatttgagcttaaatcgaaagtatttaaaacaaactatatattgtagaaaattatataatataatataatattttcttccataaacttttaacatataattgatcactatgctttttaaaatatatagtttgttaaaaaaaatttctaaaatataacagttgcatgtccatgcaagttctcatttttttaccgttaaaaattaacagttttacttcctaaaatttgagtcctatgttgtcgaaattagaatatataaaatttatgaactatttaactcattgccaattaattttttttttttaagatgaaaatagccactctcatgctaaattctaacaagtcttatatattgttgctttaattattttggaagaatttactatatatatggagaattatttattttttttatatatttattactgtttgctaatatatatatatattgaaagataatatatatctatttctatttttatattactatagtgctagtgctactatatatggcatgaagatcctgaattggaatattgatatttacatatatatatctcccctttttggggcagtagagtatgtagtactaaaaaaataatatgaagacatttgataaagttgtgtatgaatattgaaacttgaaatgcaatgacatttcccttttggcttcccatgatctaatgtctcttcttatatatccatattcctttaattcccacacacatatatactttcaaaattcaaaactactttatttattagtttttaacacattatattataaaaataatacataatgtttttaactttttattgggccccgtacgtatagaaataataatatctactattatatattatttaattaatctttttctgagtagatttaattaatctttttacttactgcttaattaaacccctctcaaaaaagaaaaagtccataaaaaattaataataatattataataataagatatagacatgtgcagaaattacaagcatatatagttatagaaacctaaccataagatgctgtcttaattatgatacgttttaagttcaacaatatacacatatcaatctttttacaatatataaacacacccattatatatattaagtctctttcattatttttggttttatactaaaaataacataacaatactatatatatacatacatataatgtaatcatatcaacttaattaataattaatagtataataagatgcttaagcacatgggactatatatatgaaagcatatattcatgtggcgactaagtaaaaggccagttttatcattgtgtacccttatttggtcaaacatataccatttttttaacattaacattaattaattaattaattaattaattaataatgttacgagtttgaaactgatcactatattagtttggaaagaagataaagcatatagtatgattaatgcatataaatggaaatcgagagagactagatattttgattattaatattaattaattatatttgatattattaattaggtatatgttttatgcactaaaacagggagctgttataagaacaggtgactgaaataaatattaaagttcctttagatatattgttgtaaacatttcttgattgccatctataattaattgatcttaattatagccagtttaattatttgaggttcttcaacactttattaacgaataaagtttattttttaattatccataattcggtgatatatatatataaatatatatatagtgtctactttgatttatgttgtagaattttgacacatgatatcaaataattgtagttcatcataaacatatatattcaaattataaatactgaaattatatccgtatcaggtttcaattgtatatatttgattaattattattaattcatctcaaaataattaaaccaaaaattaagagtgtaagtttttgatcaatttttgtttatttgctttgtattacttaataaaattaaatttgtttttcattgatttagaacttcattactgttaaagaccccataaatatatcatcgtgataataattataaatttttatagaggcgtcacaatatttgtcttgtcgcctataataatgtacaattaaaaaaaatgttaataattgaaacaccaatgtagcgtttataaatattatattattatt

SEQ ID NO: 225701 - DNA, 2085 bp, Cannabis indica
tacattgtaatcattatacaatgaaatcctcattacattagaaaaacttatgtaatgtggattacatcacaaaagacttaataaagtaaaaccaaaatgactctaatatcctttttatataaatataaaaattaaagtatgggttaattttatcaatttatcttttattctaatattcattccaataacaaaccaaacatcttaatcaattcccattatcattcttattccattacattactatagtcttttactattatcattacattctaccaaaccaaattattatttttttttattttaaatatgatgtactaaaatttattatttttctgtgtaattactaactatttttctaaataagtgattaggaatttataagtaattatcagctcatatccaaatacacatttatattttaaaatacagtataattactaccataataattacacaacctaaaaaatagagagttaattctttctagatttgaactgaattgatcagtactataaagtaattttctctagttcgtcaaaataaaaataattcatatttattgttttgtctataagtggagctgttgagtttccgtctatgcaacagactttggcagacctatggaaaccaggtatgggagtttatattaaggaacttgatagtggtgttcgatatttctatcataaaatcgatattttattagggtatcagaaggtaacccaaggatcttcaatcgtaaagcgctgattattacaaaactcaaagcgggcgacaactcgagaacaatccctttaaactctcttaacttgtgggtccaagttcacaatctacagatgggttacatgactgaacgaatactgaaaaatgtggggaactacattggtaaaatttgttaaactgatcctaagaactttatggtttgtggtgtgattatatgcaaatttgcgtgtccatagtgaacgaaaatcaaggagcgtttatccaagggtgatcaattgctcacaacattatgattcttctagatcttttgaagaactacaacaggaagaatatgtcccaaaggtgcattatcaaagttgacattagtaaagcttatgatacggtgaattgagatattttagaggctttgctcaatgcctttaggatgctggccagatttataaattggggtataacatgtttgagcggaacttcatactctattctgatgaatggtagagtgcaagacaacttccatggaaaaaaaggtctaagggaagggtatcccctctctcccctcctctttgtcttgattatggagtattcaacaaggagactatccatggcagccaatcaatccagcttcaggtatcaccccttatgcaaaagtctcaaaatagtcaatctctgttttgctgatgatctaattttatttagtaaggtcaatattcagtccattcaaattctcaaggatgtcatgaatgagttctatgctacatcgggtctggctatcaacaccaacaaatctcaaatttatttgggaggggttgataacaaggctaaacatgccatcctgagagaaataaacctcactgaaggcaagttccgcctgaaatatttgggagtccccttgagaccaaccaaatggagagtggaagactgtgatgtgatcttaaagaaaattaagccaagactccataattgggctagcagacatctttcctttataggaagatcgcaacttatccattcagtgttacttggactccataaccactggatgagcatattcattctccctcaaagtataacaaaaaagattgaaaaactttgtcgaggcttccttttgggttggaatggaaataggagtaagcttcatgtggctagttgggaaaaagtttgtcttccgaagaactatggtgggttgtggttcaaagatggagtcaaatggaatcaagtcatccttgcaaaatatctttgggctatttaaaaaaaaagtgatttctctttgggtgaaatggatcaataacatatatctgaagaacaattcaatatggacctatgttctaaagctttactcgatttggtattggcggaagctttgtc

SEQ ID NO: 225702 - DNA, 1285 bp, Cannabis indica
actcattgtcgttggctagaagtgaggtcaacacaaactatcactagatctataatggaatctaagtttgttgttctagataaatatagtgaagaggaagaatggctgcataatttcctaaaggatatttcagattgtcctgaacctatgcaagcaatatgtatatattgtgataatcaagcaacgattggtagagcaaagaatgttctatataatggtaagtcaagacacatacatcaacgacataatagtgttagacaactgatctcagctagagttatctcaattgacaatgtgaagtaaaaagataatattccagatttgctaaccaaagagttaaatagagatcaagttgaaaaggtattagaaggaatgagtcttaagcccagaaaaaattaggatatatataaaggaaaatgaaacctagttgactgaagatcccaagatttaagttcaatgcgacaagctagttatataaacctggtaagatcactatggggggctgaccctacctattttgttgatgaaaacaatgattctgattgtggaaaaggataagcattaagtatttaatgacccttgtgttggaagtccaaacggagcaatatcggattgttcttaattaagaggtcacctatttgagagagaagtgggactgctttgaaggagaattatgggggctagattttctaaaacctctcaaagaaccaggcaaatattcatggccaaaacgaacataatcatgagaactgaaatgatgccaagaagatatctatgtgagatatatcatcatttaacagtagacagttcaaggacatcgtgtccactggttaggcagtaaagtaaatatattttcacaagggaaggttcaaaggttagcaccccacctatcctatgcaggtatctaccatagaactctatcactgtgttaagtcgagtagagtcctgtccattccttgtaagtcttttttctctgcgtattccttatcgttgatcaatttcattcatgtggggggttgtttgaaattttttacttaatatataataaataaccaattcaggctaatatgtgaatgagaaattgatgccttagttgtggtccattgatagctgctaatgaatacaaatttggtcaaggatgtaatcaccgtaataatggtgaatatatttattgatatcaaaaattatggtgaagatttttactgagcaatatcactaatttaatgagattttcgacattaatttgcttgtgttcacacatggtattcctgttggaaattatttt

SEQ ID NO: 225703 - DNA, 2388 bp, Cannabis indica
taagagccattcattccgtgggtgtaaggacccaatagaggcttaaagcggggacgttacagtctgtgaaacgcaataaatctatctaaatagagtagagagagattgataacccaattacctacaataatcaatttcctttttttttgtagatccaaagatcatgtgggattgaagctcgaagaatcaataattgtaggtgtttcaatcttttagttatatcatttatatgtttgatttaattttatatttttatacacgattatttatgcttcatgttttacatataaatttctaacaataaatagttgggatttgccattttcttttaaaaaaattatctagtattacccacggttttctaccacagttggtaatacctatcccacctttagtgctaaaccgatggataaaactttcgcttacctattccaataattttcatagttgactctcttattaactgttgagaatagctcatttataatagtgatttttattatcattaagtagtgtgttaattgatttttatatatttatcttataagtgtgtctcaacttcaattaattattacttgattatttgagaatctaatgatttttatgagataagttttaataataactaatttttcaaaattattttatcatgtgtaaaactttcatatctttcttaaagtttgttactatttttttttatttatatatgtaggattttattactgtttatccctacacagcagagagaaatcaattcaaaagcaatggtcaaatctgacctttattaccccagtcaaaactttgtttgactttgtgatttaaacacccaagaaaaagaaacgacaacctctctaacaaaagctacaagtcgtttcaatttaaagcagaaaaccctaaacctctattacatatatatatgttatttcccaaacacataaccagcaacccactcaaaccctagccgttctcctttgttcttctctgaagaacacagcagtaacaactgcaacttaatacctcactgcccagaaaacaaccccagctagagaataaacccaacccgattgcaccctagtttgaatctatccccagaaaattaacccctttcaaccgagcctctttcttcgttgttcttctttgaagaacacgaagaacacagcaatcaaacccagaaaaattcttcccaacccgattcaatacccagaaaaatgtataaacaatatatagagaatgcagaaaagtaaagagaatagataacaccagtttcatagaggttccccgaaattgtgcgggtacgtcctcttgagctcgcctcttccactatagatcttcaataatcaagagattacaatggtgggatttcaaaacacacaggtattattttggtaatctctttctctcggtttttctctgatttcagtactaatgtcgtgtttcttttctttgcatgaacaaccctccactgagttgaatatccgaacccaagaccaaggattccaaggctacccaacgtgagcctccttcaactcagtcttcatctgtttttctctctgtaaaacagacctttgttttgttgttcagccctgaattttgttgttgtatttctggtattgatttgaaatttcctcagatgttgtactgattattactctacccttgttctgttgtattgtccttccttttatacatgttgtagaggagaacagagataggagagttagttacaagtgttaactaacttgtaactaacttaaatactctgtctaggtaaatagaggcctaaggccacataagctttattactgcctttgtaatctctgtgtaactgttcaagtttttacagtgaatgtggggatttactttcaacaatttccacctaaatccccatatgaactgtacactgttttgtttgttgttgtctgaatgtatctaagggtcatagctctaacccattaagggttttaccaacctatgtcattccccaataagcttaagcaaagcttaaacttattgagggacacaacctttgtgcccatgtcagttggattcactttagtaggcactttgtctatcccgatctgtccttgtgaaactttatccctgataaagtgatattttatctcattgtgatttgtcctatcatgaaaaactgggtttttacacaaatagatgcttctctgactatcggagtagattataggctcctttttcattaacttcagctcctccataagcccttttaaccatagagcctctttagtagcttctgtagtagctatatattcagattcagtagtggacaacgccactactggctgtaattgtactttccaactagtacaatttccccctgttaagaaaaagtaggccgaagtagatcttctagtg

SEQ ID NO: 225704 - DNA, 1060 bp, Cannabis indica
tttttttttttttttcagtttatgatattcgttaaaattctctaataaaaaaatatttttcttatttgttttctacaaatttctctcctaaaatttttgcttttttaaaaatccaaaaactgaaagaaaaaaaaaggaccaatatgatatggccaatgatagtatagcagagtcgcatagaaattgcagtccaaattctcatccccctcgtgagtcctcacgattcgatttctcccaagtcccatttacattgaataatctattccaactagtaattatttagcattaaaaaaaactagtaattatttctgtttttaggaaaaaaaaaagacacctactaagtattaacttttaatttaatatttgtatttgttttttctaaaagaaaaaaattgtgtttttcatttgtaatgtaaaattttaaataatcagccacattcatccctaccttaagcagccactcacccacccacaaaaataaataaagaaacaaacaaaagaaccgaaattatgaagaaaaaaaaataaaaaattttcattaaaaggaaacagaagacgggggagcaaaagctaatagagaaacactgagccgaaatcaaacccaaaacaagaggaaatagaagagcacccaactcagcaaagttgggttctttaggattttcaaaattttgggcttttctctctttatataaatatatatattgaatatattttaaaattaaagttttctcttttgggttgtgtttgtagaaatttttggaactttgttggaagaatttagagatctatagctgcaaaaaataatctgaatggcacaaccaggaccgggtacaatggaccctgccatactagatgacattatcaacaggttattggagtctcggcacgccaggccggtcaagcaggtccagctcatggagagcgagatccgccaactatgtacggcttccaaggaaatcttcctccgacaacccaatcttcttgagctcgaagcccccatcaagatctgcggtagtgatttattaattttgaaagcttttctgttttttcttcttttctt

SEQ ID NO: 225705 - DNA, 1857 bp, Cannabis indica
atatctgcttatccttaaccaccacaatagatgcaataatacaatccatatacaacccaagaaaataatgaagaggcagcgcctgacatgggagatgaccacggagatgccatgaagtgattggaagtttttttaaggaattttttttttcttttttgtgtctttccttattgttgttgttacataagttctattggagacaatatcgtgtttaagtgtgtgtggtggggggggggagggtgtacctcccggttctctttatgtcttttatgttttgtttattttgtctttatgcgtttggttttgtgtagtagtttttttattatgtttatttgtgtgttatattgaacaatagttttagttgacagcaatgaatcgatgatgagacttttaattgttcgaaagataatgctaggaaggtgataactttctcataaattgtgtgctcaactgtagttaatgattgctcaagcttaatttttaaatttttcacgataattgaatcatcataattgctaacattttaaaaagataagtgcatgtgtaattgttaatatctcatctcaaccactctagaacttgtttgaaaatcatttgagacgaaatcgataaattacatatgattttgaggtatgatatagataattttttttagatcgattgagcttttcaagcctaccctatttgtgaatttcctaattttacccaatttgagtctaaatgttaaaatcttatttttttgaccctatacaatagcctttgagcctaaaaatattatatttttcccttgttcatccttttttcaaatcatagtatatggatgatttatgtatttataaagatatgaaaattttgttgaaaaaatttgatgtttatgtatgagttaagaataaaaaaaaattcctaaaatgaatgttcgtaaattacaaatattacatatatgaaaaaaaaaaagtgaatgaaaacatatgacatgaaaaaaaaattcactaagaaatataaaatgaatacttacaataatataaatgtggggaaattagtaagtttatgctaaaaaaaaatgcaaaattgaataactcaagagaatgattgaggaatactaatgggaatacttgaagaggaaaatacatatgtatgctatggtgtgatttgagcctaaaataactttcttactcaccttacatcctagccaaacattatgagcctataaagtcctattgatctttaaattatatgtgattacattagtagagaatgagtttgatgattaagcttatggagtagatttttttttaaaatatacatttaattcgagatgagtattgattgttgcatcaaattaaaagtgaatagaataaatcatactttcatataatatcttaattgaattagatgtaatgatcaataaattcatccgtttaattcaatatctacataataaaaaaattctatcaataattttttctttttgggagttgacgaacaatcaaaattactactagtcatgcatgagttgatttggatattagtaatgagatgattgaaatgagcacacacacaaaaattaaagaaaagttattatcctacattgaaattctaaagagtgtagagttaaaaatctttatagtattatctgtttgagtaatttttgagactaaatttactgttggcaaagccattgtttgattttttttctatgttgagtcatttacttgtgtatttagtttagtcagtgttttgctaagtgactagtaaaatctaagtgtgagggaatttgataagagcccgcttagttaatttggaaattatcagttgtttatgattaattatgaaattatttatagctatttaaataat

SEQ ID NO: 225706 - DNA, 2871 bp, Cannabis indica
ccactgtgttgacaatactgtaattgtgaataaatatatgatctggacttaaccgattttgtgtataaacatattaaacataaacatgtaaaattcatgcaacataaatcacttcaaatttcttgtattgataattaatagattgaagtgggttttatttagggcacaaaacccaacgcacctccacatggccaaaagcaagggacacatgggagataggtcagcactaactggccatgctactgccatgcaaccctctcaagatctaaggggtacaacatggactcaaacaagaagagtgtggagacttacacaatcaacatctttaaggtttcgaagcaagttcatcctgatatcaaaatctctagcaaagatagagatgcacaagcattggcaagaccctgggcgagccattagctggccggccaagggtgacaactcacataccgggcagtctccgaatgtggctagccagtcaatgcacatactacgctctagcagttgtgtttttcccataagccttccaaaatattctaaatcgtctacaacacacctacaacttcagaacgacttgaactgcctacaaaagtaggaaagcctcgtcagagtgtaactgccctattttctagggatattttccatttgttatgtatttttgaataacaacttgtaaaaccctaacgctaaataaaaggtcttaaccgtacgtgaaagggacctgaattcatccattcaacacatgcacttaagagctcggaagcagtaagtcattaaactctctcttttcttctcatcacttcacaagtattcacgtacacattctcatcatcgtaatattgaagagagccatagctagaaatataaatatttcagcctttaatctgtttggtattatctcaagagtgaattcaaaaagggagtaggtcattactcaaaggggccgaatctctataaatttgtgtgtcttttacatttattatcatttcacacgtgacagttataaacaaaattagatcataattagactcctcgttaatcagctaaatttgcaatcaacaactttaatgtattcaattaatatttaacttattaagtttttaatattatttatactatggtgctttcaaattttaaatatatattatatttttgaaatttaattatttgaaaacaaaaaactaacaattaaaaataaagatcagtttggataggttaagttgtccaaaatctgtccaaactgatgaaatcattgagcatgttaaatttttttttactaatttttaattgagtgggttactatttgatatttacaactcaacattaagtcgttaaaaatatattataatctgaccaaatcaagcgatgtgtacctttagtaagtattatcttaactttttatatttggtatcatatgtgtatactacaattatggaagttatcttgtcatgttttttttttcactaaattatagtgtgtgtttgtttttggaaaaatatatagtacactttctcaaaaaatgttttgatatacacctcctatttgtataattaggaaagatttatggtctatttttttatatatataataacgtacgtgttagttatttaagaaaatttataaatgttagaaaattcttaatagtttatagttgaaaataaaattcaaatagtttattactatgtggcaaagaaaaacaatcatgtaacaaaatatttgaatcttatttccagtattgtaaactattcagcattttttgaaaatagattatgtaagaaactctcttgaatatcgaaaaaatatagggtgtactgaaacataccactatatacttaccttttatttttttaaagtaattttagcactataaaatattagaatatatatttttaaataaacaaacaaaaaaaaagagttatttaattttttttccaaaattagtattatgttgcttcttataattataatgtttagttcaattattttttatgatcatatatgttgtagttatttaggattatatgtaaatttttaaggacgtaataaattggggtttatcaggcccaatttatataatttacaatgctgaaaatgaagtttaaatattttagtgtacacgtgactgttttttttatacacatgataaataattgtttaaattgtattttcaatattataaattatttaaattcttttgaaaatttacctatagtactaaataactatgacctaccgaaagtataaaaaattaaagtaaaaaaactcctcaaaatgccaaagcaaatagtggtcttccaaaattgcacaacaaatttttgtaaacaaaataatcatagctacacaagcgagtgctgttttcatttttttttttgaaaaagaattccaatttattagtagatatctatctgataagagagagtagtataataagaagttcatttcaaagtttgaccgaaatagtgataatgatttaaaaattgaaaaatagagaagcaataccattttacatcgattacttcgaacgaccgaaaagttatacacagaaaatatacaataatataacagaatttacggatttttttaagtaatattcattcaaagaaaagtatatacattttatattaagtggttatttttttttttgtttaatttatacttttttttttttttgtttctacgttaattttaatataatattctattaattaataaaaattaaaataatttttaaatttttacggtaactttaacagaatattctttattaattttataatattattatatatatttaaaataaaaattatatatatattatattatagatactataaatatttttaatcatatttttaaatttattagtttaacttt

SEQ ID NO: 225707 - DNA, 1803 bp, Cannabis indica
cgagtataccctagaattcgatcgtctatcccttgggtcaacttcacaaaatcttccatatgtgaagttcttgcagcaatgttataaaaattttcttcaaacagggtcttaaactcttcccaagacatggtactaacgtctcgggtttgacccacaatatcctaccagacgcaggcattatcttataacataaatgcaacacaattaactcgttccgtccccgtcaccccatgttatctaggatgtgggtaatagtgctcatccactgttcagccttgataatatcagtacctcccataaatgttggaggttgcagcttcacaaaacattcgaacacagaatcttgatgtggtagaatagatcccaggttacccaccactagaataggaactggtggtaacacttgttctgctggagcttccagtgttggttgcctaaaccgacgcaatttatcttcttgatgaagtactgcttcgcatttcaaggaaaatttactgccaattggcaggtggattagtattattaaccctcgcattattccccaaattatgtggaggcgcaggcggtgccgatagattggcttggtcattatcaggctctacgtgcttgccctgtggtctagatgattgtggagggtccattttcacaaatagccctaaaatcaacaaccttgtgagttaggcaccaacactacacttacacacttattgccttaaaccctaactcatacattctatttctctaattaaataaacatttatcaattaaaatactaatcatgctttccatataaccttcattctagatgcttatatacttcctaaaatagaaagcggtaaatgaataatcacataagtaattataagcatttactctcaacatttactgcaccacgagtcgagcttgtctctaatgatgattgtacatttccaactgatctacaagaaatttaaaaaccttagtgctctgataccaaattgtaatgtcctaacaaacgttacgatttccaataaacataacctaatcccgttaaactgggattactagaaataagaataaaatttaaactttaaattatgtacgaaataaaaatataacttgtaattatttaaactttacaaaccattccaaaaagatttctcatgttttgggatcctataaaaattttcacaaaatattacaagtcatttttacatgccgacctaagcgacaaaactgagaatacaaaatacatcagcttgtaaacccaatccacgtttgtctagtatgccccgaacatgtaaaatccatcgccaagccctcgaactcatggttgatcacaaatagatttaccctttcctacacagtagagcacctatgagctaagcccaacaagacagtataaatatcaatatgtaatatatatattctcaattcaaataaatattgatgtcaccacacctattgtctatttagcatagacctacgtgttgcgctcactcgtctatatacaataaggccttagattggtttatctcggttctgattaccaagtctaacctaattatgccttacctgcataattctttatatcaacatatatagcatgacattgcattcaaaatcatttaattactagagtaataaccccagaccatataaccgctcactttagggtaataatcctaatcccggtttttcacttaatcacaatcataatatcaaggctaattaggattttcgcccccagaactttaacatgtaccaaatcatgtcccctgaacttttctggtcatcaaaaattcccctgaactattgagattg

SEQ ID NO: 225708 - DNA, 2665 bp, Cannabis indica
agctcaaaggaaatcatcgtttcacttctaaatgcctatagaacatttctcttatcaagcatttctcttatcaagcataaggaataacagaaacgtgccactaccgccacgtcatagtgaaaaaaatgggataacatttgcccccaagtcttcacggaacttccaaagtcacgcgtaaacttcacttagtttgaatttgtgtctgaatgggtggcacgtgttcgatgcgcctattggtgatccgatgtgattctggccaaaggtctcttaaatattcgactcataaatggtgattgttcgtacctcgaaacaccccaaccatacgcatgcattgatggttactcttcctcaagtacttgattacttgatttgccaacgtttgcttttggggggaaatagaggcatttaaatttcaaaatgattacaacccttcactaacttgcttataaatagaataaaaagtcctaataaaccactatcagcaatttcttatttggcgattttagagcaagaactcctttttatcttaaatccttcgaggaatttccagaaagtgtcgattatcgtcatctgaacaacctcaaagcttcaaaaagtgagtaagttcttcatcctttttcctcttgaatatttgaatctctgattttctgggtttccattgtagaaaattcaatagtcttgaacttgttctaggaaaactgtagagaatctaggtttagaaatatgaaattattcttgtaattgactagataacttgactgttgtggcattctgactttaatttcacgatattcggttctcacttacccattcggggttcagtgaaaattgacccttaatctaaagttttgaaattctgggttatgaacctaaatcatacgatatttccctttttttatcttttgatgagagctggtctatatactttgttttttgttcgagctcccggccaaatactcatcttgtgtccaatcttttttagatgaagcctggtgagttttggggaggagaacattgtatcaactaggatcttttgcaacttctatacgaggaccaacctcgtccatgtgctagttgtcctcaggaaggggtggagacgatacttgctgtccagctggacacacattgtctggccaaacataactgatactatccccatgggccgaccaagtgctgctacctttggcattcctattgccacttttgtcataaatattgctaggcatactaaccaaacactttccagcggtaggatgatggcccgcactaaacaaacaatgcagagaattgcctaaactaatcctcacgtgactcgactttcaatgatgtcgagcgctgaacaagcttggcgtgctgctgaggaggaggataatgaagggtatattgaagtccaggagatggaggaccagggcaaggtccatcttgacagtccctctgaagctaaggaggagcgagttgctcagccattgcactttggcggttacaacgagtcaagggaaccagtatctgaggctagtgatgtcatggtagagggcgatgactactggactgaggagtaaaccaaacttgttcctcaaagaaggcaaggtgccataggagctcggtgggtgtctcctccatctatagtaacccaagctaagatgaggagtctggagaaggacggatacctgggaggtgtcgagtgatttttatcttctacaaatcaccgggcaactagtccaagacagcaacgcctagtcgggtgcccatactaagcagggtgcaatgctgccctagcttctgtactttaagacgattgcggattactaccatctttgcctgacccagttcacaccaaaaggcatcaaatacttatcttccctgttcatcctctatgcctgccaaggatggagtgagccatctccacacgacaccaattggcgtattcgacctgaagtcaactcctaagcagagtaggttggggtacttctacttctcctaattggacgagaaatggctgaagggtacagtggactctgatgtcagcaaaatagggcattttgtggacgagtactacttcgtgcagggcatggataccgtccacacttagttccagtagattccttcgtactgtcgtcctcctttcacattggggctaacagagagggcacacagaattctccaactccagaagctgttcggaatatcactttgttgaccactgaggcaaactttgtgaagtacaagttcttcctagaggattttgtaccgaagcccatgaaggagaagaagaagaagaagaagaagaaggtgaagccaagttgagctggtgataccgagtggaagaaagagctcattcaactcaagcgtgaggttaagttgaagggaggcgacggggccaagcaatatgctcaagaatattcagagcaggagaagtatgctcaagaatattcagagcaggagaagtcgaacaagaaaaagaagaaagctcccttgaccgaccaagcacaagtggaacatgctatcaggattagggaacttgattttcttgctcgaccatctacccctatagagggaaaacgaaaagccatcttggtggagcaagaagactcttcagatgatgatgttgttggaaatattttaccaggatctagatttactaccaagtatgtttgattaacatcct

SEQ ID NO: 225709 - DNA, 2233 bp, Cannabis indica
acaaagacaagacttacggtaacagaaccgaacaagacaaaagacaaaagacaaaaattttactagataaactaataacagtaaattaattaagaatctaactccataaaaacctaattagaattaactactaacagtataaatagaagcaacaaaattaaacacagaaattaaaccaaactcaaaacaagatccccttgtcgctgcctatgtcgctgcaaaatcccatcgtcgaaatcatggtgcgtgatcatcaaacaaccgaggacttcaaaacagagaccaatgtgatcacatggaagcagcaacttcaatactcgagtgcttcaataacagagaccaacgtcgtcgtcgtcgtcactgcaacttcgtcgctggaagcggctggaatcacatagaagcaagatcccgtcactgccttcgactgcgagatggaaggaactgtccagcaccgtcactgccttcgactgggactgggaagagcaaccgccgacggaccacttctgatctgaaacattcggaccacttctgatctgaaacatatccatttagttagagcggattggagctctgatctgacggaccacttctgatctgaaacattcggatacttattggatatataggattagatctgctccagcctgcctaattttttccgggtcgaatcagattcgattcggtttcaatatatattaagaaaaaacttaattcaagactcggaccccgaactgagacccagacccgaacccgggaccagatccaaactcggctctggacatccgaacctagacccggatccaaactcgggtttcagttcaaggccctgacttgggaccctaactcaaatttcaggacctgaagccgaatttgggaccggacttggaatcaggacccggtacccaggacctaaacctagacccgaaaccaaactattacccggacccgagactcgggaaccgaacgcggactcaaacccaaacacggaacttggacccgagactcgagacctagacccggacctagacccagacctgaatttggactcgaaataggacctggacttgggacccagatccgaactcgacccatagttggtgttggagttgagtttattgaaaatatagtataactttatacaatctattaatacaacttaataccaaatatagtattgtattaaataatactaatacaaaattaaaataaattcaacaaaatcgattacactcttgtaataaagacgtaattaacattcatgtatagaaaagaaaaaaaaatgttgttcataattgattttaattaatttggtttacgaagacaaatatatcagtaattatgttctttctttttttaaaaaatatatatatatatatgtatatataataatcagcacggacataattcaaaagagttgtttagaatttttgtatcacaataaagaaaaaaaaaagattattaaaggagaagagaggggctcctattggattgagtgaccacattcaatggttgacggccaatcacatgggtaaggcaagcctacaacattacgcccaatactatgataaataatattttgaattctgaatttgaaagttatttattagattttttattttgttaaataataattatttaaattatataatttttaaaattgtataaaagagattgtgaattttaagttttattaaattaaaatttaataataatttgatttgaaagtgttataacaataatgattatatgtttttgtatgtttgtactaaaaattaatttcaaattgtttatattaagaaaaaaattaataaaaatcgagaattcaaagacaattttgcactatttaaaaaaacacaaatttaaattattatttaataaacaaaaatctaatttacaatttttacaaaacacaaatttaaaatatttacccgacaatatatacttataaattatcacacatacatatttatattaaaaaaaccaatatgataggaaatataaagacaaaaaataatttgatttacttgtacggacacgtggaactgggtaggtcactttggtatatcatcacaagtggtggcaacacatggtctgggaaataataatatatttaaaaaaaaaaaaacaaaaaagaagagagtagaaagatgatgaagcaaagtcaagatttgcagtactttacttggtatattctttctttttttttttgtctctatatgagaggtaacacgca

SEQ ID NO: 225710 - DNA, 1552 bp, Cannabis indica
actaaaaggggagtaggtcattctccgctaaacaatagggccaaacctttatcaattgttgtgtcacttttattatttgcttttacaatttacacgtggtgattgtcaatcataaataaggctctattctcagttgacaaaatctgaggtcaatatgttagtgctttcattcagagcattgtttatcatcctaatcagttatcatgggtgtaactaggagaaccactgcccccatttcatcgggtcttccttaagaacctatgatggctaatcccaatgtttgagttcctcccacaacgaaaagcctcactgatctaactcatactgtcactccgaagaatcctgcgaatcctgcaaacccaacaaataccactaatctcgttgatcttgctaacccagtgaatcctaatgaccagcctttgctgcccaaaatagatcaaccaacaggacctcgaactaaaggtcctatcaacatgggaaaaagtctacggagcacaactaggactatcactgagtattatgtgggtgaaatagggctaggaattggcaaatcatctattagtgagcctcatgtggacctaggaaagatatcaagctagcttggcttagagaaattgtgggccatgtcacttaaatagaagaacaatgcgttattggtggcaatgcttttggccaatagagacacaaattcctaagatggatggacgaccaggaggctatcctctgggcccatcaggtgaagctggaccgctataagaaggaggtcgatgacctgataaggcagttcaatgagagaactgctaaaagtggccaagatctaataagatatcttttgcatgggaggctcatcaatagttcaagtaggtcctatgggaaaactatccaactaggccccttgagcatgaggacagacattcccctgcctgaacacagtcaaatcttgccaaagagaccgtatgataggagtagcgagtccctgacactaagaggtgtacggggatagccaaacattcctagagtagaagcatcaccaatcggccaacatctggccgaccaacatagtgatgctcctccctaaaatattttggaataggtcattatgaggccttttcttaatagactgggtcctaagatgaggagaaacacaaaggacaacttcaactcgaggagctagaatcaaagtaactttgttcttcaaataaacaataatttcaggctagtggatgcgctaagcactagaaattggtacaattaacctcttattgacacacaagctactttggccaaccaaggagaacaaccaacaaaactatgcctagcctaggactggacggtgaaggccaattacctagcaaaggcttagccaaccaaggcttgaccaacaaaggtttaactgactaagggctccaacccgacctagaaagggcattcgaacaagtgtccactgtacaaatccatttgtgcaagcacaattagatcaaattagagacatgataaagggcctactcagcccaaggccgtcagacctaaaactagacaggtcgagagggtc

SEQ ID NO: 225711 - DNA, 2676 bp, Cannabis indica
tccctccattccaaatgtccctttgatgaagatgttgaactaatgcctcggccattttgactcttcactccttgacatttctatgttgccttagtaccttagtcctgtcgactttcaccttaggccaacattgccatggtgttatcttaatatgtgagtcctactgaatttcatcctagataactagcactgcccgtgtctcgagtcttattggctttacatccagaacaataactcatctccatgatactcatttcaatgcttgtaatgaatacctactctattgagtgaaccgtgagggtctctcctcctcttcatctgttggcatcctcaacatgatgcccacacgtgaatgcctgacagcctaactcttcatgacaccatgccatctataagtgcatcccgcaggatgtgactctcaagtcaactatcttaaatagcacccttatcgatttctatatgcatccactttccactcaaccatccaactgattggcacgagcattgcgcccatgtagctcccttgatgcactaagttacaatgatgcaaccctctggccttcatataaaactctatcacccctcttgacctttgtaggctcacatgactattaagtctcactggcacagccctctggcctacactcaaactctagcaccatcttaatgtttgcgctcagtcttcttggccctgttggcttctttgatgcattcattccaaaacttcatatctctatcaatgcctttgtgttatttatgcccactgggacttttacaagcaaacacaactcgctcgactatatcagagcttctcatctagatcaaataaaattcacatgcaaatgcctcaaagtacgatgatcctctagcggtcgcgacatttttccccttggtctccatgtgcatccctcttcacatgcatgtagtaactaaagcattccatgtctatcccaatttgaaccatctcagtcatcgactctcgaccactatcttgactaacaagaatctgaaggcccctgcaatacttccacacccatgacaacatgcttctttttcaacaaaagcgccttttatggcttacaatgtcacttaagaaaacttggcctagtgtaccaaacatacaatatggactacccaatcaaaccttgtactatgccaacaagtttcaaacagtttgttgcacctcgctacaatgggctaattttttgcgcgaccgtgtgccttgtgcacacttctgtctctcgaacaactcccgtcgagtcatgctcgaaagcatccatgagtgcatccatgcatcgaggctctctagtcaagatacttgcactgtacataggttcatgttcccactatgataaggcaaatcccaacatcgtcgctcacctagtcactcgtgactaaggtagcatgtgtggcaagatgccaacactaagctgacatgccaacgcttctaatcatgcccctattccatactatccaaacagtctccctcatcacccaaggactcccatatgtccatggtccaatcctcaaggcaccatgcctccacgcatgttggtaggccctcgagacaaaccaccaaactagtagcatacgttagacctctggctttttcaagcatggtgcatccgtctcatgcacgtatgcaaaccaaatagcctaaagacagtgtatcattaaccgagcaaccttcatttgagaggccaagaaccgaccagcttgaaattggttccccaagaatcggccatcctaaaagttgttccataagaaccggacagagtttctatatggatctaaataattggacaaggtctctaacagacccaaagtatcgggcaggttcccttatcaaatcaaatagtcctatttatacatttaaagctcagtttcttcatgttctttgaaccctaatgtttaaaatggcaaaacgaagtgcaagattcaatctttttcatcaaaaagttgttcattctacatcctaaagttattgcacaaatcatagtgtataaagactactctaaagcatgaaaatcaagaatttcaaaagcttgaaactcaacaatagaagaactcaaaaaacttgaaaaagaaaagagaaatttatgattcgcccactatgaagactttgtgagagtagcacgattctgctcgacaatggcgatcctccagcaagtagcaataaggcttctcgaaggattcttggatcgtgggggctttgggtttgagaggtttgaagttatgtgagttttaagttttaaataaaggttgagagagttttctaaattcaaggaagttgaaaagtgaaaaatgagaagagaggaagtgagatacttatatatgttttgggaaattatttttcccccaaaaaacataatggggatttaatgccacaaaaataggaatgcatgggaaagaggaggccaagagtttaaacatgggaaagggtgcaactctcacatcatttcctacattgatcgacataaagttgataactgtcacaaaatcatgtcagtcgaagagaccaatattttgccaagtaatgttgcacggcaaagccatcaaaaaccaaggcagaattgaaaagtccttatctggacaaacatttagacagagacttgtggggcaaatattatcctaaattttttccatttgatgtggcaccctgttggaatttatttt

SEQ ID NO: 225712 - DNA, 2454 bp, Cannabis indica
tttagtttcgtagtagttttctatactttttttttcatgaattcgaaatagcccttttttgattgattatggtcgtcttctcaagtgaagtcgtcagaattaatggtagttctctttctggttgaatttttgtttcggttgcgtttagttgatgcgtggttgcgatggttgcccatgaagcatgaatcctgggttgaaggtgtgtgtaagaagtattttgtataattttttttatttgggctatatatttatttatttagccagctgaaagtaattttgcaatattattaattttttttagttaaaattgaaaaaaaaattatttagcaaaaagtgtatttatctttcttttttcttaacagatgtgatagaactatgtttttaaattttatcgtattattcttgttaaagaaaaaaaaaatattttaacactttaaaataatttttagtaacccaacctgtaagtttttctaaaaaatagtatatagggtgatttccaaaagaaatctttacaataattcgaacgctttataatattaaaataatacgttaattccattttaatatatatatgttgaataatattgaattaaatgggaaagatagaatttttatgtagttcgatagttaaaatatatctagtttatgagtcagttttactctttgtgtacaaattttgacaaaggttaggtatacaaaatttgtcatccctttattattaatttcactgctatttgtagaagtaggatagtggcgttaaggtttatgcctagaaaatttataaagatatttttgaatataaatagtagttgaacaatttgatatatgtttgaatgttaaattgtttattaataatttatgtttgtaaatcgagaaaatctttattcgtatatgaagttgtgactagtatcgtgatttcttaatgatgtacactcctttattaatcaaaagatttatggaaaaacatgaataatttaaaaaattcttgtttaacctctaaacttaaataaataaaaactttacataatctgggatcccgtctttaaattttacatctgtaatacaaaatatttaactacaaaagttgtcgcctgacgactaccaaaataaagcttgttgttccaaatatcgaatactctaggtctaactatcatgatatgtacaatcttcattagctggaactcactattgttcaactttttccttactcttacttacacatgtaaataataagggtgtacatcagttagtttggtcaggttatagtgtatttttaccaacccaatataaatgttaggttgtgaatatctaattgtaacccgtctaataaaaaataaaaaaagcataaccccctcaaggattttcgtcagtttggtcgggttaacctgtttaaaccaatctttattttttattttttttcattattgtaaaatatatgtatagtatacacctttcaagattaaaaggattatagtttaaattaatgttaaaaaataaatataaattgaataaatgttaaagtattaaacaacctttttttaaaaaaatagaataaaaaatatacttatatgtaaattttaaatttcaatttcaatatttaaatacaatcaaaattatcaactataaattttaaattttaacttttaattaaacactataaaatacaaattttaaatgtaaaatagtttaactattaaacgcaatttatatattgtattataaatgattttagtaaaaatcatgtgaatcggtttattcagattatttgggcgggttagaataatattcaacccgcccaatatatttgttgggaggtttgaatttttttcgtaaaattattcggcttgtattttttgtcggtttattcgatttggtttggagaatttattcgggttgagcggtttataatttttttcaaacaaccctagtaaacaatatctggagtcgacagactcggtaaaaaaagtataattataacatacacatacactagattataactaggggcacatacacccaattataatcgtatcctgcgtgagtctagcagcctatactattgatcataatatcagcctatactcggtactttagttgtactgatgtgatagcatcaatctgtactatgccaaacatatatctgtcggtattcaatgtaactctatgtacactaataccgccattattgatatgctatctaacagacattcataaatatacatgctaaatatgtaatcacatatgatattattatactaatcttaccttaattttgaattcaggtgtgttggtcaattgtgaggaaactactgataaatatacatgctaaatatgtaatcacatatgacatttatgtatgttgtgacttaggggcatgtaatcacatatcgatgatttacatgcccctaagtcacaacatacattattgaaaaatattgtcccacatggattaaa

SEQ ID NO: 225713 - DNA, 3513 bp, Cannabis indica
taaataagtgtcatttctacttgaaacaatctaaagttatacataattaatgtttgaataaaattaaaatgaatacattattaattgaagaatatatgtatatatgataacaaataattgtactattaaaaaagaaaaaaaatcatatactatatttaatttgaaccaaattacatttattttaaaaatataagatgactaagcaaatataaatctacaattaggacacttattaagtctactgttaatatatcatgcatacattttgggtgaaacatatgattgaggaaattttcttacctcatctcccttttgtattcttctaggcatattggacattcgtctccttcgaatgttttattttctccacacaaaattgctttcaggatgttcgtctatatacattttcttcgatcaggtgcattttgcacaagtaaatgcacaggggcatttcaaactcacgtctaaagctaattaggtctaattaggtcagagccgtaggcctaattaggcccatcatgcaaccgtcatttgtgtaatacctataatgaatgcatctatgtacattttcttcaggcacattttttgtaggtgattccacgagtgtattacttttaggtgtattttagactcacatttaaggctaattaggtctaattaggttgtgatcgtaggcctaattaggcctgtaatacatgacaagctttatcattactattaaaaggattcaaaacctacgaaatagtaatattatatatatacatataagttttcagaaaatgcatctatagtaagtacaaatacatttttttcaggtgcatgttgagcaggtaaatctatagttgcattttacactggtaattgcacggatggtttttttgtcgccactgtgaaaaatatgatgataaaatatataaatacattcgattatagaaattatgaaaaattccccgattaaaaaattattagcaaaattttagttttcgaattcaagttaggttggctactatcacctttcttcaggtgcattttacactggtaattgaaggaatagatttttttcatcattgtaaaaattattgtgatataatatataaatatatttaattatagaaattttaaaaaattcctcgattaaaaaaatcattagcaaattaaattttacttttttaactcaagttatgttgggtactattagctttctgactttgggctaagatagtaggaagtagtaccatatagataatgaagtaataaataagtgttattactgcttggaagtttgaataaaattaagctgaatacattattaattgaagaatatatatgataaaaaaataattatactattaaaaaagaaaaaaaccatataccatatttaatttgaaccaaattacatttattttaaaatttatataagatgactaagcaaatataaatctacaattaggacacttattaagtctactggttactatatcatgcttacatcctgggtgaaatatatgactacatggaaattttcttacgttatctccctttttgtattctcctaggcatgttggacattcgtctccttcgaatattatattttctctacacaaagttgccttcaagatattcgtctatgtacattttttttgatcgggtgcattttatacatgtaaatgcacatatgcattatcttgattaggggcattttagactcacatataaatctaattaggtctaattaggccatggttgtaggcctaattaggcccgtaatgcaaccttgatttgtgttatacttataatgaatgaatctatgtacattttcttctggtgtgtgtaggtaattccacgagtgcattacttttaggtgcatttcaaactcacatctaagattaattaggtctaattagatcgtagttgtaggcctaattaggcccgtaatgcatcacgagctttatcattaccattaaaaggtttcaaaacctaccaaatagtaatagtatatataaatacatataagttttcagaaaatgcatctaagtaagtacatatacattttcttcaggtgcattttacactggtaattgcacgaatagattttttcatcactgtaaaaattattgtgatataatatataaatatatttaattatagaaattttaaaaaattcctcgattaaaaactcattagcaaaattttagatttttaactcaagttatgttgggtactatcacctttctgactttgggctaagatagtaggaagtagtaccatatagataataaagtaataaatgaatgctattgttgcttggaacaatctaaacctatacataattaaggtttgaataaaagtaagctgaatacattattaattgaagaatatacatgatatcaaataattatactattaagaaagaaaaaaaattatatactatatttatttaatttgaactaaattacatttattttaaaatttatataagatgacaaagtaaatataaatttacaattaggacacttgttaagtctactgattaatatatcatgcttacattctgggtgaaacatatgaccacatggaaattttcttacgttatctctctttttgtattcttctaagcatattggacattcatctccttcgaatgttatattttctccccacggaattgtcttcgaatattcatctaagtatacatttacttagatcaggtgcattttgctcaggtaaacaagcagatgcattatcttcaggggcattttagactctcatctaaagctataattaggtctaattaggtcatggtcgtaggcctaattaggtccgtaatgcataacaacctacttataataaagcttcatcattaccattaaatggcttctacaaattacatatatgaatatgtaaatattattttggatcctatattttgcaaaagttacagattagaccctctgtttcgttaaatgacaaaatggaccctgtattttttaaaatactacaaataagaccataacacaataccagagaggaatcctttaaagcatctacaactatcttaggctcaatatagactttggctagatgatactagctcttactcaagccatccttcattgctagtcttgcatcgcaccacctgactgagaatcggtggtgacagggaagacaaaagcgagctctcacgagtgtagagagagaactcagggttgtcaatcaacagacgtgaacatgtcctctatccaaagatgtagtcaccaagattgtatccgcgaataattggaactacttgtgatctccagagcacgtaattagatatgtcaagcttcactgagatcacaatactcatagtcaattggaatgcagtgagcacatgaaatgttggttctccaacattagaggaggaggtagcataggctgttgaagatgatgcttgagttgccatggccgcgtggctctaataccaagtgaagactaatgaatgagagagaatgaaagagtaaaacaatgaagatg

SEQ ID NO: 225714 - DNA, 3572 bp, Cannabis indica
aacttatataattagtagttgacgtgatacttgaaaccacaatctcctcattccatagaagcattaaacccccacccctacctactatagacacttcatgaacattatcgaaacccaattacctctttattttataactcttaccttccaccaaccttgtttccattaagaagataacatttggcttgtattcttttagaagtaactttaaatgttgaattgcctcttctccattcaaacctcgaacattccaacttacgattgacatttcttctttaagtgtattgaaagacttacttcataaactcagcgtgcttttattttaataattctccttcagactctacatgtgttagaatatattatcattacataataaaacaataccatctacaatccaatatcatgaaaacttttaaactgagatactccatttaaatttcttctcaaataaatcacctttaatatcagatattaggtggtcaacacaacatttccacaccaactcttatactaaattccttcaatcactcctaatacaatcactcaatttcgattgagttaaaatcaattgatttttcacaaacatcattaataataaaaatcgtgattgatataaaatgtattaaaattagattacctttattggtaccctttatattaggggtgttcgcagtacgggtggtgcggtttttgaccatttttcaaaccaacccgcacatgcggtttttccaatttcccaaaccgcacccgcaccgcgaagctaaaaacccgcaaaaaccgcaccgcaaaaaatagtgcggtgcggtgcggtttttgtggtttatgcggtttggactatcgctaaataattgaactatcacaaatacaacaaattttgagcaaaacttatcaaaataccataaggcttgaaaataaatatgaaaaaaaaaattaagtgtcaacaatacaataattagtggattttgagttgaacattcacatattggacctaaataaatataaaaattggtatttttataatgtgcgttgcggtgcagtttgaaccgcatattaacaattcaaaaccgcaaaccaaaccgcaccgcacggtttaggaaaaattcaaaccgcaaccgcaccgcaaaaaatttcagaccgcattttttttcgatgtgatgcagtgcgggcggtttgaacggtttgataaacacccctactttatattctaaaataatagcaatcagctacataaatgagaattaactaatcccacaatctcttttatattattataaatcctttatatataatataatctttaaaactgatattaataaatattatttttccaaatgtaccaaccattttagtacagtgaatttatttcccattttagtttaattaccatgataccaatataattccatactttataatcttgtcagacttttcaaaaattacttttacaactatgacagctattgaaaactattatttgttaacatcactaaactatgtaacttttctctattatcaaccatataaacccttattttattgttgatcaaatttatataatattattggaagactacttggaatatgtactctaagaactttgttagatatatctcatggagaaataatcataatagttaaagcaatcataacaatgattaaaattaaaacaacacagaaatttattgaattaataagtcttcctcaaaataccattgcttacatcaacctttagacaaattaaactcttgaccaaatagaatattaattaaaaccaaatacaaaaaaatcataaatttcaaaccgaaaacaaccaaacttccataactttctgttagccccaccattattctgaacaactcccttgtagaagatagtgaagacatcctctccatactactcattcactcatttatcagctgcctttttactgtctcctccatctaagctcttctgttggatattctttgaactttttgagtagtcctgcatattctcaacataacgggaacatggcaccttatctttttctactaatttaattctctttgtttggttattcgtgttggcaaattctgaacctaagcgcaccttatcaaaaccagtgtgtgtaaaagctttattattaggtttgacaacctccacatcatggttagagtattattagaggggaggtgcgttataggcaaaggaacggttttaagggaatcatcatattcaaggtttgggttaaactctttttctaactcttctaaaaagctcacacaatttttctgtatatgatcttaacaaccacagaaaaaacaaaacttatttaagcgctcatatttgaaagagatccaaattgaatctttaaggctactcaaatctacctgcatcctttttatcagtggtttagtaacatctaactctaccctgaatctcataaaaggtagtttggtagaagaatcatactctaaaaacctacccatagtattagcaatttcttttcccatattgaaattaaccttacgaaaaggtataccataaacatgaatccaaaaagaaataccttgaaaattctaatccaagatatgttccaaaccagtaggatctataaagatttgataattacctgaaaaattccatggttgccccctcaagactctattcttaataacacttgacactaaggtaagaataaaaataccatccgtatactcttcaattttctcacatgctttattttgccaaagttgattaaacatattcatcagcccacctttattaatagacctcttagagattgatctttcaaaaaccgcctttgagtactcatctgtctccgcttcaatcatggtggaagaatttgaaaagatggtcaactctttttggttcatagaacgggaattattattaggttcaacactaggaacactgtttaaatcttagaaagctttagatataagaataatacctcaccaaaactattacctatttataaggacttccaaaaaacaaataacatcaagatattttaaagaataaaaacaattaattaaaatttcctaaattttattatcttaaatacaataataagttttttcgttttttcaatgtagtagatattaacatattaaaattatattgttgtctagttagatttttgttgttttaattatatattacccatacatcattttaaaattataagattttattatttatattagtaatgtaactatttattattattttttttaaaattaaactattacttcagctgtcactaactctaaaaaaaaagttaaaaggtatgaagttgtaacaaataaatttcattaaaaaaattatcaagttgttaaaactaagtaaaaataaaattcgtaatacaaaaataaattgaggagttcaaattgatttgcatattacaatgaggttggtgtcttgttattttcctattgctttataattatctttttgttgttttataggtcctgttcggtaacaattttaaaagtggttttctgtttttaaaattaaaattttggaaataagttttgaaaacaagttcggtaacaacattttgtttt

SEQ ID NO: 225715 - DNA, 5545 bp, Cannabis indica
gtgtgtggtacgatgttagagatggagttcaagaccttaagtcactctagtaaaatttaaattgtattcactatgcaagattcaaatcgaaagatatctttgtttaagcactgtcttataggtgtctattgctcgagaaaatatttttaaaatttcaagtgggggattgttggaactttgtgaaattttataaaaaaaaatagaaaataatttatgtgagtaaatggattcccacgggatagaaacacttcattagaagtgcatataatgtgcaagtttgagatttgggtttgggactcacacactacaccaccatacatgtgcgcatgctgctgccgccattcgtccgaccgagctgggccggagggcgggtgaggtgtcacttaatttttttaaaaaaattatttactaaataaaatttaacgtggatgaaatactccctaattaggataggcgtctaagatttactccacattttgctggtaggtcttgatgtataacgatcgagtatgtttgaaagcatatcgtcatagagaattacagttatttgagtgatccaccaagtagctagtttctgctacctgatcgaaccgtacgattgttctaaaatacccctaattaggataggcatgtaagatttactccacattgtgtcggtaggtcttaatctataatgatcgagtaagtttgagagcatatcgtcatagagaattacaattatttgagcgatccaccgagtagctagtttttgctatctgatcggacctcttttccaagcaacaaaatattaaaattatgaagcttccaaaatccaagttccctataaacctttgggacacacattcggttccaactcatcatgtgaatgccactatcattttcacacgaattcttccaccaaaaagaacacacttaatttttccatctcgtcacacacatttttaggcaaaagcaaaatgctcatagcataagtggggagagattgtactaccgtcttcaacaaaacctctttaccaactctagataaaaatttaccatcccacctttcaatctgcttcctcatcttttccttaagaaagcccaacactgttgacttgttgcagttcatagtatttaggagttcaagatatgagcaattctgactagcttccaccatacctaagatggagcacaagcaggctttcatactaacattagtattctagctaaagaaaataaaaaattggctgaatttacctttgaaccaaagctatttcaaaactacgaagcaacaacatcaccgtattagcctcatcgtccagcgtctaacagtacaaataatggtcacccgcaaagaacatatgagagataacaggcgcaccccgagtaactttacaacctttaaaccactctcttcgtacatagtcattaataagagcaaacaatccttccgcacataagataaacaagtaaggagacaaatgatccacttggcggatacgccgaggttgtataatcggtcccaaagagaaactaccatattagacccaatatttgtatatatttaatgatataatatattcatttactgtaataacaataaaataatatgcattactagcaattttttatacaattattttaacattatataattttttttaaaaaaaaaagacatgaaaatgaaataaatgtatttttataatttttattatttgatttattatagggtctttttcatttattacttttacaattgactttttatttatttatatttttataatttacttgttattcatttataaaaataaaaacagcataacctcaaaataaaaacaacttctataaaatggaaacaatataaacttgaaataaaaactacatagccttaattctctaccttttgagggggataggatcacttggagtagtcaaggtcaaggtagagggctatcaaagaaaggttagattatggatttgttaatgactactgggaatctacctttcaagcatgttcaattcagcatctagactattacaagtctgaccatcgagccttaaaagttcttgttgaggctttgaatgaacaagcacaagaagttcacttcaagtctaggtttaggttcgaaaaaatttagctacatgaggaacaatgcgctccattaattcttgataattggtcaactggttcaagtaacaatattactcaactaacagccactatctgtaatgttgcaaataaacttcagacttggcatcattccacattcggccaacttaagcaccagatcaaggacactcaaaagcatgtttctacacttcataactctaaaaaaaatagagaccacctgtaagttgtacaaacttcagaacaaatccttgatgaattgttagctaaagaagaggattattggcatcaaagatctcgcatatcatgtttacaatcgggggattccaacactaaattcttccaccagcatgccagtaccaggaagagaaataatcagatcagaaagcttattgatgctaatggtaatactcaaacaaatcctccggctcttttgaacataatttcagactactatcatgatcttttcacaagtaatggtgttgatcaagcctctttggatacaatccttgacaaaatcccctccaccattgatgatgattcaagaaatctcatttcggccccatatactgcatcctgatgtatatgatgcactaaaaactatgtgtgatgataaaagtccaggcattgatggcatgtcagtgatgttcttcacaaactattgagacattgttggtccacttgtctcagctgttgttttagatgttctgaatcatggtgccgatccaagtacatttaatacaactctgataacactcattcctaaagtgaaaaagccaagtcacatttcacaatataggcctattagtctttgcaatgtcctttacaagcttgtttccacagccattgtgataagactaaagccttatctcccacaagtcatttctgaataccaaagtgctttcctatctcagagactcattatggataatatacttgtgactttcgaattattccactcacttaagaatagaaaacgaggttcaaaggggttcgccgcaatcaaacttgatatgagcaaagctttcgatcgagtggagtggctctttgttgctcaaatcatgatcaaaatgggatttggaacaacaattgttgatctcatccttcgctgtttgacatcggtctcttactcttttttattgaatggttctattcaaggccaagtgacaccatctcgaggtatttggcaaggtgacccactttcgccttatttatttcttatatgtgctgagggtctctctcgtctcttgcaatatgaagaagcatcaggtgctttataatggttgaaaaattccaaatctgctcctttttgtatcacacctgtttttttgctgatgatagtgtcttattctgtcgtgctaatcaacaatcagctcgatcaatccacagatgtcttcaaacctatagcaaagcttcaggacaattaatcaacccagaaaagtgtgttctctctttctcagaaaacaaaaggcagcatgaataggttttcttcaaagatctacttggtatgcctattcaaccatgtcatgaacaatacttggggctaccttcgtttgctggtagagataaaaagaagctttttagaggcataactgataagatttggaaacttcttagttcctggaaagagcatttattctctgctggtggcaaagaagtattactaaaagcggtagtacaagccatacccacctatgcaatgagttgctttagatcgcctgttactctgtgtcaccaaattgaaagtatgatggcgagattttggtagggatcctctgcctcgggcaagaccattcactggaagaattggaattttctttgtaaggctaaagttcaaggagggttgggatttcgcaatttcatacactttaaccaagctctcttggctaaacaagcttggcgtatcatcgagtttcctaactcccttttaagcaacctgctaagacatagatacttcttcaatggtaatttccttaaatttggtctgggatctaatccttcattaacttggagaagcattgtttggggaaaggatttactcttgaagggtctacgatggagggttggatcaggtctaaacatcaactataattagattcttggttgccaggacacactacaggctaattaatgggaaaagacaatgggatctgctatcactacaggctaatttcagtcaagccgacattgatcgtatacttaccattcccttaagtctatttccccatgatgatgttctggtttggaatcactctttcataggaatttataatgtcaagttcggttatcaacttgctgtttcacttgctgaacaagaagactcaacctgcagcagttcgattgaacattggtggtcaacattttggaagatgaagctccctccaaaagtgagaatctttgtttggaaaatctttcacacgtctcttcttgtagcagcagagctttatcgaagacatattgccacttcaccctactgctcaatctgtaattcttgtgaagaaacaataaaccatgctttgttctactgtccaagagcaaaatccgtctgggaattgtctaatttatgcattaacttcccaactttaggacaaagctcaggtgctgatatattacttcagctctcatcaacactttccacaccagattttgagctatttcttgttctttgctggagtatttggcatgaaaggaatgatatttatcacggtaatactgtccgaacaccagcggctgttgcatcatacgcatcatcgtatctccaagactttcaagctgcccgtgcaaagcgtacacaaacttttgcttcatcagctactactgtcaaagatcctcggccttcctcagaattcactcatgtacctaaatggacagctccaccccagggaagactcaaattaaacacagatggtgcaattgacaaagcacaaaatattgttggtattggagcgattctcagggattctgatggctttgttgttgctgcactatcgaagcctttcaaaggaaatttcaaagcagcgaaaatggaggctctaggacttgcactaagcctgaattggttactattgaataatctctcagtcgattacatagaaactgattcactattagttgtctaaggattaaaatcatcccatttatttctttctgcttttcatgctattcttaataatattaactatcttgtatcctttttcccacgagcacagatcggtcatgtttatcaatctgctaacacttatgtccatactttggttaagtttgctcttacggtggatgctgattgtacttggttggagacttttccatttccactaatgattcttatgtaattcttctgaattaatataatagtctttttctaaaaaaaaaaaatgaaaaataccgtatacaaggtaattctttttcatttatataattggctattttagtata

SEQ ID NO: 225716 - DNA, 2649 bp, Cannabis indica
gaatctttctaaaatttcctcctcatcagataagggatttgagtgacgggccaaccaatcaagctctaggagtttgttctctttagccgcctgagttatgaaaacaactaagtcagttgcaatggcttctttcacctcttttaaagcctggcactgcccccgtaggttaataagatcaatgttctgaaactttgcaatgaggccaggcctacgaagtaatcggtcatgaccaattccttgacctttaattgctcctcaagtaaagaccttgtactgaacctcttatatggctatctctacagttttaatacgctgagatggaagttctggcgaaagtcaagcatttacaaggaaaccatcagtaaaacaaccaaaacaaagttaatttaagaatgggagattaaggatgtgtgtcaacaatacctggcaactagaagtgtagctggagtgagggcacccttttcacatggaacctagaggaaaagaaccagtactctcggaggtcatgggttcgatcaatgtggctaatttggtagtaagagtcaggacacttgtctaacctaaagaagcccaacttctttttgtttgtactcatagggttagcctttacactgtaaaagtaaataatctcctatggggaaggtacttccaacttgttcatcttccaaaaaacacaccacccaaccaggagcctatacgacgaggggattaactagaaaggggctatcttgatcttagccatcaaagtcacaaaataggtccttaatcgaagatgtgctccattagagatgtggaactagctccaagcactgaatccctccacactcgtggatgtagactctctcatggtagacagcttgtgccacatcaatcctagaatattgtaaagaccagcaccatcagcatatgttgtcaacattccataggagtggaagcaattggcctttcgatccatatcacagatggagtcattgaaggtctgttcagcagggggtcttggccttcctttttcctttggatttcacagagggtccttcctctacgatgggttggatagtctcaagaaccatcccttgttgggaccttttagcaagaaccagagcttcgattcctcccacgagtgcttcccctacaaggccagcaaccacaccttcaatggctttcacgatgcccaatttaaaatcctagttcaggtccatctctaccaacataaaaactaagagaaaccaagctttttgaagtaaccagcaaataactcaaaacgaaaaaattgccagagttgcactccaatcgacaaatccctaaggtatatatacatgcacctatgaacctcaagtaaccaaaaaaacacccagatagttttagcctccttttttatggcaaggcgattctcagacagatctacccctaagatatgaaaaattttcacaaagtctttttcactattcaacatgtaaataagtcctaatcctagcttgaacaagaaatttctatcaaagatacaaaataataaaaattcaacaaagagttagagtacttacgtgttgagtagaaagaagatggattgctgttgtaaaatctcgtctggagccttcgaacccagtcaattaaactatttcaactagtctggaagtcaaagccttcgtttggcaaggggttcaggtggtcaatttgaagagggttttatatctggaaaaaagcctcatgcaaagatttagcagtaattgaatcaaatgctcacactcttcttacattcactagcgaaagaacaacgagggagagaatttgcaaggaaaattcaaagtctggtagaggtgtaatatccttgaaaatataatgacatattttattaaatatgtgattatgtgggcatttgagtaggattataatcttacttaagctaattacgagttaattagtaaaatatgaataaacgaataaataaagcataatttatgaattacagagattttattagattatgggggtattgtagataccattttcaaaataaaatatttttcaggtgcagcggccgtggaaactcgacagagtgattagaaatgtcacgaccatataagatgaattgtattggaattatactgaactagtttagaattctaaattgtcggtttggtgagattagttagaaaatgatcaaaatacctctaggtgatattatagtctaagttttaagggagggggcagattagtcattttgtaatgttgaattattttgtcttctagtgttttttttttatttaggctgaattctagattaatattaggtttcttattatttattttattttaccttatttagttaattatttagaaataaggagataacctaaaaaggaagcctataactttctcttcttcccttcttctttcgacagccctagaaaccctgcataaaccaaggattttagctccatttcaaacaaaatttgactgaagtagtgaggtctaaaagttgttcaagcttggaggtaagatccttctctttgaattttcaaggtttaaactgagttttggttagggttcttggggtttcgggtcagtggtgttgagttaagttcagagcatgattttgggtttaaattaggcttgcttagttgtgaattgaatgattaccatggctgttaa

SEQ ID NO: 225717 - DNA, 2274 bp, Cannabis indica
atgaaatctttgagtgaataaatgagagatggattttgagatttttattgagcgaagcttttgggattttttttgagtgaagcttttgagatttgagtgaagcaagaaagataaattcagtgggttttgagtttcgaatgaaagctcaaagagagaaagaaagggagtgtaaaaggtaagaacctttgaaagagaaaggcagaagccagaaaccagaggcagaagccaaaagaaaaaaatctcagggagaaaatgaatgaagagcattactcaacatgagtagcccagcctttatttatactaagtagtttagtacaaagcagatgaacaataacagaaacttaactaacagaaataacagaaataaaagaaataacagaaataacaactaacagtcaagtaatcgattccaacacatgttttaacatcccaccccaaatcaaatagtctcaaaaacgtgtctcagacattttgagtttggacttaaggtataggaatcgatctgtagatagggacttcgtaagtacatctgcaacttgatctgcagcagggacatatcgcacagacaacttctttgacaaaatatgttccctaacaaagtggaggtcaatctctatatgcttcgaccttgcgtggaagataggatttgctgcaatggcagcaacactctgattatccacccacagaattggacatgaggaaggtgaagcttgaagttcaaagagtagagacattatccacttaatttcggctgcagcattcgcaagggacctgaactcactctcagtactggatcttgccacaacattctgtttttttgctgaccatgacactaaatttccaccaaaaaacattgcatatcccccagtactttttctgtcatctaagcaagatgcccagtcggcatcagaatatccctacagtgtgagacactcagctggtgtgatatgcagtccatgcgagatagtacctttgagataccttaacacccgtttgcaagcttcccaatgggaagtagttggggcatgcaggaactgactaagcttgttgattatgaaagcaacatcaggccttgttagactcaaatactgaagggcccccaaagtgcttcgataaagagtgagatcagaaaatggttcaccttctgtcagagacaattttgcacttggactcgacggattaggacttggcttagctccttccatattcactttgacgagaaggtcactgatgtatttggattgtgagagatgcatcccagatgagtccctaaagatttccactcctaggaaataatgtacagaaccaatgtcttttatagagaagctgcgatttaaatcttgaattagtgtgttgatgaggttcgagttaggtccagtaacaagaaaatcatcaacataaactaacaagatgatgagattgtgtccagtgccataagtgaacaaagaagtatcagatcgagatgctacaaagcccttctgtaacagagtgtctttcaaggtttgattccaggcccttggtgcctgtttaaggccataaagagctttgtgtaacttgcaaacatgtgttggtttagaagcacatacatgaatccttcaggttgagacataaaaacagtctcctcaagtgtgccatttaagaaggcattgctcacatctaactgcctcacatcccaactattcgacacagcaagagtaagtatgatccgaactgttgcaggcttaacaacaggggagaatgtctcctcaaaatcaataccaggtgtttggagatagcctttagcaacaagcctggatttaagtctatccaatgtgccatcagcattgagcttgactttgtgaatccatttattccctataacagtcatgcctgggatatatggtacaagggtccaagtgcctgcttttttaagagcagaaaactcatgattcatcgagtttaaccactgcggatgtgcgagggcagctgcagtatttctgggttcagagggaataagggcagagggtagaggatatttggtagctaggtaagattttggtttgaagatattgttttgagaccttgttttcatgggatgtgatctggtagggacagtagtggcaatgtgagggactgaagcagctggagtaacatcagtaagagtggtgaggggaggattttctggtgtgggatcagggttcatttctggtatgggtggtaagctagtgattggaggtgtagggactgtgggaggcacagtagggacatgggaaacatgtggcactgcagatacac

SEQ ID NO: 225718 - DNA, 1967 bp, Cannabis indica
ttaattaatgttgagcaatgaaggccattaaaggttcaaacacagcttgtctggtattgttacccataacaaaatccatatgagcataattctccagatactgtactgccaacttgtccttgtcatgatctttaatagtctcaagtaaaacctccacatcttttacatctgaaagataatcattctttccatagctcatgaaaagaggaaaatcctttggaattttactcatgtcgtatgcaggaggagttgcctgattatattgcttcatattttccgatgtgttataatcgtactttcttattgttccagttctgatcactacgtaaataaataaataaaatatatatatatatgtatatataatgattaactagtagtgatggttttgatcgtacttactctgagaaagatgaaccaaattcttcatggaggttggctgaagttgatgttcaacataacgttctattgtcggtttatctatacagcaatttgggcctatttttattacaacaatttaattgggagaacaaaaatcattagtttattatttaataaataggggcaatatagaaaattattttaattaaaaaggagaaacttgaaattaacatttttaaaattaattaacctgataaagcagtctcataggagacgcagtcaatgccttgtaaactacatatatatcccaaaatggtggcaacttccttgctattaatgtgttttgaaaagaaaacatatcgttaatataaacattataattaatcatctataattcggtaaatattattttaaactatgtgttttataaaaattatcgatttaactgttttgttagatgtcaaaatgaattctgtatttttcagaattataaaaataggattcagagtttaatgttttacaatttttttttttaaataaccgatttgaagacaattcttaatacaaacaaatacataaaatgtaaacatttatgttatagcgcttttagatcggattataattaaattttattttgacatttcaattcacggtcctatttgtactattttagaaaatacagggtcaattttttcatttaacaaaatagagagtccaattgataaattttacaacacagggtccaaagtaatatttaccattaccaatcataatttgaatattgagtaattttttttttcatttttaaagtggccgatatatattgataagtagttatttatatactatacaaaaagcaagtaataattaaatatagttcatgtaaaattgactaataatcactaataatctcttttcttcaacttagatcgcataaaaaattgtattatattttacataaaaataaaattttataatatatgtggaagaattttaaaaatgctttcacacataattcaaaattttacacaaaatttaatatttcattaagacttctataatatttatagaaaatataaaataataataataattttgtaagaagtttattatttaatatttataactaaatataattataataacataaaagtaaatattcatacattgtgataaattttgtgtcatgttattttgtgtctcgaatttgacatattttttactgttgataaatttgaaacaatttttagtatataaagatattattttaagaaaatagtggattatatttttccaactgcatttgtaactccattcttaccttgacggatcaaactgatggatgcccaacaaattgatggatgtctgttttataagaataatcaaacaataattattattatataagaaatgtacaaaagttctacattattgaaaaactatttaaaagtgcatacttaatgtagtatataaataaagctattattttttttcactttgatttgtctcaatattagttttcttgagttttcttgagtgattattaatatcttatccaatttgttatagaagagatgcttgtggct

SEQ ID NO: 225719 - DNA, 2162 bp, Cannabis indica
tacaaataaaagatcagtggcgggcggtgagataaatggtcggttgcttccggttacatataatatatataaattataaagctgtattaatttgtggtcgtcatcatagatcaattaatgacttggaacttcgaaactgacaattatgagtcgtttatatatttttgacattccaaaaaaaaaattactccaatattttttttttagtcgtagattatagttgtttaagagaacttttgaaattttaaaatattcaaaataagttataatataaaaagtaatattcaaacaatgtattttacatgtatataaaataatttttttttatttttttatttttacatttcaaaataatttttttttgtactttttataaaaatctacataaaaatttatatagcaactaacggagcaatttaaattgcaaccaaaatatatgtaacaacttacacagaaactaccagagcaacccaaaccgtaaatttagaaaaaaaaaatataaaatagtatataggataatgccactaaaataaaatagtcatatgtactgacagattgaaccttgtttttggcgtgttaattttttttagaatttcttaaaattttagaaaatatcttaaataattataatgtacacaactatacaaaaaatgggactaaaaaagtctctcaaatactgaaacatatatgagtgcatcagtggaccacttttaggtgatgcattatatggaaaattttacaataaacctcttgaaatgggtccactgatgcactcttatctgtttcggtatttaaaaaaaataattctaaattttgttatggtcgtaaacattgtagttgtttaagacatctaacgaaattttaagaaatttgaaaaaatttaacacaccaaaaataatattcaacgagtctattacatgcgtgacttttttattttatacgtgtatgaaatacattgtttgaacattaatttctatattgtaataaattattctgaattttttaaaattttacaagatgtaacatatacaattttaaaaaaatgtagactaaaaaaattcttataaataccgaaatagttaaagattgtattaatatatatttattttagtagtgaaatatattgtagaagcaatatatatagataaatagattagaaaaacatttaaaaaaagtatatgcatacttagaataaaatttgaataccaagtctttttgacttacaaaaaataataataataaaaaatactaagtccttttcgtaattactaataaatttttttatatttttaattaattaatattcacaatgttgacgaggaagatgtgttctaacaaaaaaacaaacaagaaaaaaaatattttatttagcaagataacacgatatcttgattacattatatataatatatatactagtacaatttacgtgctttctaagtgcaatttatgaaaagtagaataagacggtaaataaaaagaaataattgacagtagaaatataatttgtacattaaaaaacagaaagtacttacattcaaaaaatcttctgagtggttaattttttaacggcttggttttgatttggtttcatggccatatcaacactagtattaattagtagaaataaatgtaatttctcattatatatctaaaattaatatgccaataataggatcaattcaggagataacgtgcgagggttaaatggttgaatgctggggacagaaacacaaaattttttcataaacatgcctcttttaggaagaaaatgaatacaatcaagtttcttaaaactgaggatggctctgttgtgaatactcatgaggggattgtaactcttatcactgactattttcaaaacctcttctctacccaaggcagtgatgtgcatgctgcttctgctatattttcctatcttaattttgggttagaggaatatcatgtcagtttccttgatcaagattttactccggaagaggttaggagagctgtttttcaaatctctggtgataaagctgtaggtcttgatggcttcaatgcccatttttaccagaaaaattggtcagttttggggtctgattttactaaggctatcttggattgtcttaatcatggtgcggacttttcctcgatcaattcttctctcattgtccttattc

SEQ ID NO: 225720 - DNA, 1629 bp, Cannabis indica
gaatttatacattaaatataatcatgaaataaatcatgtgaaccatgcaccataaaatgatttctcatctttattaattagtaaatttgattatattaaaatggattttatttagggcacaaaacccaacagttgggatgttaagggcctaattcgtaggtagctcacagctcacgtataaggctttacagggagtcctgccaagccaatcctgaccggccatcaaagttctgcagaccgttgaggtctggccggccatgcccctgccaggacctggcaggtcatgtgcctgccaggatcttacaggtcatgatctatcaactttaccaagaggaggccagcctttggcaagtgggggatagctttgtacaactttcccttgtagatgacatgttcttttggtcgaatggaagcccctttatttgaaagttactttttggtcggccaacttgggccaagatcctggccgaccatacaagctcatttgaccggtcataagcttctcttggccggccagacatgtaagtacatcgccttgatggctcgcttcactcctttcggttgttgcttgaaaattttgccatatcttgtatggagactttgtcttgctactgataaggttgtatttcacatgtactttgtcttggcttatgtgaacataccacgccaggtggacaaaatttaagataacaagattgttgaatagtctattaataaattagacgacttgttagaaaggtacgagaaaaattaaatgttatattatgattatatcttttgacaatgacaataacatatgaagttttcttgtaccttttatattatacatattattaaatttatgatagtgattccgaagaaatataaagtttgataaacataatagtgactcttaaagagtatatatatattttggaaaataatataattattttattcgtgtatataaaaataaacttgtaatggttagttatatgttacagtgattttacaaattatcctacaaaagttttattgaaatacaaattatagtgaagctaaagttcataaattaagttattttgacatgatcaatcccacacaataatttatcaaatgatatgactaaattttgttaaagaaccagaagattcttcttattttcaatttataaggctttaaaaagaatgtgcatatattttgcacatatagaaagtaaaagtatactttaatattttcttaattttaaaaataatatacatataattttatttagtttatcttttatacttatttgtaagacaaaattatatttttattgataattatttttctaatttaatttatttaaataatgtcaatttatttatttttctacaaaaaatatatattaaattattgtgaagaaaatatttggattatatttctttagaaatctttcagccattattagatgtttattatatagcttcttattgatgtgataagatcatatgatcgtagatttttaaaatttataagtttatgtatttctaattatacaaatatgacttattcttataaataaaataaattcttaactatatttattgaacccgaagttcaataaatataatatatatatatatatgagtttaaataaatattgat

SEQ ID NO: 225721 - DNA, 3157 bp, Cannabis indica
gtatttgaatttcattaaaaaaaagttatgaatttgatttaaaaaatccttttgaatgaaccatatatattaccaaaaaaattcactagatacaagatactgccagttaaaaggatcttctatgagtagttttggtaaaagaatatgacaaaatccttatgaaatcagcacctagtatttttacttatataagtagcattttcattaaaattagattgtatactaaataagttaaattcaattggatttcctgcagttcatagatcttttaaaacctataaattctcatggcaaatactaagaaattcactacttgcaaatactaagtaattattaataattaaaattacaaattattaaacatagataatagcaatggaattaggtggggtagtcatgaaaaggtggatggtggtgttgattgtggtggtgggactgatgttctttgtgggaagtgaagctgttagagttcttgatcagtgccctaaacaagaagtttttgaattcactatcaacccatgcactccctctgcatgtactcaggaatgcaaactaactgttggtcaatcgtttttgaaggcctactgcaatgctgacactctctgtttgtgttatggttcagaaccatgccactagacactattacgaaacaaagcctttataattatgtcatattgtcactcaattatgttgctttttttttacaacaataaacattcaataaaattttattatttcattttcaagtttgcaatatatgattgttttttctattttttgagattaaatattagtcgtgatcatttacatatactgataagagattatcttcacgtgccaaatgaacaagtaattcaattagtttaatgtgcaaaaaaactatgacttggccatgtttctcatttaaagttttttaacaccaaagacaacagcccgtacatcatttaaaaggaaatctagttaatttagcatatgtcagtagtaggatgttcagtattttgtgtgcaatcctagagaacaacacagaaaaataaagacaacaacagagaaaaatcagagccagtttgagtgagatcctccgagagtgttgttggtgtgttcttgtaattgaaaacaaagagagatttgtaagtatcaaaaagagagaaaataagtgagaaatcataaagttgtaaatcaaatattgtaacctgattgttgataaatggattcaagctttgagggcttgacggagacgtagccgatattattgggctaactccgagatcaaattggtgtctccgtctttaccatttttatttgtattctctcatctcactcttattattcattctggtatttgtatttgtgtgagttttgtgttcttgctattttcggttttggtgtgttgagattaaaggggtgtgttttttgggtttagtattttcgggaaaaagaaaagaggagtaagaaaataaaacttagaaaaccctaactattttgttgcttccatttagaagagaagataaaaaatttaagaaccctaaccctagaaattgtgtgcggttgtagcaagaagaagaaaagaatataaccccataaaccctagctgtcatttgtgttttgatagaagaagaagagaaagaaagaaagccaaaaccctagaatattatttagtggtaccgtgagttatgaggaaaaagaagtatatttgaaattctttgagagggaaatagtgcagctgccgaatagtgaagtattagggtttgatcaagaatgagtcttttatattacgatattagggtttccttagattgggctggtatatattgttattgggtcgaaattaatattaaaaggaaaagagttgacctttgattcgacagagaatattgggttgatctttattcttgttgggctactcgtgtatgacccattttgagtagaaagagaatctttgacttgtgttgactctttgttgttgggctctttgtgtttgggtctgaaagaactattgaaattgttatttttaataatactaattattttgtggatggataaattaataagtttagaaaaataccatttcgcatattgtactaattttgtttctttgaactgtgctggacaaaaacaaaagctgcagattttactttaaaaattccaatagtggtatcagagctaattaatttctgtaaaaaaagattcaaattaatacattcaagaagtgtaataaccaaaatatttagttattattttctattacgttagtctagatggctcgatgtggaaatagtgattgcataaaataagttagcttcttaaacataatagtatttttcagaattatataagatgtgtgttagtctcaaaaataataagaatatgagtattattagaaatgagttattttcggactttcattaactattataggttttgaattatattctttacgaatttggcttacgtaattaagagttattttgatatttaattgtgtaaataatggtaaatgttttaaaatttttatttatgttgcattaagagtgagagagtcagtagatagatcctaagatactagatgtgtgtcttattaagtgataaggttgattgacataaatttgaattataatagtaaatatttagctagcctcatacgtgaattatatgtcatggttagttagattaatccaatgattatagtgaagatgtaatttgtatacaactaggcacttttaaatgaatatgattaattaggagtcatagagagagagagaaaaaattttggtaacagaagaaccaaatcttatcgtagaggacctagagaaaattttgtagtgaagtgacaaaagatttattccttaaattttgggaagtagccatatatgtgtaacttgaagagaaaatatagtaaaaatagttgatagtttgaatagaagaaaagtcaaatcaatcaaagctgtactcttcttggctatttgaaacaaactctccacctttggaacaattctttaaccgaaatggcatctagtaagttctaggataccatgtgtcatctggtttatttcttcatatatttaattaatggttcaactctaataatagcatatttagtggaacgtgtatgtagttaacttgagccttataaatatcactacactcaacacaaatattg

SEQ ID NO: 225722 - DNA, 1538 bp, Cannabis indica
ctctgtaattttgttttgcctttggttatttgttggtccttgtatttaatttgcatcttcttataaatggttaatgaacccctcaaatacctctctttgagttgagttttattatctgatgttaatagggatgtaaatagggcggggcgggtgcgagaattgctcccccaccctcatacccactttttaaatttacctcatacccgctccaatacccgtttaaattaaagcaggagcgggacggggattactcgacaggggaaggatttaagtggaatagtatatatagtaaaaaaagtctaaagcatgaaattattttaattgtagtaattatgattttaaaacttaaatatatatacatatatcatatcaggcggatttggggtgggtatctattcccccgtccctgtcccgttttcgactcgggtatgaatctttaaaccgataattgccaaccctagatgttaaaggcacctttctttacttggcatcagagatccacttacatttgttcctgtaagagttgcaactggcaatagtttacctgaatttggtatgaagatgaaccgagtatgatcattggattgtctatgaccaattgctcatgggatgactctatggctctatgacaaaaatcatagctacagaagtaatggaatatgcacttctagtagatctccttgaacctcgcttgggaataatttgtatggagttcattcacgtgtaaagatggatgatctgaggacatacctttaaacaactcggaagggataaatttcaaaaatcacacatattcaagtaactcaaatcttttaatccagtctcagaagtatataaaagtacaagagactaagctaattattaacactcaaatgcataaacacattttgtcgaactaaaaatagcttgaaaacaaactaaactatttgtttcgaagatcacatcacaccacgtatgacgatcatgatccaacaaagattaattctttgatctccgcaatctccaaaaacaatcaaattataattaaactggaaattaagaatacacatagaagaaaaagacaaaactaacccaacaaacacctttcaaaaaatctcaaaagattattaataatacaacacatcattattgaaataacaatctagcttaattattactctcatgatcactgcagctttgttccaacactgtcataaaaatactttcaaagtgtttgatgtgatgagtctgaagagagatatgtacacaaagatctcctttttgagtaggatcatcataaatacttgctcttccttcactaactgaaattccacaaatccccaatgccaaaccccaaccaaaatcacaatcattaactggaaaattagcccaactattaatcccaaaatttggtgacttacatctcattttaagctcaaggcgttttgtattaggattaacttttaaaaaatcaataacagatcttaagtaatcatcatctcttctcatcaaactttcatgtacaagcccaactgcataccataatggctttgattgaa

SEQ ID NO: 225723 - DNA, 1935 bp, Cannabis indica
gatatctaccaaatcatgtctctcaaactttgatatgtactaaatcatgtccccttgaactttcatccatgttagaatttttttacttaaaattagtacaaaagtttttaaatttaacaatattaatagttcggggagaattttaacggtcaaaaaagttcatgggatatgatttagtacatgtcaaagtttgggagaatcattactaattaattagtgtaattactagagtagtaattatatagcctaataattgttacactatattttaaaatataagtgtatttagatttgaagtgataatgacatatgaatttataatattttagtttatcaaaataataagtagttacacttttttttagtggttaatatttaaaataatatgtttttactaattactcagtttaattatacatgagacaccatgagaattggagggagtataattggctctaattacacaattaccatgtaattatacacaattaccatgtaattatacagtctaataagtatgtttaattataacacgtcccaaaattatgtattactacagtacaggatacaaattagtaatttatcaaatttcaatgtataacatagagatttatataagatatacttcttcacttgtgttgctctaccaaaaccaaaccaactatgtcttcatcccaaaacatcgaacacgtcatcctcttcaagctcaaaaacaatgcggagacgtccgaagtcaacaccatggtcaacaaaatcaagggcttgcagggcatggacgaagtcctctatctcaccgctgcaccactccgatcatcatcaaactccacctcactcgccttcactcacgtgtcccacagccgcttcagatccacatccgaactcagcgcgtacagcgtacacccgctccacctgagtataaaaaaagaaaccaaccatctcgtcgaagatatgctcgcagtcgattggttcaccgacgcgttcggcggtgaccgggtgactgtgcctcccggctccgccgtgcgcgtgacattttggaagctgaaggaaggtttaggggatgaaacgatcagatccgagatttcggaggggatgagagaaattaaggagaatttaggagaagaggtgagtgagtttacttatggcgcgaatttctcggatagagggaagggatattcgatggggattctcgcggtatttcggagtgaaagtgaattggaagcaggggatgatgcaaagcagtacgagaagttcaatgagtatttggatttggaagctacactcgtaatcgaatttgtggtcccgtctcaatagttggccgtgttctaatctataaatatcagggctgaactttgggtaagtgctactactgtaatgttaagtgaaaatgagagttaagtaatttaataatttaaaatgttgttaaattaccttatgatgaaccgtgtatcaagtcacatgagcattgtaatagtttttgatcaagattttactacttcagttaaatgatcctaatagatgactagggatattttagtatttaagtgttaaagaaagtgattttcaaaataaataaagaaagaatgaaagaaaaggtaattttcatatatatagaataattcataaatttactaatttataacaacaaatatacaaaaacaaaaaaaaaaaaaaaaaaaaaaaaggaaaaaacttgataagataatgattctaatgtgaaagtaggagttcgagttttactacttttggttctcgagagttttaattagctacatagaagtagaagttgagaaagagatgagtgattctcatttatcaagaatgaatgaattacaatgtgtatgaactattatagactaagacagctcaagagagtaactaatttgttacagaaatacaccataagtaacactaactaacaactctcactctaacaga

SEQ ID NO: 225724 - DNA, 2361 bp, Cannabis indica
ttataagcgatgaaggaagtcatgtctgcaacaagaatttgaagctctacttgcaagatatggagttcgtcgtagaacagcacttccttataatcctcagagtaatgggcaagcagaaatttccagcagggagattaagttgattctggagaagacggttcagcgttcaagaaaagactgggctaaaaggctggatgatgcactatgggcttacaggaccgcattcaaaacaccaataggaatgtctccctatatgttggtatatggaaaggcttgtcatcttccagtcgagttagagcacaaggaattcttggccatgaaaacattgaatatggacttggcaacagcaggagaaaagaggctgttacaacttaatgagatggatgagtttcacaacgaggcttatgaaaatgccaagatctataaagagagaactaagaaatggcatgaccgaggcttaatcagaaaagactttcaacctggggaacaagtcttactctttaattccaggttgaaactatttccgagtaagctaaagtcaagatggtcagggccattcacggtggtcaaagcattcccatatggagctgtggaactaaaaggtgaaagcccagacacttttaaggttaatgggcagcggttaaagctttacttgggaggtcattttgagcaagccaagtccgccatgattctggcgcctctttgaagaaatcagtcaacgtccggctatatgacagaaaagacagcgctattgggaggcaacccaacacttaatggtgtttttagttgaactttcttattgttttttcttgttttttgttggtttatgttcattaaatttgtaaacttgatattggttttatgtttgtattgaaaaaaaaaagaattttttttctctgggcattgcctactggccgcggcgagcccaacctcagtcgtggccataaatcgaatggcagaaaggcctatttttcaagactatcttgctgcggcgagcccagccttggccacgacgataagtcgaaaaacagagaggtgtaaattttcacaacatctcgccgcggcgagaccacctttggtcgcggcaagagtgcccagacgagtttaaaagggcaatgcgattttttcaaaaatcaaaacctcctttctcaaccctaacctcctcctcctcaacctcttcaaccataaccaaatttcttcaacctcttcccacaaaaaccctttaatcattcatccccaatcactctacaacaccctttttctcatcaatcactcttttccttttaaaaaccacattcaaatccctaaccttcatccaaattcaagaaaattcactattcatcatcatctacctcaagaacttcaaggttttcttcaatggaggtagaatgaagaaattctcattgaggtaaacaatttcttataattatctatgcaattgtaatagataattttgatttttggagaatcttgtgaaattggtgtgatttttgggatattgtttgataaattactgtggaaagttgtgtttgagtaacattgtgaaatttttgattgggttttcacccggaaagtggaattttaaggggaggtgctctcaaaattttcttgaatttttgggtgttagaaattttgagcaagaatgggtcctaaaagagcaagagtgaatgaaagagggggagcttcttcatctaacccacctaggtcatcgggccgttcaaatgttgatagggctaggtttgtgagttctgaggcacaagagcgttatctacaactcaaggataggccattcatagaagataggggcatggaaattgatgaccttagacaccctagaattggcattccttctgtatttgagcccattagagagcaagtaatcaataggggttggaaaaaatttgttgatattactgagaggaataaccaaactctagctttagaattctttgccaattggccagaaagagaggatgaaaaagtaaaagttaggggggttaaagtgccggtttccacagcagctatccatgccatatatgacttgccaactttcacctgggaggaacaaccactaaaaaagcttattcaagaaaagagattgaattatgatgaaatacctgaaactttaggttacccaagtcttaggtttcatgaatacgatggggaaccttatcagttgtataggtgtgaattaaacccggtggccaaggcatggcaatatttcatgagtgctaggttggtacaaaataagcactactctgatgctcaaatagacaggctgaaatttgtctatgccatcatgaagggttttaacctgaatgtgggggatataattaggcagagttttgatactatggttga

SEQ ID NO: 225725 - DNA, 2405 bp, Cannabis indica
cacaatactttttgtgactaaaactaaattagtaacaacttgtgcctaaatgctatattttagtcacaaataattttttgttattactaaaagtcatattttgtcacaaaaaattaatgttgtgaccaaaaagttgtcactaaaaaagtaataattttttgtagtgaatatttttggattaaatcaaattcgtgttaggaggttttcttgtgggcgcccatgttggaagtttggtttagaaattagataaataggatataagtagattgttctatctcaaaacttattaatagtataataagtttataaattgtacatattaattatgttttacatatcattaatatatataagactctctaacattatgaggattataataaacaaagaaaatgaatatattgcagaaaaaatatagtaaatgaagataacatgcacggttttgatgcttattcccaagactaagtgcccaaacctggttagagactatcgacctattgcgtgttgcaatgtactttacaaggctgctacaaagttgatttgcgcaaggctcaaaaactgtcctccctagtttaattgctcaaaatcaaggaggatttgttcaaggtagatttattggtcacaacattatgatttgccaaaaccgtatccgacactatggaaggaagtttaaaaaagcaaactatatgctcaaattggacctccaaacgcatatgaaactattgaatgagattttattgaagagatgctttacgcttttcagttccctccaaaatttattaagttgattatgacttgtgtgagaattcctcagttctctttgatgtttaatggctatttacatggattttttgaatccaagagagggttgagacaaggagatctgatgtctccgcttctttctgtcttaggcatggaatatctctcccgcatcatgcagaaaattaggaagaggtaagactttatgtttcatgatctggtgacttgaagctaaatcatttgacctttgcggatgatgtactactcttttgcaatggaaattccaaaagcatctacctcatgctccaaggctcaaattattttcacaaacttcaggtttatttcctaacccatctaaaactgtcttttattgcaataatatgagtgactataaggttcaaagagttcttgatgcttcgtgattcaagaaacacgatttacctttcaagtacttaggtgttccaatatgtcctacgagaatctcaacagcagagtgtggtaccttagttgaaaaaatggtggcaagaataagaagttggagtacccaaaacttgtctttttcagggagagtggcgctcatcaactcagtgttgatggccattcattcctactggtgtcaagtcatgcttttgccaaagaagattgtgttggaaatagaatctatttgtcgtagtttcttgaggaatggaaatcatatacttacaggttcaatagtaattgcctggagcacaatttgcttcactaaatcttcaggaggtttgggttttagaagcatttccgattggaatatggcagttatattcaagtatgtttgggccattgctaaaaagaaggacaacatatgggtgaagtgggtgtacaatgtgtagataaaggaggagaattggtggtcttataagaccactccaacaaccaacttgtattcccacaaaatggtagctataaaggatagagcaaaatagttgtttgacatgaatcaagcttcaaatgacagctacaaagtggttgttggctttcatgctcttcaaccttttcactagcaaagttgattggagttctatagtttggagccgactaaacttacctaaacatagttttatttttttggcttaccatgctgaatagactcaagaaaaaggatagattgcagctgtataaaccagtcaaaaatacaaggtgttttttctgcaatgctaatgaagaaatagtgcaggacctctttttcgaatgtcccttttctttgggctgcttgaagaagatcaaagaatggcttaattgaaagatggctgccaattcccttcatcgaattgtaagattgatccgaaaagttaaggttagcaaggttaaaaaatgatattagctgctgtcattgcagctcttatatacaatgttggcatgctagaaatgatgttttgtggcaaaactcaacaacaagtatagatagtatagttatcaaagtaaaagatatttttaaaaatagaatcacatgtacatggccaaagaaaacaaccattagtgataaaaaatggtaagacaccttgtaaagattattcttgtataggtttctccttttcatggagaatgctatttatttgtacaaaagagttttaagtattgaaacacactttcaatcaaaaaaaaaaaaa

SEQ ID NO: 225726 - DNA, 1467 bp, Cannabis indica
catatccagcaacactaatgttgctgtaaccatgataagcaattgtaaatcatgccagcacattaaaacacaaaaaattattcattattaatttgcatgctcaaatcgcaaacaagtttattacagacaaaattaagtcttaatttagaccaaaaataatctttaaattataattaattatatattcttgtattaaaaaaaatataaatctatataaaaataattacattttaataaaatatatatagtttataaatttatttatgtagaattatgaattttattttaaattgtaatacatgtataaaaattgtatttactcaaaaataattttattataatatagtattaagcattatttattattgttgttgttatatttgatactttttagtgttttgattttttttaatctagtgtatttcaattgaattataattgtattcttaaatagagattctattgtatttatttattatttgtggctaaccaaaagtctagtgagataattagagtctgtatgactgcatttttaatttttagttttcaaaagtaagaacagaaaactgttttgtatcattttaaaattttaatagtgtttggctcagtttttttagatttatttttagatgttttttttactaaaaaaattaatattctacatcatgctatgacatgaacccatccaacctcggactcagtcctaagcccagacccagacccgaactcgaatccagaccccgatcccagacccaaaattgggctagggtccgagtctggtcggggttcggggtacgggttggggttcgagatccaagtcttggtccgagtcaggttggggtctagggacagggtctggtgtttagaattcaggtccgggtttggattcgggttcgggtttgggtcggggtctaggatttaggtccgggtcgagtctaggttcgtgcttatggtcggggttcgggtcgaggttgaggtctgagtctaggttgggattcgggttcgggtttgggtccaggtccatgtttgggtctgggtcagggtctgggtcggggtccaggtctaggtctaggttggggttcgagtccgggtccaggttggggtctgagtccgagtccaggtttgattttgagtttgggtctgggtagaggtactctggggttcggggtccatgggtttgagtccaggtccgagtttggagttcaggggtctaggtccgggtccgggtccgtgtttggggttcaaaagtccaggggtccaggccgtccagggtccggggtcttaggtctggggttcaagggtcggggtctaagtttaggattgggttcaaggtctggggtctgggtctgggttccatggtctaggttcttgggactggggttctgggtccaggttccatggtccaaggttcgaggtctggggtccgaggttaggggtccggggtatggggtctggggccgaggtcta

SEQ ID NO: 225727 - DNA, 2102 bp, Cannabis indica
atggcatcatcgctaactctgtttgtcttgaaagtctgacatagctccatgaaattggacaaatgcaaatttggatctttagaaggtaggccaccaaactcgactgaagactgcaccatttggagtatggctggctttatctcaaagttattggactccacgacaagttgtcttatacaagactgaacccccatcaatgttggaagaacatagtctctcaaactatggtcgggtggaatacgactgttagcttggtcttctacggcagctctattattatcgttgttgccgccatccttaccaccattagcgttatcagttatgacttcttctgtttcaactcttgttgcgcttctttcttgcagtttgtttctgctgtctcttctacaagtctttgtcaattttaggatcaaccggcagtattacactttgtcctagatgacgcatgcaccttcgattcctgaaataaaataagataattttaaaagaaccagattagaaacaagcaaaaggaattaaccaaagtagattttaatctaatcctttgtaatataaatttttaaacaattttccgacaactacgccaaaatcttgttacgaaaaatatgaataatacgcaagttcacataatcaagtagtactcccataggtgaggttgatctgacagggaattgaaatgaataccactaaattagacttatatttctattttgcaaacaaataattttatgattgaacataaagattaacaagaaaataaaatccaacaataaaaagatttaatcaaagatgacaaattagggaaaagaatcttgttgatttaactacccaattattaatgctaattactactctctttcttaatgtgaatgacagattataaaaattaacctaactcttgtcagatcttttaggtcctaaatcacatgttatctaatcatctttgaattagactaacatgtaatcaacattaagcaataatctaaatgtcacaaaggctatgtaaatactttcatttcacatcaaaacctagtttatccaattttagcattcccaattctcacttttcagattttgaattgggatcataaggcatgcaaaatgtgatcaatcttaaacatgtaattaaacacaaatatggataaatttcagaatcaagaaaggagaaattggaattataattaactaaagataatgtcaatcaacattcatgatcttccaaaataggagtttagttcataacatacataatcaaatccataattaaaattgacacagaaaatagcatagaaaaattaaagagagaagaaagaactggttggagagatcgatccggattgccacaagccgctcttgaagtctcctcctttgtttctagggctccgattctgaatcccattaactttgcatggattcccatttaattaaaccaatccttctctttaaaatttgtcaaattacgaaatttcccaaaaatcccgtcattaaggcttcgctgcggtgaaggttttcaacaaatttgcaaaactttctgcctactcccttcgtggcgaagctttttcaccatcactgcgggattaggcagaaaagttccttgtttgttttctcctcaattcattcatctcttgtcctcaattcttgtaaatactttctttaaatatctggggacctgaaacaaaagaatgaagcgtaaaatagccctaaaactagaaccaaagagcgaaaactacccgaaaatacatcctaaaacttagactaaaattagcctatcagccattacctagaaacgctgaccattgcttgatgtgcaacctgcaggctggttggcaccttatgtgcaacctacagaacctagcaggcacatgactggccagactctggtagaaatatggtcggccagcctttgtcttggtaggatttttgtgagcaactttcatttatggacagcaagtcaaaccacaaattgggccttaacaacccacaaaagtagagggaaaatatcaataaattttctattttcaatgggcaatttagttatttgtattttattaatttaatatgtaagtaataactttataaacctatttttaagggatattagg

SEQ ID NO: 225728 - DNA, 2983 bp, Cannabis indica
gtaggatgctaaagtaacaatgctaggtgtggtccctagtattgttcgatcatggaaaagtaccaattgtgttagtggctatgattggtccaccatccggtaaagaattataatatattttccaataattcttatgtatgcacataacatcagtctagattttacgtattatatggatagttaaaataagttttatatcccttcttgtagttgcttttcctcttctggtgaagcatctaatgtagatgaatacctatggttgatggggagagcaaactacaagcctgttatcgaaatgtgtggtggcacagaaattggtggtgcattttctgctggctctttcttacaagctcaatcattatcttcatttagttcacaatgtatgggttgcactttatacatacttgacaacaatggttatccaatggtaattaataaacttataaaatataatttaaaaatattggataagagacttttcaaataagatttgatggatcaaaattcacaattcttgtattaatcccatataaaattatgttacatttgacttgtttgttgtattatatatatactttatgacatgcagcctaaaaacaaaccaggaattggtgaattagcgcttggtccagtcatgtttggagcatcgaagactctgttgaatggtaatcaccatgatgtttattttaagggaatgcctacattgaatggagaggttttaaggaggcatggggacatttttgagcttacatctaatggttattatcatgcacatggtcgtgcagatgatacaatgaatattggaggcatcaaggtatgaaatgaattatgtgtgctattaattagttagcttggcctgcccaccaataatttattttttatttattttaaatttactattttgatcatattttttttttataattcttaattaggttttagataatcacacatattcttagttcatagacaaagtaggaaattatcctggttcagaacctaagttcgatgtaaacttagtcctacttcagcttggaatacgatctcagatttctttattaattagcaacaaatcgagtacatcacagtcgagtaaggattctcaatcttgggttcaaacaagtttttcactttcacactctcatccgagcatacaaattcgtacgtcaatgtagctcattacaaaaaccgaatccccaaactctttcacagtactctctccttatctgatcttcttgcactctctttctctagattcgtgcttctgtcgtgatctagaaaatattcactaaataatgaagaagacttgccttatataggcaactgagtaagtagctaatttaagaaaggtcggctaaatcgatcttggataataacaaatgtaactaaatttgctatatctcttgttactctgggtaatttgataggaataaaactctacatatatatttctaactatagatttgaattgaatatgattttgtttatgtaaacagattagttccatagagattgaacgagtttgtaatgaagttgatgacagagttttcgagacaactgctattggggtgccacctttgggcggtggacctgagcaattagtaattttctttgtattaaaaaattcaaatgatacaactattgacttaaatcaattgaggttatctttcaacttgggtttacagaagaaactaaatcctctgttcaaggtaccaatttcatcattattaacttttttgtttgttaatttttagtctcgactctcaagggtgtatatttcgtaaaaaaattagactattcttatcctatacacttccacactatgatgatgatcttataattgtatactagttctaatttggtgtttggttaattattaaataggtcactcgtgttgtgcctctttcatcacttccgagaacagcaaccaacaagatcatgagaagggttttgcgccagcaattttctcactttgaatgaagtgttataatataatacatacatatatgctttgaataaagtgtagttgattacatagagcagtttgcattatcaaatgcactaataataagttaaatgctctaaaatatgtgttaaatcttatggcaggattatagatttgattaagatagtcatattgaaccataaattttcattcaacacatttttagtgcatttgacattatttttattgaatttaataaatactgactacactgtatagtccactacatcatatcccttcaatataatatttgtgatttagaataagaatagttacttttagaaaaaaaaaaactgaaataataaatacttaatgtagtacttttataatttatcacgctattaatatagtgtttaaaaataaatctttctgatcttatcacaaaaaaatttttagttaaaattttagttgttgtgaattcatacttcaagaaaagattagtttcaataataaagtagaataacaaaaaattacaattaaagaaaattagaaaaaaaaaactaaaataacagattgatgctataacagaatattgtagcataaaaaacgagagacaacagatttaatgagattcaatctcaaacaattttctgcatggatctaattcccaagggaaaccaccttgtaaccaacatttattaacaatagtagcttagattatagagagtgatctctaaggatcaatgttgtgaaaaatcgtatacgcaagtgtatgcaatcgtaacaagtaataaagtgataaatcgagtatcgtctccacagggattaaaaattagaaattaatttataaaactaattactcacaaattgatttaaacaaaataaaataaagtaatgagaataagtaaaaatttaacaaacacaaactatgtaaaaaaaaaaaaaccaagctagaattattaaattggcctaaaaatacaaagttgatataatggtgcaaatgagtattgttgtaaattgataatgtcaactaggaat

SEQ ID NO: 225729 - DNA, 4056 bp, Cannabis indica
cttgctgagtccttgtgactcacgggtgctaggtggtgcaggtaaaggcaaagaaaagctagatcaatcatgaggtggcagtcttctccagcaatgtacatattgacctcaccgccctacgtgccgagttgccaggagttgtttaggactggctgtatctgctgtgtattttgatttatgtttaaatgattgtcgtttatatttccttagcaaatttttttataacagggattcccgtaacacactttttatgtcgttataatgtccatttttagtgttttattttagtcatatttttaatattatcactgtttttaataattaattattctactagtattaaaaactagtttataaaatcacacatgtggcgtccctatagattatggcgttacaacttggatccactagggtgctagtatcagtttggccaactgtagtggctagatttttggcacctgttatggtgacaggattcaccatatctgtactgttcatggggattccaatcgtgattgggatctgagtacttggatctattgtctgcagctcttgaggcagactcgaagatgcagatggtgcaaaaggtgttcttcttgtgttaaccacgtcatttgatcacattacgatatccatgctctcaatgaaagaaccaaactattgacctcaaaaagtgatcaaccgacagcgaggtcgtacagatctaatgcttgccacgtgtttgcacaaacaagaataaaaagtaataaacacaatattttttatagagattttgtccccttgtgataatgggtaatgacctactccccttttagttgtattaatatcgagggttaatactatctagatcactataggtgggatatgctatagcacccttaggaatataatgtatgaatcaagaatggcaaaatccaagtgtagggatgatgcttgtatgtgcatgagagtgaggaagtgaagaagagagaatttgtcagacttagatttagagcatggaggtaggtttcagacttagattcaacttaggtttctaagttagagttaaggcctttatataggaggcctaaaccctagatatttgtatattttattaaataattacaaaagactaaaatgccattgaatcaagatattattcagccattttgttgggctttcagggcccaatttgtagcccaagagtaactgtccacgtgtgaaagtgtagaagaaatcatgcagaacacttcttggtcatccaggcacctgtggagggcaggctggctggccatggtatagtcccaaggctggccagccagctcttggtagggagctggtctatcacttgatgcctgtttgagtgttggggtctccgtttgtttaggtgttgacgtggcctttctattggtgagttatactgccacgtggcactaattttgtccatgtaagcatgccacaataggaggaaggaaattgggataacacctattattgatgaagatagtttcaatagaaaggtcggatcttcgattggacacttggaaggtgccaaaattgatagattttcaacataggcgttgggtcctcagggccatagggccttaggtgctcaaaaatcaacttgctctgaatcagattctaatgcctcacatattttcgtggtatgtcgaactgatgtcgtaatgcatgttttggccactttctacaaagatggtctcaaaaattgaaaccctagttgaggatgaggatgtcaacctaagcgtttggtagaaaccctaggtgccaagggttgcttttgggttgcaagttcgtgtaattcagctcttgcatcttggattaggtttatccatgtgttcatggtgcagaatactaaaagatagtgagttgaattcaagttattaaagtccaaacttccatctcagagatcctagagtcaaccagggcgcaggggtagggtcccctcccaggttgactgctatgactcaggtctattaaactttgttatgtcatccttcatttcaggtgctaaacattgatgtccgtgtcatcagagaaagtcttcgggtttaacattttccctccaagtcaatttcacacttgtgtggatttcacgtgatgatgtgaacgaagactattgcgctcgaaactaccaaatacgaatcaattttgacattcttaggcacttgtatcgattcttcaagcattcccaactgaattaggactttgaacactttttattagtccttggaaattttgaaaattcattaacaaagtaaaagaggacacaatcttatcttttatctctttctttaaaaattagatattttcttatttttagttatgccattaggatgaattggattggaatctaaatccttgttggagatgccattcgaaattagagagagaaaggaagaagagaaaagacttttagccttttacttattatttatctttaggagaagggaaaagatataattatatgttttacttgtcatttacctcttccttaggaagctctaaatttaaaagactccaattagctttaggataaagaaattagactcaactataaataagtgagttgaggaccatttttcacacttctcactttatttcacatgcctatagcactttgagaacaccaacaagatttcatcttcatcaagtctctaagccttcttcacttcaaggtagaaaaacattttttctttcttttttccctttgacgccaatgttttttaatttcttcttcttctctttctttgttgatattatcccaacaatcttgaacttcaaataacccttgaactaatttttttgaaccttccaatgatccaaaacactctgcttctaccttacaaaaattcttctaggctactttgactttttcaaccaagattgactttccttttgttgtaagtagcttaaattgttgaacttgagatggctaggattaagagaagcaaaaggttacatgatgaatatgatacccatgttgctcagctcattacatatgagctggcagttcctaagtctaagaaattagacaaggcacgcggtggaacagtgatggcaactaagcatctcaaagttgttgtttaatgatgatttgagagatagagcctttaaggttaggcctcttgtgtctattacccttattgagcctcaagctcaaacaattcaggatgattactgtgttcttgaaattgtcgttcagaagcctcgacatggtgctcctaagggctcccaaaatacttgttgtaatgcatgctcgagattccacatgaatgcaggtgcttacttatccttgcatccatggtttatatccatagataacttttgttggaaatgacaccgaatatttagggagaatatacatattcttagactaggatgatgaagtagttacctttgttgggactgttccagagaaggatggaaaattagcaagttgctgacactccatgttgtgatcttaacttgttggcttgtttctgttagttgtactaacctctgatctttactttctgcagacaatatgatcttcttggatgccatggcatcttatttaaacttgaagaggaagcatcttacaccaacggagactaagcctccagtaagggaagtggtttacgacattcctgctacctcttccgcttcaaagaagaaggtcaggaagaggggtagaattgttgatgttgctcttcctactcatgactctagtacggagaagtctaacactgctggtgttgataaaatatctccaattaacctcttgccgaatgatttcgaacatgctactcaaaactcgtgttcgaactaaatggagaaattgcatgaacgaggtgctgggttttatgaactaaataaaactccatttcaatataatctttattctttaaatatcaataaagaaacagaagtatttttcactcatttgtgtgttatttggttcatgttatcatttacttgtttatttgatttataaattcatccaaacccttatcacatttatgttcttctttattgtgtcgttagcatagtggaaagtaatcaagattatgtgattaa

SEQ ID NO: 225730 - DNA, 2461 bp, Cannabis indica
acaagagtagaaagattccaaaccatctcattttgtgctttccaaagttgccaacatattacaccctcattgagataattccagcagtttcgaacaataacacaatccaccaacacatgagaaattatttctggagcttttttgcaaagtggacagaaatccacccttactttttttttggtgataagcatgaaatttgtggggagacaattgactaaagcacactataataaattcttgcactttggaagaatcttcaaattctagagttttctctaaaatccatagttatgattattataagaagcaccaaaaagttcaagctgcagcaagtaggttattttgacataatatctctcttattttttacgatttcaaaaccatttatttggatatctctcaaacttaaagggatacaaaataagattaatatctcttgccacaaaataatcttccaaaatagctctatccccagcactctctccacaaatcataagctagttcacagtaatttcttccaaactaggatgttgtgaaataatataagaatttgcaatgttaggaagccaaggttgagaaagaacattaacttgagaccctgagctaatacaccagcagataaccaaatttaaaatgctccaccatacaaaactaggattatttcctaactcaacattaagaaaattatcatgggaaagtatctggatttaaatacacaataaattaagtcgtcagtaccattaacaatctccattcttgtttgccaagcatgacgataataaattcatgcaacctcttaaaacccatacctcccacaaatttactcttagccattcaatctcacgtcatccaaaaaatacctctcttcttagcaaactttgaattcaaaaaaaagttaattattttgcacattagtgaccgagcaatggacactcttaaccacacttttccaatccacgtttgaagatgagaatagatcgtgaaaataatcagccatgacctccaataaactattattccaattaaccagatccccattattattacaaaggcttgtaatgatacgtctcctagcacttgctgaagcatggaaatacttgatattttaatctccttatttcaactaaagttgtttcgatctttgccgccagtaaatctttttcatgctaagaaacttagacaaattctcgttagcctcttcaaacagctggcaagaattagcatctttcttccctttatatttttaatttcctttttacacaaatcaatttgactttttaaatttttagttatctcataaccccaattagctaaattctcatcacaaaaactcaatttctctttaaaattttaaccatcctgaacctcccagcaatcttgaactgtttggaaacacattgagtcctttaaccaagaattttcaaatctacacttgcattttgaagtagaaaaaatagaagggcttgaattaaaagaatagaacaatgatcaaaagtgctcacctcaaagttataaagtttagccatagagaaacgtgataatcattcttgattgttcattgcacgatcaatacgcacttccactaaacgatcagaccccctaccacactcccatgtaaatggatagccctcaagatttatatcatgaagaccactatcaaaagtgcattattaaagtcttgaataagggcaagccatgaataataactaccactttatgagactaacgaggtacataaccaacaaagaagatccatctaaggatacacaaaatacacagcataatgacaagtagataacaaattctttaagagcttgcagcttattgatctacatactcatgagtatgttgaaagactaagggaactgcacacattataacttatctcgttgtcacactatgatagtgtctcgtatttgcctcttgcgatatcacagaaggatgcaaggattatccagaatatactttgacgcaaaaagtcactttcagaataaagttattagtaggattgtttatattgtgagatgaaaacagtataattagtataactacttacagataaagataagagcagctatatcaattatatataattatcccatgtgatgtaaatataaaacgtggggaatattcatatttctcaaacggttacaagaataagttatcaagggattaattgtcatcctaaaactcctataaatagagacagaatttagagaactaagggcgaccaatttgagaaaagagataattataccaatattgtattctgtatacgatttattaaatctcaattgactcgtgaagtataagaaattaacttcaaaatcacgttaaaagctctcttgccattatttatttattttatgtatttaattcttagagtttatctattactttaaggtctcatttattgtttaacgaaaataatggattaatacttatattaaggcaaaaaaat

SEQ ID NO: 225731 - DNA, 3392 bp, Cannabis indica
tatatatatcggtttgactagtcaaaccgagtcttcacaggtaaatcttcaactgacaaggatagagagcgggtgaaaacacccaaaatagcgattgaagaagtgaaactgatcactttagacatttagatccgccaaactttaacaattggcgtgacctaccccctacaaacacacagcaaagagcagtcgactacggagtcacgggtggccaaaccctgccctttctaggtctggtcggccataggattatcacgtgcctttttgtaggtctggccggctatggaggagcacgggagccaaattcgatccaatgcaggtctggccggccaagtacagcagctaagcataggcctggccagccgaggccaactctagtacttgggaatggccagccagagtctacaattcagcacaggtctggccgaccgtcaccataccctttcacaaggtatggccagccaggccctatctctccagaatctgctgcctccccatggagggtccgttagtcaagtctccacagcaacagatccttttgtgcaagcacaactggaccaactcaaggacatgatccaaggcatagctggtccgaagccttcagaccttgaacttgatcggtcaaggggatcacctttctcagcatacataaatgccttgtcatttcctaagttgaatatgtcggtatggaagatgtataccgggtgagaagacccactggctcacatcaaatacttagagttgcaactcgatctctagaaggttactagtgatgtgtgatgccgtatattcccagccacattgtcgaaaacggctcaacaatggtactttaaactcaccctaggaaggttcaactttttggttgagttctcacgagaattctacatgcaattctcatcctcaagacttgtaccatgacaactagaagaccttatcgaagtcaaacaatgacaaggagaacctttaaaggattacatccaaaggtttatggattaggctgccaaagtcaaaggccttacaaaagaaggccgatatacggccatactaggggacatactccccttgagtgacttctggaaagatatctagaggatctctaccaacaatatgaaggagttccttaatagagctgatgactttatcaaacttaaagaggccatacgacaagcccaggtggggcatgtcaacaacaggcagtcacgaggcattcagcaacctcatgacccactaggcgcacaggtagacaccaataactctgcccagacttctagtggcaaaaatactataaataagcgtcgcaccaacaattttgggaggaatagtggcagaaaaggaaagggaagtttaacacttctcccatgccacgtaagaataaggaggagaagtacacctgcttcaccctcctaacagagaagcctgaggccatcttcatggccactcgcagaatagccccataccgaaagcccttccctatcagaaatgagatgggaaagagggacatgtcgaagttctgcagatatcacaacaacttcggccatgacaccaatgagtgtcaaagtttgaagaaggagattgaatacctaataaggcgtaacaatccccacctacgttgttatgtgcaaggcaaccaaactcaggcacaaggtgcctagaatggagatctaatgccaccacctgtggcaagacacctatgggtcatcattgacagaccccacattgcgggcaagaccagcaaggctagggagcgctatgctcagacactatgtcacgagcccaaaagagatatcctagcagttgaagacaaagcaacaaaagcccatagagctcttgatctccttcaccgaagaagatgttgctcaagtcaattttcggcacaatgacccctgatcattactgtatagatcaggaacatgaccgtagcaagatgtatggtgggcgacgaagcctcttccaatattcttttcaaatcaatagatgaaaggatggggttctaactcactgacctaggtacttgcaaccaagtgatgtatgtcttctttgccaaggcatcgcacctgtcgggtatatcagattaaccctcatagttggagaaaatccaaccatcagaacattgatggtgtagtttatcgtgattagcgttcccccagctttcaatgccataataggccaaccggccctcaacgacctgaaggcagtaacatctatctaccactgatgcctcaaatttccaacatggcattaggtggcatgtgtgaagagagatcattagtctacccgtcactattacaacttggctctatacaaggccaaaaaagagaagatgctcgccaaaagcctagaacataggcccaacaaggggcaatgaagtctagcccaaggcggggatgctgacatagatcctcactttagggatcctgcggaagttttggacctgtagaatagttggaagaagtggaggttgatcccacttttctgatgagaagcctgaagattgggaaaggcttagctccaaaaattaaatcaatattgatagaatttctaaaaaaaaacctggacctttttgcatagtcacgtagggatatgatcggaatcaacccctccgtgataacccatgcactcaacagtgatccaagcatctagcctattcagtaaaaaaggtagttgttggacaaagagcgcacccaagtgctcaaagatgaggtcgaaaggctgagaaccaatgacttcataacagaggcattctaccctcaattggaatccaacccaatactggtgccaaaacccaataaaaagtagagagtatgcatcgagttcactaacctgaacaaagcatgtctaaaagactgcttcctactccccagaattgactagcttgtagacgccacaactggccatagaatcctgagcatggtcgtgtattcaggttacaatcaaataaagacgtatccaccaaatccatagcacactagcttcatgacgcacctaggcctttactgctacaaagtcatgccattcgggctgaaaaaatacagtggccacatatcaaaggctggtgaaattgatgttcacagatctcatcgcccgcagcatggaggtgtatgtggacgacaagtttgcaagtccaaaaaggctggggatcgttgaggatctatgcgagtgcttcaaagttcttcgtaactacaacatgaagctcaacctcctcaaatgctcttttggtgtaagctcgggaatattccttggcttcatagtcaacgctaggacaatagaaacaaacccaaacaagattcaagcccttttggacatgaagtcgcctacaattgtcaaggaagtacaaagcctaacaggatgcattggtgcattaagcaaatttatatccaagtctacaaagaaat

SEQ ID NO: 225732 - DNA, 2587 bp, Cannabis indica
ttttgctaattttgaaaaataccatttttttacataagggcccaaaaataattttttcctctatagtccactaaatttcagggccggctctggtaatagtctataccattttactaatttatagtattatgtgcattgttttgatagaatatgttttatgtgcttaataattatcacattaatatgcatgttgaaccattttttattattaataataataataataataataatgtgaaacaacaaatatgtctattattagataccataaaccatatttgacccattatgattgtgttccatatctcccaaattatataaattttagtgattgagtgcatgcccacccataaaaggtaagaaaatcggttatgaataaataaatcttaccataaaagaaaaaatattttatcatctaacatgctaaaaaaggactttacaattacactgccaaaatttgaatagaacatattttgataagcgattcatgcccaaaagctaaatctcatcaaaaatttgctgggatgttatagatataatataggactcttctactgtgaggaattttttaaatgtttgggtaaatgtattgtaatactatggtattgaatgcgacatatttaaactagttatgactaaaatattttttttttttattcagctctattttctgagatctacagctccactctcttactccaaatccaatgtgaaaacaataagagtgtttcctaaatatctcaaatagagggattacaatccacaatcacaaacggctctctagtttttcattatttgaaaatataaatttgactactgttcattcgaattattcaactcctagaagacccatctacaccacctttgaattctcgtcattaaccactaccggatccgtatttcttgcccaaaagaacaacctgcaacttgtcataaccagcaagaacaccaccacccttgaagagtgatttggtaccctcattcttgacgattttcttaaatgcatctaatgaaaagtattaatatttatagttaaattatttacaccaggtaatactcaatgaaaagtattccatatatatatttgagataaaatagttacattcaacaatattacattcaacaatgcagtttgatttggtagcaaacaagggttcttgtaattttcactggtttacataactatttgatacaacgaaatgaataattctcaaaacatgaacgacaaccaacagatttcggtttactctgattatcttttattggcaattacttatttacttatttatttgttgtttctatttacacgtaacctcctggttatcatactacatagtacatatacacactgccagtaattatatttatttcagatgggaccccaactatgtaatgtattattactttttttgggtcagttgttttgggatggacttgagctatttttgtgtttctgaatgtgtcattattggaagccatacaatatatgccccaagggcatttggaccccatacatccattggctttgttgttattgctgtaggaacctcattcagtgaatcagtctgagcaagggcaaagaaaactgagtcaaaagtaatcactttcttttttacttctcttatcaaccaattccttgtcaaatctccatactcaataagattctgtgtaacccatcacacacacacatatatatgtatatatgtgtatgtgatatggatatgaaattatgaagttgaaggctactatttccattgccattcttacttattatgagttatgatgactagatccatctttttatttaaattatttggtttgtccactagcaactaagaagatgcttcataaaaaaaaaaaaagaaagaaaaaatctaagaagatgcaacatgtaagtcaccactgggaactgttctaaccttcaacatgggcaaatgccatgtggcagcattcaaggccttggatgttattataataattacttaatctcacatttatcaattcaagaaggatttttctattagaaggagcaaaaaactggctaagcaaaacgattaaaaatgagggtaaaagtaataatccaaggtagctaagacttctttatcttaatataccaacaacaaaatattccttagaatctcacatagccacaaacgtgattatcaggcaaaaagttagtgtggatttattgttgaatccaaaagagcaggtatatatacatacgtaatgggttaaagcattatgcatgtatatatttataataataataataataattaagagagttgtatttttaaatagagtgcatacatacataggtactttttcattcttgtccaattccccaacattaagttcatacatgatacaaccaaccacgttttgcctaatgaagaataatgactcataaatataataacacttttttctttgtcattaaataatcacgagtagtagtactactatatctataagcaacaaataatatttgccaatcactatagttttcaaaagactaaaaaacaattcaaaaagtcaccaaaatgccttgcctcactttccattaaaacattcctctctctctctc

SEQ ID NO: 225733 - DNA, 2208 bp, Cannabis indica
agaaaaatcgtaaagaaagaaaacaattttttttaatattgaaaagatatattcttacgttgttctgatacgacttatatagaagtcgatccaagaaaaacggtaagaaaacggtaatattatcgttcgtgggaggaaaaggcggatcattgactgatcgcgttttacataattaaataattttttcttcaaaaaataaagtgacacctcacccgccaacccggcccggctcggtcgggcggcggcggcgcgcgcgtgtgtggtggtccagtgtgtgagtcctcacccatgcgcgcaaaactgggtaccccttggggcccaaacccatatctcaaacttgcactagatatacacttaaaatgtagtgtttctatcccatgtgggactcctactcacacacttcacttttctatttttacatatttcatacaaagttccaacagtatctattggagaagataatccacagattgagtgattgccattttaggcatcaataaaaatggtgagttgtcaagataaggcaagaaaaaactaaaaataagatcagtaaattacttaaacatctaatgcatattgtcaataatatttaatccaacgagaactatctagtgagagagtgagagaatctttgaacctatagtctgtattgcacgagtgagccatagaaaacagaggttaaagaagacgacgttgaaataattactacgtactctttagcaaaactacaatatctacagtttatataacatctgtttttttttagattcttctccaaatcgatttcttatgacggtaagtctgaggatttcacatccattaattacccaatcttcttacttcttgttttgcttccttggaaaatgagaggagttagaattaggaatcataggacgggtgagatccctccccagtgcgaatgggggtggaaggtcaacctccctgtccatggtcggatcacagcagcatcttagagacaaatggattccggcaagaggaatggcagcggcggaaatggattccagaagcatggtgactgaggagatccttaacaaaaaaaaagtcttggttgtttcaggtgtaatgagagtaaaataggagagagagaccagagaaatataaaatatggtattccgaagttttattataaaaatatggcataattttttttttatatagtgagaaattttccatattattataaattaacagtcatttacaatagagaaaatagaataaggtatttttcatatagcgtactttgttaagccacaagcagcttgattagcttgcctatgagcatgagtaccagtaacttcaaggaaagaggataaaagacaacgaacatcatcaattagatcagaaaaacaagataaatctctatgaagagaatttaatgcagaggatactcttagggcgtctgttttcacatgtgctattggcaattgttgttgagtagcccaattaagactgtaaaagagtgtctttgcttctatttcatcacttctgaaacaactttggactgatttagaaaacgcagcaattacttctcctttatagttgcgcaccactgttccatttcctaatatcttgtcttgaaaattggcagcaacatcaatattcattttaagcaaattaccatatggtggcatccatgctatctcatatggggaggatcggccacggtgagcccatggtggtggccggtcctccccattgaactttactcaaaatatatgcatatatattcagatgtatatattgtatttatattatatattgtatgtatatatatagtgaatacacaatgtatatacagtataaattatcattaaattatttaatgtaaataattgattattattttagatgtttatttttcaaatttaattttgaatttaaaataaatattatagttattaatttgaaatttaaattcaaaaacaagccataaacaactaaaatcaagctttaaaataacttctaacacaattcattctcaaataaaactaaactcccaaattctcaaaaattttaaaagagaaccaagcttaaaacttcaaaaacaacaaggagtaaagtatctaaggcttacctttgatcttggcttaaggtttctcctcaatccttgctaaaaatggcttgaatatggtagtctaaccttggttttttctttcaaaaagggtcacgagagagagagagagagag

SEQ ID NO: 225734 - DNA, 9369 bp, Cannabis indica
tctttgattattgagattagaaagacggttaaatgtttatagcgtatctatatcgtggaacatatatagtgttctatatgactgagagtgcaattccaagttctatggtggatgcaataagggattaataagttagggaatttacttggtaaattctagttctgcttattagaagctcagttgtataggcccacggtccccatactagttgagaccatactttttgtaagactcagatcattgattttaattaattaattataattctaaaattagactatgcctagtttaagaattttcactaagcaagggcataattgtgaagaaaagagattctagggtttatttattaattaagagattttattaagtctaatgaataaatatattaaatggcaattttatttaataattaatgattgttgtaaaatgaaaatattccaagtggggcccaaacatccaatggtcggcaactagggaaaggaatttccatttaattactacattattttaatgcctaataaatcccaatctaaacctacgtggttgcctataaatagatagtgatggctcacacttaaagatgatgaaaatttaccttcagttaaattttttatgagccatcttcccttctattttcgaatcaccatcctctcttcctctcttcatattttaataccttgagtgttagagtgagtttccacacacatcaagtggtatctaaatcatagtgtgtaaggctgtgaataatccagaatcaagagaaggacattcgggctcagatcttggtgatactctgctacggacaggatacaagggttagagatctgagtggaaggagccattaatattccgctgcatccactgtaaggttttctgaaactttatatgtgtttatttacattgttttagatattcatatttaggatgttaaataacatacatggtagtaaatctagatcctggtaaacatattccaacaaaaacttgggcctcggaacttggatcgggatccaggacccgactcaagacccaaacctggacctaggacccacctcgggacctgggatccgggactcgatgcttggaaccaacccgttgtctgtgtctggatctagtacttagaccagaacccgaacccaaaactcgtactcaaaccaggacccggacacatacccagacccaccgtcgggaaccaaaaccgaaacttgaactggaaccggatcgggatcttagaacgggatcggaacttggaccctaacctgaacccagacacagacccaacctcggaccgtcatagagaccgaaacccggacctgaaccacgcccaagacccaaatcagaacccgaatatatactcggacccaaactcgatccaaactcgtaccccgtgacatgaaactggaactcaaacgagaagcagatcgggacctaggaacatgactaggactaggactaggacctggaccaagacccaaaactgtaaccggaccaggacccagactcggacacagagccaccttgggatagggtcccaaacctgaatccaaacacgaaccgagactcgagacccgaacccagacctgaactcagacccaaacatggaacaagacttgggacctgaaatcgggatcaagactcagaagtgcaccctagtctccgtcccagacctagaccgagacccagaccaggacctaggacatgaaccgaaagtacgctacgacccgtgattgggatccagaccaggacctaggatccgagaaccggggcttggataagacccatagtcggtgtcttgatctgggactcaaacaaggaagcgaagctggacagggacctggaccctgacccaaacatgggaccaaaaactgaaacttgaactagaacgtgactaggaccctagaacaggacctggaccgagaccaggatcggcacccaaaactaaaccataaccatgcctcgaaactcgagctcgtagccagtcctagacccggtctcggacccagactaggactgagactcgaacccgaacccgaactcgggacacgatcctagacccaaaccatgcccctgaccgagactgggattcgaaccttgacatggacatgaacgcaaacccagaacaaaatacggacatagacccagatcaggatcgaaacatgggacctggactcagacccagacacatacccgaacttgggacccaaactaagacctggacccagcttgggatccgaacacctcattcctagacttggactaagacttggaccccgaccccaaccttgacccagaccctgacgtagaaccaaacccagaccagaataagaattggaaccgtgcctaagacccacacctgagacgagaactgaacccaaacttagactagaacctagactgagaccttaactaggattgaggcccgggacccgaacctggattgggacctggacctgacctggtcctaaatccttgtcgggacctagaccaggatccaaaccctgatagggacccaaacccgaacccagactgagacttagacctagacccgtacctgaaccgagacctggactcaaaccaagagtcgggacccaaaccaaaacttggacccagaccaggacctaggaatcggacatagatgggggacctagacaaaggacctaggcctcgaaacccaaacctagatcagaatttggcactcgaactaggctgacatggatccgggaatctgaattcggacccagacccagacccaaaacctgcctcgaatccaaacaaagacaggaacctggtcacgaaccaggaccaaacctgaacccagacccgaaccaaaaattggacccaaacctgggacccgaactcagacctagaactagaattagacccaaacctagacctggacacggacccgaactcaaaaccagactgggataaaaaaccaacacttagacctgaaactgaacttgaattagatcgggatcgaaacttgggactcgaactcgaacctggagcctaatccagacctaggccaaaattcgaacccaaacccgaactcggaccatgactcaaaccccgacccgaactcaaacccaaactcgaacgcagaatcgcaactggaactggaaccggacaaggacatgaccaggacctaaactcgaacctgaacccaaataaaaaaccagagcgggacccaagccaaaacaagaatcgggacctagtggcttaccccaggcctggacttcaacctatgccccagctcgtgacccgacacccgaaatggaactagaccggcacctttgatagggacccggatctagacacggagcttggaccgaacccgtagtcggtgtctagatcttggaatcgcaccaagacccgaacttggaaccttttccagactagacacaaacccagacacggacccgagactcaaaattagaacaataacctaaatcatgacgatggaacaagaatttgacctggactgaaaaattggatctagatgcagaaccgaacacggacctggacccagaatgggatcgatacccaggcccagacccagacccgaacatggacttaaacccaaacccaaatccagacccagaccgagatcaggacaaggaccgaaacccagactaggaccgaaacctgaacctagattgggactagaacctagactaagaccaggacacggtacctagatcgggatatgggaccaagactgggacccgggacctgatactcggacttgggacctgagaaccgaatcatgacccagacacagaccaggccaagacccaagacaaggaccagtacctaacctaacacagacggggacctacactcgaactagaaccctaaccagactgtgacctaggaccctgacctgaatcggggacctgaacccatgactcaggacccaagacccaaacctagacctgagactcgaaccaggaccaaatacttgaggtcgaactggactaggatctggatttggaccagggacttaggacccaagacctgaggcctggacccgacccgtagtcggtgtctaaatttgggaattggacatggacccagacccatacccggacttgaacccgaacccatactagaactcaaactagactcgacatgcggttggtgtttggatttgggaccaagactcagacctgaacccaaacacgaacctagacccagaccaggactcggacccaaacccacacctgaaccttaaatcgtaccctatgacccgaaattagaaccggaactagaagcggaaccttaaactctaaaccctaaatcctatactctatacacttacccctaaaccctaagccctaaaccctaaaccataaatccctaaaccctaaaccctaacctggacatgggcccagatccatacccataccgagatcggaacccaggacccaaaccaagacccggatccagaccccaacctagaccagactcaagacctgaacccagacccaaacgcacaccagaacctaatgcgggacttagaccttactaggacccagatcgggacccccacccagacccaaacagggacctgactttgatcgggacccagacccacactcaaacatgaacccgtagtgggacctagactcagacccaaactcaagatccaaacccaaacctgaacatagacctagacctggacgtatgtggacctatatgggggacctaggccccaaacctgaaccttcacacatacctagactaaggatccggacgtagatgggggacttaaacctgaaactgggccccagaactaggaccgagacccaaaactcaaccctagactagagacatgggatccgaccctagacccataacctaagagctaactaccgggagacaaccccaaaacccagacccaaacccaaacataggacccgaccgaagacccggcacctgaactacaccgagatctgaatctggacctgaggtttcaacctgacccgtagttaatgtttgaatccaagatctagacccatatccgtaccaagacccggacacgaacctagacagggatccaaacccaatcccggacccgaaattggaatagacaaagtttgggacaagaacccatacctgggacaataataggacccaaaactagacccaaactcagaccagaacacataccgagaattggacctagaccaggacctgtgacttgggaccgaaacaaagaccgagacctggacaaaaactgggacccaaaaccagacccaaaaactagggacagacccaggacctaagaaccagactcggacctggggcctaaactcgaacccacatttggattggaccagaatttggacccaaaatgaaaccgagacttggactcagttcgggactcgagacccaaacttgaaccgaaacataaacatggacgcgcaccgagacctaggacctgaacatagatgggggacccagacccgagaatcgggccccgaaaccgggaccagaacttgggcctcggaacttggatatggatccaagactcgaccccagacccaaacctaaacctaggacccacctcaggacctgggatatgggactcgatgcttagacccaacccgtagtcggtgtttggatctgggacttagacaagaacccgaaccaaaactcaaatccaaaaaaggacctagacaaatacctagatccagacccaccctctggaacaaaaactgaaacttgaactggaaatggaccgggatcttggaacgagaccggttgctagacccagacccgaacctagaattacaccaacctcagaccctaaccgagaccgaaacccgaacctggacctcgcgcagaacccaactcactcccaaagtcgacctgaacccgtatccggtgacttgaacctggaaccaaagcagatcgggacccaggaaaaggaccacgacgaagacctggacgcagacccaaaattgtaactagaccaggactcggactcagacacagacccaccctaggattgggtcccaaacttgaatccaaatccaaaccgagacctaggaccctaactcagacctgaactcagacccaaacatggaacagaactcaggacctagaattggaatcgagacctagaacagcacccaagtctcgctcctggacctaaaccgagacccaaaccgggacctgggacatgaatcaaaaccagactgggacctgtcattaggattcaagtcttgtcctgagatccaggaactggggcttggacaagacccatagtcggtgtcttgatgtgggactcgaagaagtacctgaagcttgactaggaccctgagccagaccccgacttgggacccgaagtaaaaacttgaaccagaacgtgaacaggacattagaataggatggggaccgtaaccaagacctggacctggaccgggaccgaacccggtcctggacccagactaggattgagacttgaacctgaaccaaaccaaaactcagatctcgatcccagacccaaaccaagcccctgacctaaactgagattcggacacgaaccaagacccagactcgaacattgacccagacccaaaaagcgatcgaaacacgagacctggacccagacccagacacagacccaaaccggaacctctgacccagacctaggacccaaacctggacccgaactcaaacttggacccagaccgggatcaaaaacccgtacccagactcagactaagactcaaaccccgacctcaactagacccaaacccgaacccagaacgaaacccggacccagaatcagatttggaactttgactaggacccagacataagacaagaaccgaaccaaaaccataacccatactcaaactagaacttggaccgggaccttgactaggactgcgacttcagacttgggacccaaacctggaccgagacccagaccgggacctgacctgacctggtcctaaaccctcgttgggaccaaagacccatgacccagaccaggatcaaaaccatgacaaggacccgaacatcgagtctcgggtctcggttcgggtcctggtcccgatcacagtctgggttctagtaccagtccaggtttaggtctcggtcctagtctaggtctaggtcccagtcttgatcttggttcgggtccgagtctcgggtttgaattcgagctctggtatgggtctgggtcttagtttcaatctgtgtttgggttcgggttctcgtacgggtctggcattggtccaggtccctagtcacgagtcttggttttcgtgttcttggttgtaggtctttgcgcaagtgtgggttcgcgttcgggtctatgtctgggtgttgatcccagtttgggtctaggttcgtgttcggttccgcatctagatcctgttttgggtccaggtccaattccagttcaagggtcttcattatggttcttgtttctattttggatctcgagttcgagtctgggtttgggtcctggtttagaaatggttccaggttcgggtcttagtatgattccaagatctaggacctgggacctaagtaccgaaacgtgacccaaatccagactaggccaagacccaagacaaggaccaataccgaacacggactgggacctacactcagactgaaactctaacccagaccgggacctaggaccctgacctaaatcaggatcgaagacccaagacatgagcaagaacttgacaaggatctggatttggacccaggacctaagaccgaagacccgaggcttaaacccgacccatagtcggtgtctaaatttgggaattggaccaggacccggaccaagacccggactagaacccgaacctatactagaacttgaactagactcgacgtgttgttggtgttttgattacggaccaagactcggacctgaacgcaaacacgaacctagacccacactaggactcgaacccagacccacacctgaaccttgaatcgtaccctgtgacccgaaaatggaagcggaaccctaaaccctaaaccttaaaccataaatcctaaactttttacacttcccctaaaccttaagccataaaccctaaaccataaatccctaaacactaaatccaaacccatacccataccaagatcggaacccagaacccatacccggacccggatccagacacgaacctagacccagacttaagacctgaccccagacccaaacaataaccaaaacttggtccaagagctacaccttgattgggactcagatcaagaccccgacctggacccgaacaaggagcacgactcagaccgagactcatacccagactcaaatgtgaactctactcgacccaaacttcggatccaaactagaacttgaacttggacctagaccgggacctaggatccggacctagatgggggacctgggccccaaactcaaacctggacacagacctggacaaagtatccagacctagataggggacttggacccgaacctgcacccaaaaccaaggacatgactaccggacacaaccccaaacccggacccaaacccaaacttaggacctggcccaagacctgggactcgaactagaaaaagactaagatctgaatctagacctgaggcttcgacctggcccattgtcagtgtttgaatctaggacccagacctagatccgtatccaaactcagacttcgacccagaccaggatccagacccgatcccagacccggaattgaaatttgaccaaactcacaccttggatagtaacaggacccgaacctaaacccaaacttagacatgaacccatactgggacttggaccaggaccaagacctttgacttgggacctaaaccaagatcaggacctagacccagacccagacccagacccaaacccaaaaacttgggccggacccagaatctaagaaccaaactcgtacctgtgacccaaagctcggacccacactaggagtgggacccaaactcggacccgaacccaaaccaagacctggactcagaccaggactcgagacccgaacccgaaccaaaacttgaaattggacccagactggcacctaggacctgaacatagatggggaacccagtctcggggatagggccccgaatcagagagtagaacttgggcctcggaacatggatcgggatctcggacccgacctgagaccccaacctagacctaggacccacctcgggatgtgggatctaggactcgatgaatgcacccgaaccgtagtcagtgtcttgatttgggacttagaccagcacccgaacctaaaattgaactcaaactaggacccagacacatacctagaccaagacccacactcgagaaccaaaactgaaacttgaac

SEQ ID NO: 225735 - DNA, 2042 bp, Cannabis indica
tgatactagcatggaaaagagcagtattgcaatccccatcttgaatccaagcttactttagtagctttctttgcaagaaggagacacagtcattctgtactcaaaccaatctctctcttgcctgtttctcctgcaaatgtaagttaggatcaagtggatgctgctgaatttggctctgcaaagtatccaattccattttaaccctgctgacaactatctgtaggttagaaaagccctccctatttatctccttaagcctactcttgaattgttacattttagcagtaacttgaaacatcttggaagccgttattgtcaaagactagacttcttttaagcatttgtcatgcataggatgtgatttccacattctaaagtatttgaaaggctatttcccactcaacaaaccacggtacaaagttcgaattctaggagaatgatcgaataagccttcattaagaaaaactacttcaccaaaatgaaacttattgatcaaggattagttggtcattattctatcaatcttggaaaatattctatcctccccaggctgcttatttgtccaagtaaaaaaatttacacttgctttggcatcttctaattggcagtagttgacacagttcaagaagttagtatctggataaaactttaccctttgcccgatcctctcatctttagctaatatatcattaaagtctcccataagaaaccaatttttagtactagcaatttcacacaagttcttccataatagtctcctttcaattcgatcattggaagcataaactacagctcgaaagctattaaaaccttctactattgatatttttaaatgcattaattggctagtgcatctaatgatatcaatagtaaacctccaagggttccaagcaataacaatcttctctccctgcatgccatgctatgttagaaaaaaaaaccaacccgcaaacacattagagtacaagattctaagctttggagccttcaccctagtctcgagaagtccaacaaaattaaccttttgaaaaattaataaactgctttattaattgttgtttatgttgactgttagctcctcgtacattctagcataacaatttatccctttgaaagagagggtttcccccctctcctgtcttgttcccttcatctagcacattctcccatgcttcattagtcaaagtctccatatcaagagctttaattgaattgctatagtgtcagcaattgatttttcttttccatccactttcttggtttttgtcaccttcataaagccctcttcatcaatctgcatttgtttcatgttgtcttctttaatgactcattcctgtggtatttttcttacaatttgcagcaacacgacctaaaccagagcaatatatatgtattatacttatattgagtgatatatctaaaatataatatttaatgtgtgtatttaattattatttataaaagtttttacattttattttatggtgtcgttagaatgtcttctccacaaaggtgaatgtaggacgacaactataaaatgagttatcataacattatctttttttaaaagttcaaatttgagggatttatataaaaatattagtaatagaatattttttatataaaatgtttatataagaaattaattttaataaattatatggatgtgaaatttataccttaaattgttatgatgaaaagagaagttatgatccatatggctaattatttccataatgaaatgtttatttatcttattattttgcgataattaaaataataagtaccgtatgaaattggttatacaatttcgtgatcgttataatcatatcgtgctccgcataattattataatcattgaaaaaaaatttaatttgtgattatttttttattattttttatttcagaaagtcatattttaagtagttgttaacatttttactaaataagtaaaatattataaatcataatcgtttactattcttcaatagaaatgaaataatcttttaattcatattccatcaccttaatttttcttattt

SEQ ID NO: 225736 - DNA, 3334 bp, Cannabis indica
tacttgtgagtaaatctaagatcctggtaaaataatttctaacaaaaagaccccctactattataacatttgggagacgagcatgacctctcccacaaaagcagaaaagaaaacgaagacctccgaagatcaaactacaaagaagacagagacagtacctaaagccacttgaaggtgcacccaagacgaggaaaattgactcaggtgttggtccgatcgagtcaacacatcgaacccaaccaaggttgtcaagattggaacaagcttgataaaggtcttgagtgagatactcatggcttgcctcagaagaaatcaagacatttttgcttggtttcatgaggacatgatcaggatcaacccccaggtcatctgtcatggatgcctattccagctacagctagataaccatgcatgcaccagacgaagagcataaaattttccaaactgacattgggcttcatttttacaaagttaagccctttcaactcaaaaatgcaggtgcaacttatcaaaaactaatcaaccatatgttccacaaacaaataaaaaataatatggaagtctacgttgatgatatgctggttatgtcaagaagatttgaagaccacatcaaatatctaaaggggtgcttcaacatcctgcgggagtatcgaatgaagctcaaccctctaaaatgtacctttgacgtccaatcaagaaagtttcttagattcattgtcaactcaagaggtattgaaggaaatcttgagaagatcaacgccttgcaaggcatgaagtcatcgtcgcgatcaaaagacctgaaaagcataacaagatgaattgttgcacttagcaggttcatctccaagtcatcagagaagtgggttcccttctttatattacttaaaggaatcaataacagatttcaatggactggtgaatgcgagtaagccttccaatctctcaaacatcatctagccaagcctcccaccctatccaagccaatatatggtgaagaactatatatctacttagcaatcacagatcatccaggcagtgctgctctgatgcatgaggaaggaacacaacaccctatctactacattagcaagcgtcttattaggtctgagtcaaggtattccccccattaagaagctagcctactttcggtcttggcctcccaaaaagctaaggtcgtacttctaagctcatatagtcaaggtgttaactgaccaaccactcaggaaagttctgatgaagcccgaatcatcaaggcgcctagttatgtgggtagttaaactaggccagtttaagatcacctaccagcctcaaacaacaatcaaaggataggcattagcaaaattcattattgaatgcactggcgatgatgaaaacgattccatgatttgtgaagactaggtccacacgcctgagactgtaacttaggaggacactggaccttcctggaagttatatgttgatggctcttccaacaagcacggttctagtgctagactcatcttaattactccagagggatttcaaactcacaatgctttgtggtttgagttcaccgcaaccaacaatgaagtggagtatgaggcactcctagcagtactacggttagcactagtaatcaaagtcgaatcacttgagatctatagtgtaacacaactggttgctaattagattcttattgagtatcatgcctgagggctaaacatggttgcatacttaagcaaagctaaagatctattagcccacctcaagcattactccctgcaataagtgttgcgtttacagaacaccaatgtagactcactagccaagttggctagcactacagtttctaacacccttagtgtagttcccgtcaaatacctcaccaaatggagcattaatgaagactctaagcctatcctaatgattaaaaacacttcatcatggatgacaccaattttatagtacttagaacaagggattcttcaaacttactagaacgaagctaagagactgtagagaaaagaagctcgcttcatcatcatggacagagtaatttatagaagaagcttctcagtgccacttctgaggtgtgtcacaaaggaaaaagctaaaattctcatggtcacggtataggggggttttgtggtaaccatgctgggggcaaagcctctcaaagaagatcttgagacaaggttacttttggccaaaaatgatagaagactcaatggactatgtcaaaaagtgtgacaaattagaggttctccaaaatacccagagctacccccaaatgatcttaagagtatgcaaacaccctagccatttactgtctagggaatcaacctcataggctcactacttaaggggaaaagtagagtgcaatatgctgtggtggcggttgactacttcaccaaatgggtagaagcaaagccattagccaccatcacatcaaaaaaaaaagttcttgattttgtagtaaagaacatcatctgtcgatttagactcccacagaagataggtcagataatggaacacattttgacaatgacctctttcctatttgtgcatcagacatggaataattaagagtttcttagcggtttcctatccacaagaaaatggacaagtggaagtagttaaccaaaatcttaaggatacgctaaagaaacacctagagcaagcaaaagggaattggcctaaaaaattgcccaaagtactatatgcttatcacactaccaaaaaaatagcaacaggtcacactctcttccctctaacctatgggtacaaagccatgatacccgtggagctcacacctacatcccatcaaagacttacatacgactagcaaaccgaccattagttgctggttgaacccctatatggaattgaagagatcagagaaaggtttgagcttagaaaggttgcgtatcagcaaagggttgcaaaacactacaacttcaaggttaaagataggaaatttaagcttaagacatggtgctacgatgggtattcctgaacacgaaagacgcagcagtaggagtacttgggcctaattgggaaggaccatatgttgtggtagaagtgcttgaacccggaacttacaagttagcatgctatgactacaacctgaatcaagttgtagtaccaaggtattggaatggggtgcatctacgatggtactaccaataaaattagctgtcttcaaaataggttgtttaacaatgggattcaccttaccttgtgtgaatcgatcgcctcttaactgatgggatcctatgaagttgtcctaggctaagaggtccattgctaaggtatggctcctaactaaaaattcgaacagggcattagtatagtg

SEQ ID NO: 225737 - DNA, 4258 bp, Cannabis indica
ggcataaaacccaacaccatggtctgatgtgattactaatttagatttatgagttcaggttcatgacttgcagtatagattcaaatctaaccatgtattacgtggggtatatatattagcttttttgtggaaacagattcgaaaaactttcaagggttgtgacatgattatttattgtgcatgtgctcttgatattactatccccttgaaacgatgcatgaagattaagcgtatgggggtgagttcttttgggtcaatttcaagtatgccactttttgtttcatttatggtattattggtcattctgaatggttttattcgaaactgtttgagtcatctcccgaggaagtttttaattcttatggttcatttatgccagctcaacctaaaataaagaaccacttgattagagcacgttggctaaggaatggtgcaaaagatgatgaggtgttttcttttaaccagtgacctaatcttggtaatttgtcaaaactactaataatttgcttgaggaagggtgtgaaggaggtagggcagtggtggtgagagtgggtcctcctgctattgtttcttagagagatgaggatcgaatggatgaggaatggtttgagatttcgggggttgaagattctaaattgaagcatgctaagggggtttttagcgtggactctaatatgtataagaatatggtttctagtgagactatagacgtggatatgggaggaagctgtattgattcaatggttctaaaaaaaacaagttattggcgggttctataggtcagacccaccctgcatcatgactcatgagcgtccttagttggaactatcgtgggcttgacaaccggcaaaatatttaattccttaaagacgttgttcgttataagaggcctatttttatttttctttgcaaaacattatgcaagaaagataaaatggaatggattcatagacaactggagtttcaaggaatgttactggtggagctgagaggtaggagtgggagtgtagcaatattgtggcgtgagaaagatcagacgagctgaattggtttttctcaaaaccatatttatgttatcacaaaggtcgatggtatggaggcttagaggtaaactaggctttatggtgagcacgataaagcacaatgtgggaagacttatgatattcttcggacttttgttcataattctagattgtcgtggtgtgtgattggagacttgataatatggtggatcaggtagataatcggggtggggtatcgtatcctaggtggctggtggataggtttaactaagctcttgaagatgtggggtgaccaacgacccttggtgctccatatatggtctatctttgaagatcaagtgactcatacaaacttgggtctacgtgaagagacacttttgggctaggcacgtgccatcaaagctagtccaagaatatctgcaacaactatcatttttttagatgtttattttgaaatgttattttatattttaaacttaactcaactaaagttaggaaaagaggtatgttgggttaagaaactttaaaccctacaatgtaaacttatataaaggtggtgaagtcacttgtaaagtggactccacattttgacaaactctcactctctcaaacatatgctcccatattctgaaaactcacttgaggattgaactaggggtgtacgtcggtcggtttggtcgggttatagcatatctttattaacctataaatatcgggttgcaaatatttaatcataacccgcccaattaaaaatttgagaaagttcaaccacccattgatttcgtgagtttggtcaggttaacccgtctaaactgtttttcactttttttttttatataattattattattagtttctactattcaaataattagatttaaaaaaataaaaatataatatttatatttcaagctaaaaatgctatagtttaaattaattttaagaactttaatataagataaatataatagagtaaacacaaaataattaaaataaaataataatgaaaaaaagtaataatatggtatagattttaaactttaactttaatttctaaatacaataaaaattattaactataaagtttaagttttaagttaaacactaaaatattcaaactttaaatacaaaatagtttaactaataaatgtaatttatgtaatataatatatatagatatttttattaaaaaatatataaatcggtttaattgaacggtttagaataatttgtaaactacccaatatattcattgggtggtttagatttttattgtattatttcgtgttgtattttttgtcggtttattcagtttggtttgggcggtttattcgagttagactgtttgtaaattttgttgaacacccctagattgaactctcagagaacataactatgaaaaactcttctcaagtattgagatcaataataatactctaattggactagcttattaccgctgaaagagggtgaactactatgaaaatttgttgttcgtcattaccaattttcatcccataaactggtttactttgattgacatttaattgtgttcatctttctcgtttacaatcttcttagatccgttgatagaaaactacactaacaatattctaactacatagtttgattgttaaccagttctctaataacatgatgtctcatatcaatgtgttttgtacgtgaatattgaataagattttttgaaaatatttatagcactgatattatcacatgcaaaatgacaagaacaggattgagagtataacaattatcaacagatctaaacctttatgaaaatcattattcatcattgttaagatcataacaatgatcattgtcaaaattgatggtatacacatgatcataaatctgactaatactaggtaaatcataatagagtttatgtcctgaaaaacttgtaaagacatttttgattattaataagagttgaacattttgaaatatgcaagaatgttaagttattaatattcaatattaaataatgaataaataaatattagaaaattagtaaagattttttagtttttaacaatgggatacttcactacaagaatcgagtttgtgttccaactagtgacatagttaaaaaataaatgttagatgaagctcataccactctttactcgttacatctaagtaccaccaagatgtatcaggatttgaaacccttttataattggtagcctggtatgaagaacgatatgatggaatatgtatccaagtgtttcatatgtcagcagataaaggttgaacatcacaaacgtgagggtttattacagcctttgacccttcccaagtgaaaatggaaagacatctccatagattttgtggttgaatttcctagaaccatagagctttatgaatcaattttggtgatagtagatggattcactaatttggcacactttctaccaatgaaaacaacctacatagtggaccagtatgcaaaattataggcgaaggagatagttcatctccatggggctccaaagtcccttgtattagatggagatcctaagtttacttctaagtttttagagagtcactagaaagtcatggataataagtttaacttcagtatagcttttcattcttaggccaatggcgagtttgagaggaaaatcaaataatgaaggatatgttacaagctatagacttttgagggttcatggaataagtacataccattaatagagttcttctacaataaaagttatgagactagaatagagatgactgcctattagatattgtatggtagaaatgttattctctaattcattgggatgaaatcaaggaaaagaaatctctaattcattgggatgaaatcaaggaaaagaaatatctgcatcctgaggcagtatagaggaccaatgatgatattgaaaaaattagggtttgaatgttggcttcaaatagcaggcaaaagatctatgtagatccaaagcgcaaaaatatagaatctcatgtatgtataagattatgtgtttctacgggtttcacccatgaagggtgtgatacgctttggcgagaagggaaagttgagccctatgtttacaggaccgtttgagatactcgaaagggttagacatgtaacatactgtttatacctacctccaacattgtctatagttcatcatatatttcatgttttgatgctaaggaggtacatatcagatccaacctatgtcatgggtaacgaagtcttagag

SEQ ID NO: 225738 - DNA, 1781 bp, Cannabis indica
attaattagttaattatatatataaatacttattatgattagttttagattattgctgtattgatcttctctttcctttttctttccccatttattagatataatatggatataataagtataattatattatgagaaatagcaatgtaattaaataataagttttcttattattttgtattagattataaattgtgtaagcccctcctcttgattattttggttatgtagaaatataaaaatctcaattggtttctcatgaaaaccaggatcactctactttttgtgttgttttgttcttcagattatgatgatgatctcatttcataatataaacaaaagaaagaaaaaggtgggttattattctcttcttgttttttttttcgtcctgtctttttctatttttctatgtatattattgacaagctgaaacttcaccgatgctactcaaaatctagtacaagttggccctttttgtggttgtggtggttttctttattgatccagtactctttcccatttatctttttctttctctcatatattcttctgcttatacactgttgtgtactgttaagactatactattaatacatatgtacactccaataatatattggtcataggcttcctcatttacatacatacatacatacatgcatacatgatacatatataagtaatactgattcgtacatttcaattaatttgcactctactatgtaattcatatttttaaccatagaacttttaaaagaggactacaagtctataacacctttaattgaataaaataagattgatttcatatgacaatagcaggctgatttattcttacgcagcagtctgtctatcctagattaatatgaagagaaaatagtctatatatatgtgtgtgtgtaaaaccagaagatgaccaacggcaacaagtaggtactcttgttaattaattagtttatattttgaaattaataatatatataaaacagaatcattcatgtcaatatgaaattaataatattttattttatctatatttcattgaccaatagccatatatttcaataatattgaaaaacaagaagtgatcacatatatggacaatgaaatatgtgtatacatatatatatttatagcatcaataaatacacatttcttataatatggacaatgaaataacaatcgggccttatgttaaggagacatgagacacaaagagcaatcgtccatcatagaattattagttattgtacttataattactatgtctaataataccattcgttttctctttagatttttcttatcaagcccttttgtgtatgtcatccaatcgcttcatatcaatttttttcttaatgctccttcatatgcaacactaatttatggtccaaatttctagtttgattcatggctaggaaacacccacacattattaattattttagagagttgaaatatgtttatatgtgtatatatacttatatagttaatataaattgtttttgtaaaaaagaccatgcataatttaacctataaaatagtaattattctcttaatgtgatatttttttcatggtcgacatgataatgtagagtggataaaagatcacatggagtgcagatatgaatgtgtgtattactataaaaacattatagcttttacttcatgtaaagatgtgattgtttcgacagagatagcacatgcaacactcctgtgtaatcagtctaataatactctgtttttttctccaataatattgtatataaagtactacatat

SEQ ID NO: 225739 - DNA, 1749 bp, Cannabis indica
gatcctactggaggaacatagcaaataccatgaaaatgaatttttttcattcaaaccagagaacttatcttttgataaccttacttccgagagaactatacttcgggattcgacttcctgattaaatcctttagttgtcgaactgtcgctgcattctcgagaccgcgacagttccaagctatggctttcatttggaattgggagtcttttttgggcaagactccacagccccaaactgaaaaacctgacttgaagaagtaacattctccggattcgattccttcacctcctcaataacgcacgaagaacttggctttgggatgtaatcaactaccacgaaatgattgtttagatcaatctttaaatcaaatgcattcttctcccaattcgatcggattgattcttgtctctttttaactgtgttccttgcttgtcgttttagagagaagatcttagggccatggctttgaacatcctttggtggccttcccctgcatttgagtgcaggtttctgctcttgaggattagagttgctacaagccttgccttgatctcgagtaaccggtccctctctcttctgccatggggtagtatcgcacgaaagaccaggagagaattggcattcatctcttgaagctgggggaggcttgtattgttaatgtccacaaccgctcgagatgtttggcccgaatcctcagaactaagagttgattcaggaaaagcatcattttttggttcaataactataccatccaagacctttcttttctttggcccaaaatcatattccaaggatctacaatcttcaatccccagtatacggttaaagatagatggctccctcataaatttgtcaatagttcccaggcccgaaagactttgaacgcatggaccacagatcattagatggccaaggtatcacttgggcctggctacccagcaacggagaataagaccctcggccttttaaggaatgaggccggcccaactcatttgactcctttgaatagtccccatcaatctcaaaatggttatgcacgatcgacttggtagaatcatcttcagaggtcttcatgcgtgaaggactaaccagtacggtggtaggtattgtccctcccgattgagcatcattggtaagcgccagcatgctttgggtattgtcactatcatttttgtttgttaatacatccaaagggggcattacatcaggaccttttggaaccactaggttagaagtatcctcaaacgggcaaacatctccgacaccggggagcgtgaccattgggaaacgacaaactctcacttcctccgtcttaggcatctcctccaccacctgttctaccattcgccttttgccggcaagctgtctccgtgtttctctagcctcccaagaatcagctattcgcagggaattagccatcttccattgatctttgaactttgggtccaccgaaagcctcttttgaatgatccaatcttggaaccacttcggtaggtccggggagaacgaccatctggctgactcttcatgtttcatccaactcccaaacaagggaaagaagtttcctttggggtctttggtgattgttggtggcttaaaacagtatttctgttcatgtgacattatcccgcattttaggcagagctttggaagcttttcatacttgtattggagccaaagatctttgatggcttctcttttcaggaaaaaaccagaaaataggggtttatctgttggaaattatttta

SEQ ID NO: 225740 - DNA, 2225 bp, Cannabis indica
atgaattggttgttgtttaagaaatggaattaagatttgggtgaactccaaaagcattggtaatattgtctgtgaatcgattctcatcaagccttactctttttaattttgtgcagtttctcaggcacttgggcaattctcctgtaaacttattgttgtttgcacccaaatactctagattgaacccgctacacaaaccttgtggcaactttccgaagaagttattgtttccaaacgcaacgaatttcaaattaggactgttcttcccgaactctcgagggactttcccggtgaaattatttgtaaatacattgaacacctccaagttacgaagcatggaaatattaaccggcaattctcctgatagttggttagtgtcgacagcaaaatgtgtgaggaattctagatttccaatctctgtcgcgatggttccaagcaaattgtttctggaaaggaccacaaagatgaggttttttaagttccatagagaagttggaatcggacctgtgagatggttcgaagaaagatataattttttaagtttctttaagtttccaatctctaaaggaatcgaaccagtgaaattattgttgaaagcatagaaggcctccaaattattaagattggaaatattaaccggcaactctcctgttagttgattgttgcttacatcaaaagtggacaggagttttagatttccaatctgtggtgggatggttccaaccagattgtttttgaaaagttgcataagtgtgagatttttgaggttccatagagaagttggaataggacctgtgagatgattatatgaaagatctaatattttaagtttcgtcaagtttccaatctctgaaggaattaaaccagtgaaattattttcaaaaacaaataattcctccaagttacttagccttgagatgttaactggtagttctcctaaatagttggttggtgtttatataaaaaaagatgaggcttttgaggttccccaaagaagttggaattggacctgtgagattgttataagaaagatccaatattttaagttgtaatagattttcgagttggccaatggaagaaggaatactcccactaaagaaattttcatgcagttcaagaacctcaagatcatatagaagactaattccattgggaatgtaacctttgagaaaattagtttgcaaatgaaggtgtttgagctgagaaagtttcgaaatgttagatgacaaatgtccaacgaatttgttatctgtgagattgaaagattggagtttgacaagattagaaaatacagattgtggaattgatccagtccaactattttgagacaagtcaaggaaagtcaagttcctacactttgatatgaaacctgggaatgttgaattaaactggttcctataaagatcaaggtaggttaaagaaggcatgcttgaaaatttagaccaatctgaatttgcaaaagagtttgctccaagggataagtaccatacctttggtagatgggtgagctggtaaggtattggcccctcaagggaattgttgcagagactgagatattgaagctctgacaaatggcttatctccactggaatttttccttcaaaatgattgtcactcaagtccaacaaagtgagcatggtgagattaccaatggctgttggtatcgaaccaacgagtttgttattgttgaggttgaagactgtgatattaaagaaaggagagaagttgaactgatccaattttacattgagttccaagttggagagatctatttgtgagatttctccattggaaccatcacagataacattagtccagttgcagagattaatgatgttgttgttgtcccatgaagctagattagatgattccattgctaagcttttcttccatgttatgagagcttctgcttgtgttgttggtgaggaagtaatcttcaatggaagcaaggaaagcacaaaaatatgaagaagaagaagaagaagagagaaacaagttgttggaactcttttcatggtgttgatatgaatgtgtaataattactaattttgatgatcctaataataatctactaattccatcacgttcttaattctcaaaagtcagaatccaaactccatgtttggcatataattaatttggtttgaccaaatttttttggatctagttccaaagcgtgatccatacttttgtgtaattcacatgagcattaaaatatatccaaa

SEQ ID NO: 225741 - DNA, 1931 bp, Cannabis indica
tgtccatttgaaccggcaaataacccatgtgaccctctagtaagtagcgttcatggttaagcaatctgtcaaaagataaaggaaaaccatcactaaccgttctgtaccgaatatccataccaacctcgcgtgccccagcgaagatgtcgacgacattgttatctatgtctgttttgggaggtgctggggagagacttagttatatgatggtggatcacttgagtgttgacaaaggtgatggtgaaccccttagatgctagcttgattgctagatggacggctgggataacgtggccttgtaggggaatgggaaaaacaatggcgtgtaggggttttggggttgtggtagtctccttcgcctccattgcagctctcttctatcttacatgtaatatataaatacttataaaagcttatacatatagatatatagtatatataatagtccaggcaactattgggagatactggttctgggttggtggatatatgttcatctattctaggcagttaaattatgttgctcacaacttagccaattgggctttatctacttcaagttctgggttggtggatgttcctccctaccaggccaatgattgcaatctgcgcagtacagcatgtattgtatttgttgggctgacaacactcctgctttttattatgtaccacacaatatacacttttgaaaaagagaaagctaaacattacccagctggaccactacttactttacatctctctagaaattgcaatataattttaaaatattattagttttattatttgattgagataaaattaattaaaaaatgtgtatattctgttcagtatgaaaccttgataaaatataagaactcataagcctcatccacgtaaagatagcatttttgttaagcatattatttagcaccatatatatataatacagttcatgaatgattatctttattaatggttcaaaccagattaattaataccatattcctaccaggcatattcttttcattttcttccttcagtatatgtactcttttgcaccatcatatgctatagtcccaatactcaatatcattatatgctatgttggttcggtataaaacttcgataatcagtgttttctatctcaaattgaatctattttaatctctctctctctctctctctctctctatatatatatatatatatatattctaaaagttgggcttagaaaaagcatggaaaatctgagaaagtctgatatacctacccagtctaactactcatcatcacaatcacatatatattgtggctaaaatttacttatatatattgataaagatatagtacaacaaaatttacttttagtcacaacaaaatttgtggctaaaattaaaaaaattatgactaattataaattactattcttatgttgtggctaaaaaatccatcacaaaaatttatgttgtgactaaaaattatcactaaagtaacagtttttgtagaggctaaacataaatacataacgcaagttttagtatcgaaatagacttttgtaacttaatatatccaagttttagtatcgtctgttttgcacgtcacgtactaatatgaaactaaaggagaagggaaatgctaaaggcaaaggaaaagaagtttgagaagaggatgtggatcttttggagcagtcttttggtttttttttttctttagataactggttttagtaatgaatatgatacttaacggtttaaatgtttatatttcaattttgttattttggatgtgttatttcaaaaacactatgttatatcctaaaattggtttttatagagtagttttgtgttgaatttttcattttttttaaaacctatttttgtagataattcatttattttttttttagataaaactggttttataatattgtttattactttattagaaat

SEQ ID NO: 225742 - DNA, 3116 bp, Cannabis indica
atctccggaattgagaaattataactctaatatttatttctaaatattggggtccacattaaaaattaattcacaaatattaataaaataataaaaattagtgttaattgccttttctaatccacatttctagagcgatcattacacgagcagtaagtacatctaccaaaacttcatcatcccattcaaattcacccactttcattaatgaattgaccattttcccaaccaaacccgggtgttgagattcaacaaagggattctcatcatcaataagccacaggtctttgagaatgctcgcctgcgatccatttccaacaacccttctagccgctgaacgaataactccttgagactcaagaatgcttctctaaatatagctcgaattgctgcccaatgttgcagtaagaaaattcccattggcataatatcttgctttaaaaatcttcctaaccaaactatcaccacaagtgagtaaacgccatccttgtttagctagaagagctaaattaaaatctctataatcccgaaaacccatacctccatcactcttgtgcttggacagtttatcccaacttacccaatgaattcctttgttgctatttgaccgccaccagaacttacttatagctcgctctatgtcttggcaaataccaataggaataagaaagacattcattgtacaagttggaagcgcttgaacaacagacttaatgagaacttctttccccgctcttgatagaaacttattatcccagctttgtattcgtttttgagctttatcagttaggaaattgaagaccaccttcttgtttcttccaatggtactaggaaggcctaaatacttactgttttcattagcttcctggatccctaacctttggcaaataacttcacgcattggagtgtgggtgttgctgctgaagaagactgttgatttctcaaaattaacacgttgcccagaagcttcagcaaaggtttgcaaaagcttgctgatataaaacacttcttcattagtagctttacaatacaacaagctatcgtctgcgaaaagcatatgggacactataggagcaccgttcgccaccttacaaccatgaagccatttcttttcttcataccttctaataagagttgacaatccttcagcacagatcaagaaaaggtaaggagagataggatcttcttggcgaagccctctactaggcactataggaccgagagtgtaaccactactcacgatattatattgcacagttgaaaggcatccataaatgagtcgaatccatttttcagtaaaacccattcggccaagcattgcacataagaaatgccaatccaccctatcatatgctttgctcaaatcaagcttcaaggccatgtaaccatctttaccactttgctttctcttaagataatgcaggatctcaaaggacaccataatattatccgtaatcaagcagtccggaatgaacgcactttgattaacagagataatttcagccattaaacctttcatcgtattagcaagtaccttagttattactttggcgatgacattacacaaagaaataggtctcaactcactcatttggtccgggttctttttcttgggaatcagaacaatgttagtgttttgcataccctcaggcatcatctccgaatgaaaaaactcttttactgaacgaatcacatcatctcccacaatacaccagtacttttgaaagaactttgggttcataccatccggtccaggacacttatcaggatgcatttggaacaccccaactttaacctcttcatcctcaattggccgagtaagcattctgttatgctcatctgtaactacaggcactacacaatcagtaacctccccccaattaccttgttcagcttggaaaatatctttgaaataatcaaccattatctcacccaaaccattattccaatctcgaagaaaacccgaactatctcttaatcttacaatctgattattacgcttacgagagttagctttcgaatgaaaaaacttactgttttgatcaccttcttttaaccacaactgctttgacctttgacgccaaaaaatttctctctggtttagcacatcaaacagccgcctcttggcttcataaaattgttgttttccctcaacatctcgtcattttttcagcagctttaaagcatggttacattgctttattctcccaccaaagttaccagttatacctttaccccattcttgaaggacctgaccacaatgattgattttttgagcaatagaaaccccacccattgaacaccagctatcatggataatcttctcacaatcctggtgtgaagtccaacaattttcaaacttaaaagttcgaacaggagcagcagctacatggtagttagaatctaaaagtagttgacaatgatctgagggagaaacttctaaattaaaaagctttgcagaaggaaaaaaagataaccaaccattattcgccattgctctatcaagccgagcttcaatccaattcggtgtatccctacttttctcccatgtaaatagacgtcctaacatatccaaatcgcatagcccacactgttgaacaacttcttaaaaaccttcaatcaaccatgtcggataaggattaccaccacgcttctcacattgatgaagcacatgattgaaatcccccatgatacaccacggagccactgatcgtgcaaaacgagtcctgagcagaacccaagtttgtcttcgttggctacggttaggctccataaatcccagtaaaacgaaatggtcgatgcccttccaccgttatcatattgtcaatgtaatttttcaaaaaaagtctatagccacctcatcttggttcctccaaagtaaagcaataccaccactatgtccatggcttcaattgcaaaagagccctcaaaattcaactgcctacataaagaatccatctttttttgttactcaaagtttcacataagaaaatattactggtcctatttcgagcaatcagctcttttaggaactgaacattccgtgttggcccaagcccacagcagttccaactcaatattttcatatttgtgggcgagccccatttccaaggccc

SEQ ID NO: 225743 - DNA, 1728 bp, Cannabis indica
ggggttttgaatggacattccagctgagggagcttgtgattggcccaatttaggctcgatgtctactcgctgaatggcttcttcaagcttgatgaaaccatctgcacggtcgaggaaattacacatagaatccactggaccacttttcttgatatccttccgcagctctttgagaatctctatgcctcctagtatggcggctaatttcccctctttagtttattgtgccacttttgttgcctccgtcatgaatctgctcatgtaagctcagaggggctctcctggtctttgcttcacttcgaccaggtcttctaaatgtaacgggagttggcgagaagaagagaattttacatgaaattgtgaggagaaggccttccaagagttgaaccttcctggtgtcaacttgaagtaccattgttgagcggcttctgagagtgtggcagggaaaactctgcaacacacatctcctcataccccttgcaaatccatttgcatttcaaaatataagagatgtgataagggatcttctttccctatatacatcttccaggtcggcatcttgagcttgtggggtaaacggggatccacgtgttcggtccaacttgagatcatttagcttttgaccggctaggccttgtaacatattaaagctgctcagttagctaatccagaattggtgaagatctgagagggggtttcagctggtcaagctagagattttacagtgtcagatagtgggatgctattgtttaagaccaggatttgtgttccaagtaatacggaacttaaaaactaaatcctcgaagaagctcataccactccatattcattgcatcccggcactaccaagatgtaccaagatcttaaaccctacttttggtggagccggatgaagaagaatgtggtagaatttgtatcccggtgactaacttgtcaacaaatcaaggctgaacatcagagactgcagggttgtcgcagcctttgacacttcctgagtggaagtgggaggatatcaccatggactttgtatttggattacttagaaccacgggtttgtacaattcaatttaggttgtggtagatcgtttcacaaagtccgcacattttctaccagcaaaaacaacctttacagtggatcaatatgcagaattatacgttaaggacatagtgagattacatggtgttccaaagtctatcatattggatcgagatctgaagtttacttccaagtattggcatagtcttcaacgggctatgggtaccaaactgaaattcagtatagctttccatcctaagactgatgggcagtccgaaagaacaattcagatataggaagacatgtgacgagcatgtgttatggatttcgagggctcctggagtatgtatctaccattgatagagttctcgtataataacagttatcgagtacaatagggatggcttgctatgaattattatatggcagaaagtgtagatctcccattcacagggatgaaacgggagagaagaaatacttaggtccagaatcagtgcaacggactaatgaagccatagaaaagattaaggccagaatgcttgcctctcagagtaggcaagagagttatgcagatccgaaatgcataaatgtacagtttcaggtaggagatcatgtgttcctacaggtgtctccgatgaaggggccaaacgtttcaagaaaataggtaaataatgccctaggtttacaggacc

SEQ ID NO: 225744 - DNA, 2529 bp, Cannabis indica
tgatctatattaataagtaaaactcattatattgaaatgagtttcatttagggcataaaacccaacagatgcatccatcatatcaggagcatacaagcctcatgatcttcaatgatcctatcagctgcaacatggagttgtgagtggacgacatgtttgtcaaatcgaaaagggatgggggcatatggaggaccaagacaaaaaatttcaaaatcctattcagctacaacatgaagaagctcaaacccaaacaagatccaagcccttttaaatatgaagtcgcccacaataattaaggaagtacaaagccaaaaaggacgcactgctgcactaaacagatttgtgtccaagtctacaaacaaatgcatacccttcttcagcattctcagaggcaacaaatttgtgtggaaaaaagaatctgaaactgcattccaggagctgaagaaacagattggctctgccacctgtcttaccgaaatccctaaacaaagaagagctaggcgtgcacatggcagccacagaacatgctatgagtgctgccctcataagaagaaaaatagtgtgcagcagcacgcaagagattggttgacactaaaagttggttcctactcatggagaagctaatccacggcttgctcttggcttccacaaatctaaggtaatacttccagatacaccctataaaggtgtacatcgatcaatagttgtggcaggttctacagaaacttggagatttaggcgaactactcaagtgaaccattgagactcaaccaacataaaagcacctcacaaccaagcatgtccaccaaaggccaagctctcactagcttcatggcgtatcatagatgcatatctccccaaatctatcagagtttaggagaaaagaagaagccagagaagaagcgagaacaagaacccaagaggtgcattgaccaactgtccgatggaaacatggcccccaaggcacctaggggcaactaaggaacaaggcaacaaggtcagttaaaaagcttctcacattgaggctgaacatgaagctccaaatgctggcccgaggctagcacacgaagcacgggctaacaacctagacatgcaccacaactctcagctagtcgtaggttatgtcctaggtgaatatacaactcaatacaagaagacgatggcctactggagccgttaagattgctcaaaggctatactagaaggtaagcccccaaataaacgcaacagctgacgcactcggtcaactagcctgatgcgccttgacaagcaaggaaaacttggtacatacttagttcttcaaaaaactaagtccttttttcaaaaggaacaaacatgctagagaagcaagatggatacacctaaaacaacatgcctccaaacaaaaaccttcccagagagcacgaattaggaggacggctacaaggtgtccatttctgcacagcataacacacagaagtggtatccttacgcctccaaggagtgtttccaagaaaggagctatatagctattgatagaagtgcacaaaggctctacgataattataccgggagcaagaccaatcgaatgcagacgggatcaaacagcaacatcgaccaggcctttagaaggttggttgaccatgtcctcaacaatctagccggccacagaatccaaaatctagccgaccaatacatccacatgttggccatccatggcctcatccaaccgcccaagcaatgctcccttaatgtggctggccacctaatttttccctggccagtccgatccaccagtagtctactatcatacttctggtctacagtgaccaagaggtacacaacatcttgctactaggatcccttgacaaaagggaaagaagaagagaccaagccagctcagagcagcatggatgcctgtcaacaaacagatcgaggaaagaaatacttcgtaagagaattactccctaaagaatattccttgacagcaaagatcctgcaggaagcatgttcggaccaaaataagaaggtctacaccatgttacaagatagcaataaaggtgcatgccagtctggcaagtacaacaagaacttaaagtcagaacttctacccaaacactgaaatagggaacatcttggtaagtactctcactagtccacttgtcaattaagttcctctaagatttgatcgtgcaagaacccataaaagcgctagtacccacgatcttctagtcgtggtctcccaccattcttccatggtgtcctttgctttgctaagccgcgcaagggtagccactatgtgatttcaaaagcggacactaggttgtaagcttttgttacacattagactgaccgtgtctaaataacttgctcacgagattaacttcttaaagttactctattagttccacatgcgtaccatggacaccaacccaaaggaagaacctaggcaaagtctatgaaagttggtgaatagtaactgacaattagacatgcctgcatggtcgcttgagaggcggccataccgtacaatgcattaaattggcacaa

SEQ ID NO: 225745 - DNA, 2462 bp, Cannabis indica
cttggtttttatattctaggaacttattttttgttatatgttttgcttgttattgatgggtagtaagcttcgggaagaccccatatcatttgtattatttttcatattaatagttcaagttctgattttttgtttaaaaataaataaataaaacatttacatgcccattcagaagacataaaacataaacttatggaagaccaaaaatactctttggaagaaaaacaaaatacagacctggattgagtccaattccacttgccgaatgttgttctccaccccctttgtatattcccgtagttttgtgcctttggatagaatatttgcaactacctagcatagaaatataatagaatacatattaagagttttaaaccttgaaaatacttgaacggaaaaacatgaagaaaaatcaaaactgtgttaatgggtaaaagtatgttacagaattttcttaaataatgtcatcctctctaattttcaaatgtaagatataaagttcctcctacacataatggtgtaagcatggacatgagttttaaccctctaaaatggcttaaatcatgttcatgtgagaaaaattaaatcaataaaggtaaaaaaaaaaagatagtagtaaaaagtcgacacaggcacaatatctcatccaatacaaataatgccaaaaaaaaaagtgactctaaaaggctaccctctaccaaaaatgctaactactaccatatcaaaatcctaaaagtgcaacaagatgtcatgcttttggtcaatgttcttcaaatgctttaaatgaaacattgaagatcattgagcctttgaggattccacactgcaaaagttggacttcgtgcatctcaagcaacctataaacatcacatcttattcttaaatgacattgcttacatcatcatttttgcattcttctaattcttgctgaagtccttccaatgatatgtcatcactgaaaatgagggaacaataattaatatattcttctcagtgtgctaagcaaatcacaattacatatggccagaaaacttattgccttagaattatcatgtcaagcataaggagtgatcattcttctgttttttaaaagaaaaaaaattgtacaggatgactggatacaacaaagaaaattacaacaaaataaaatcctgcacctagctaatcaagagcattgttcttaaattctttgacatcatgaaaacaacagacaaagcataacaagtgatcaatcattttaagtaatcaacggcgtgagtaaactagctcacattttctaaccttgctcttcacaattttccctgataaaaacacacacacacacacacacccacacaagtaacatcccccaccctaaacaccactaccaccctcaaaaaaaaaagtgtgcaatttctgtcacatcattttgcaccatgtccagtgtcattgtctttatgttcgtctttttttctttctttctaacaagtagcgtagcatctatatttaattggtttgttctcaacttctcattactagcatgattagaaaaagattaaattgtcataatttcattctctacataaaatcttttacatatattaagtacaggatacaaaccacacatatacctgtttgtgtcttcctcaacattcaagtctccaacaaatgtacccaaatcaaaaacatttttttgcgtgtcattgtactcttggtaggagtaaccctgtgcaaagtatacatgtaaacagcataagaatttaatttgccgcaacttaaagaaaagttttacattcattctgtaaaaggatttcagctttgttacacacaggctatttcaggcataataagcaagaaatgtaactatacctctttattgcttgcaacttcagccatgttcaactacataagacttagcacatcaccgatgatctagttacactgaaaataataataaattaaaattaaaagaccaataattgactacaaaacagcaaaacaagaattaaaaagctaacataaagatttgaagtcgatacctttccttctccaacgccggcgtctagatctccgtttcttcgtccagatcggagctccgtcgcaggtcctatcgtcgcctgaagctttccaaactgaagtcgatctgcctgtagcacaagggattgaagagaagaagaacgtgagtgtttctgggttggggatttggatattttgatttttctttccttttgttttacgttttataagattagttcaattattatccttccaactagcaagacccgaaaatctcaaagaactttctcaacacccaaagcagggagggaagaactttaacatcatttcacatcgaagcttattaatgatatgaatgaaataaaagtctcaatcacattacattatactttgaatttcgaaaccatcaaagtcgatgcagacaacaaagaagcatatatatatataatgagtggtagactcgcaat

SEQ ID NO: 225746 - DNA, 2150 bp, Cannabis indica
ggggcaaaccattgtctcggtcaaatggccattttaaaaaaaaaggaagataaataaaaacaaagtgtacatggtgggagacttggatggatttttcttcatcttcctctgcctcagcctcttcctcctccttacaagacttctcgcagaaagccatagcttcctcttctttctcctccaagaagcttgtgtccatgttgggatttgccatccaggctcgatatacagtacaaaggccaaccttgttgcatctttctatggtttcgacctccttctcagcgagtttcttctcaaattcatcagcttgggccttgatggtctgctgaacttcttcaagatctctctttgacttctcggcttcttgtttgaggcgggtgatttcctactgggcgtcgtcctgttgcttaatcacaaccctgcattaggatagtaattcttggacctcgccctctacgtatttgagtcgctccgagaatcatcgattggaaggaaatgagaggaaagaagcctggagaattacaaaaaaatgaatataagaataaagagaaaaagtaataataattataataatatgaccaacttaccatgaggttgtagtataagttcctcaaaagcatctcttttggactcccaagattgattagatcccaatcagggaaaggagagccttaagtttgtgccagcaagcaatcctgtacacctgggcaaattcatatctagcctcccccactacggccgacaaggtctcaatggcctggctctaggaggtagaagcatgagctgtctcaagaggaggagcgttggtgtgtggaatgactggaggaggaacttgttcttgagtctcggtagtagagacctcgaggtcaataggctcagacagtgacttctttttgtgggtagaggttttcctttaccttttaggaggtaccacctcgggatttgcggggacccctgggttagttcccctcttcttccctttctgatgcaagatatctgtaaaacctcccatgtctgcaaaacaaaataaagtgttacaattattaaaaaggtagataaaaaaaaggaaggggggagtacaaatttcaacctaagggatttaccgaagtcactagaaggcgaggtatcactagaagaaggggtagaaggaccataatattcactaaaatccctacagtctgtaaacttgaatatatcaaagggctcgattggttttaaatcccagctcgcgtctatatgacttgccctatctatcatagtgccatattgctcagctataccataatatgactcgtggcagttaatctagacgtggaatctagggtattagctgtcaaacttatgaccgactaggtctatgagaaaagaatcccaaatataaaaattaaggatggtgtctcgaaaggtgattaatgtgttacgttcagccctaagtactatgtgagacgaaccacattgattacctcgggacgctccttcaccaacttcctgaggggcaatgttttgaagatactgcgctcgagccacgtgatcccaggccttatcctcctatggaatcgcaagtatactccttgttagtaagaaggcccaccaatcattaattggcctcgttcaaaaggaagtcgcgtgacctaaggccaaggggaagagtcattaggcgcttatgctgactgaccatctcgggggtagggatggctctcgtcgagagggctgcaaaaaaaacaaacaaaacattggtcagaaaactgcgaaacaaggattaatttaactgagcatgaggaaaacaatcacttacgaattctgcaaaaggtggttgtgctgaatggggaaagaccagatgtccaaaagaagtcttctttgaaagacactttatttggcaggtccacaataattttaggtttgctagaatgagaaccaatataatagaagccccctgcagcattcttcctcgctggaacggccttaaccgaatagagatactcgatttctactggtgtagggcactcctagttcagaatcgtctacaagaccttcaaactagtgagtattctgtaagtgataggattcaactggaatggggcaaccccaaggttgtttatgtaatccttgaagtagtcttgaagagaaagtatggcccctgcattaatatgctc

SEQ ID NO: 225747 - DNA, 1557 bp, Cannabis indica
aaaaaaaaaaattaattttcaattaaaacattgaaaagtcagttataaaacatgtttttaaaaaatattttttatttttttaattttaaaaacagaaaattaattaaaaagtattactaaacaacacatttattaatgaagtatcaactaccatcatatatttggcgatgcatcaacattaaaaaattgtaaaattttagtatataatagattttatattatttcaacaacacaatacctaaaattatattagggattagattttatttatatgaaatagaatattaatttcattatattataacacatgtaatatatacactagtagcaaaaaaaaaagtttaatgttgtcaacaatacctttgtagaaccacatcattaatgatgatatatatatatatatttgttgatcggctgaagataaataatttagaattagtttggtgctttgtaatcccattggagctgctttgtaatccctatgagagtggatcaatttagaccgataagcctttgcaatttctcatacaaagtaattgcaaagattctatccaatagattaagacctcttatgaataagttggtagccccttatcagtctgcctttattcctggaaggtggattgcagaatcttcgatccttactcaagaaatagtccataagattcgccaaaaaaggggtgtgggagggcttatggctctgaagctagatatgcacaaggcttacgataaaatggaatggagctttcttgaaaaagttctaagtgcgaatggctttaatgatcggtgtaggaagcttttgatggcgtgtgttacaagtgtctcttactcggttctcctaaatggcagccctcttaaaaagatctctcctcagagaggacttcgacaaggtgacccgatctctcctttcctgttccttctctgtcaggaggtcctttccaaacttatctgcaaggcggaagagaggggatccatccatggtattaaaatagctcagtcagcccctccggtgtctcatctcatgtttgccgatgatacaattctctttgcccgagccaatgaaaaggaagcaaaaaagctaatggagtgtatctccgtgtatgaaaaatggtttggtcaatcttgtagcaagccaaagtcgagtgtcttattctcaagaaacttgtcttctaaaagaaaggagcagatcttgggtaatttgaacattgatcaagcgcgtggagatgagaggcatctaggcaacccgtttgtttttaaaagaagaaagaaagaggattacttgcggttaaaagaaagcttgatgaagaaattggaaggatagaagatgaaacttctctcttacgcagggcgactaaccttaatcaagagtgtgacttcagccatacctatctatgcaatgtctacctcaaggatccctctttctagctgtcgtgaattagatgccttgatgcgaaaattttggtggcttggaaaggtagacaagaatagatatcttgctctcaaggcatgggaccaaattcgccaacctaagttatcgggaggtttgggggtgagaag

SEQ ID NO: 225748 - DNA, 2254 bp, Cannabis indica
tctctcctttcatgtctataaaattatctttaatagtagcattttggagaatgcttgacaagatagaacgtttaagttgcaaaatatagagatgttaaattatgggagataaaagaatattattcttgaaatttgaattgatgccacacaataacattgatgctatgttttttttaagaaaaataaaaaattaaagttgcaatatatatataatagtttaatatagaaaaagatatttatatatataataatgtgtaagattataattataatatttttaaaatgtgttatattattagagtgtttttagatgtaaaggtgctaaaaataatgtgaaagaaagataaaataaaatatatctttagatgatgtagatatatataatatctttaatgttaccattggagatgttttaatatgttatgttattttattattataattctttttttaaataattagttttgcctctaaaagctaggatttatcttttgaattattggtgatgttagaaattaccatggaactattcacattattaaatggcaatgccatgtatacaataatttataaatttgtgattaaatttgtttttagtttcaatacgtgttgtactaaatttaaattaatgatacctcgaatttaaatattactaaaactcacaacaaacttattaatgtaactaaaatttcttttttttttaccggtaaagaactttattaatcaatttcatttgggcatacccttttcaactcatatcattcctataagctcttgacaaactttaaagcgtccttatctaagctagatatttccttttcattaataaagaaaactctagttttaagactttctttaactagaatatcaatacaatgaggagccacacactttagctcaaacacacacaagtttcgattcaactaatttctatacatagcattggccatagccacacaaaacacatcggtcaaaaagctcttgggcttcctgctattcatccattgaatccattcctcttaatcacatggccatagtttactactgagccaattccctatgagttgcataacttgccaagagtaaggacaagagaaaaacagataggaatgactctccaattcaagctcatataccgaataaaagggtgtaacaatagacatttgtcttttaataagactgtctcctatgagaagatgaccatgaaaggcttgccaaacaataaaacaatattttggagctgatagattacaccaaacagtcctctcaaacaatacatgagattcattctccaaaatttttttatacattttacttaccttgaacctattcgccacacaagcctcttggatctcaactccgaagaaaatctccccaagtctcatgagctttctccaataccaactcacatcttgttgaagctcatgagaccacacatattggcctcgtaagatacaatttatcaacaaaatatcttgccttaaattaaaagcccacaaatattttgcaagagttggcttatttcatttagacccatcctgaaaactaagacccctaaattttctcggcttacaaacacactctcacgaagaaagatgcatcttactcgtgctcccattgtctccccaaaggaaattcgacaaaattgatcaatctcctttgtaatctgttgaggaagtaggaaatattcatctagtaactccttataccaattagaactgaattgataaggggagatttgttagaatttattccttgaaaagcttgtaaagatatttctatttgtaaataagagttgaatattttcatatatgtttaagttaaaattatttatagtttatattgaataatttatttataaatatcgtaaaattttctattcatacatgagattgtgacttgtatttcacagagaattaagattacttagccatgaataaaatagtcagcaacatattaaagttatggaatctttaaacaacgattgctagtactattaactcgaaaactagccctgatgacatggacatcaatgtttgacatgtggcaagaaatatgacatctcagagttgagtagtcccgagtcataacaagtcaacttgggtgggatccctaaccctatgccttggttgacttcgagaactctagaatgaaagttcaaacttcaataacttgaatccaattaactccctttcaatgttctgtaccatgaagacatggagcaacctaatccaaggtccaagagctgaaatta

SEQ ID NO: 225749 - DNA, 1661 bp, Cannabis indica
gtcagggctacagtaggttgcccatgtctccaggggcaactcggatgcattgctggctacctagttgagaagctcaactagaaagggtgcaacttccctctccaccttaagtgccgcccgcttttctagggcttcgatgtccaccattagcccaggaggaacagttgcaaaaaagatcttcagaggttttagccctcttcattgcagaaagtctgtttgctctcatgcgcaaatcctccattcttcctcgtgtcacctcctcagatcatttttgacatcctttgccctctacatagtgacaaattccaacaatcactataactcccctcaagagacacactcccacatgcatgtgatgccagcaatcacatgcagttaagattttgcccacgtgccacactaataatgcccactgcagtggctcattaactgacaaaaactcttagaatatgagacgatctcagatagtctcacgtgccatgggtttatctcgaaaagatgagaagggctacaagctctcagaccgcgttgcgtcccaaaagcttggggataaatgttatttgtatttatgcaagacatgacacgtggcttttaatggaaaccttctcgcagcaagatttgctgcccaagagtgggataggaaatgcctctcccaaacttgaaagggcctagtagaaaggcttattttagatggctccccaaatgctcactagagaaacctattgcggataccgaccatcatgggtatttgtggatattgacttttctcatgagccaggtcaccaaaggaacgattatgcttttcttgacaaagtctgatcttgtcacctacatctagacatggcaatttgtgcacccccaccatccttctacctgacggacattatagaatactgcttgaaaaggagcaagcttagagtgacacgtgtttgtcacttttaaaggttgaacctttgcgtgacaggtgtttgagtggtacgaaatagcccccattatccatctacagcatgcacaggtgtaatgttactcacgagaccaaccagctagctcattaccctaattgtgggatttaagcagtgatcctaggtaggttgtggggcgacccacacccatcacttaacctataaataccccttccattttcatgcaaaggggtcaagcaaaaaacacacaccaaaaactctgctaaaatcatccttgaccttcttcttcttcttagaaaataacttaaggaaaaagaataagggtttcctatataatattgtaaattcatcattatttgccagcgaggctatagactaactcgtggactagggtttattaacagatgaaccacgtaaaaaatcttcctctcttgattttcactttactatttctttagctattaaatattttagttttcaaaaatctcgataaataaagatcacttagtcattagtaaaacagttagcaacatattaaagtttaggaatctttaatcagtggtttccagtacagttcattgatgcccgttattcagtgcaagtaatctcacttttgattactaatgtaatatgacatttaagtgagtgtgttgtatataatagagattatatatgacaggaatcgatatcaataaagtcgtctttatcaaacttactgtttactataaagacctaatt

SEQ ID NO: 225750 - DNA, 4056 bp, Cannabis indica
  modified_base (21)..(21): a, c, t, g, unknown or other
gagaaggtacgaagggatacncccggagagcaagactataacaaagcacctccgggaggtatcaaatcctatatgaacagtcacctcgcatttaatgtcgcatgggagaaggcgtattggaactgccataagtattaaagtctgatggcgtaaccccccttctgcagctattacgctatgattaatgagcctagtgacggctactttatgagaaatcacatcagtcaagaaaaggataatggattacatccacctaacccctaaaagcctagggattagatcatgcattttctataatatactcgttgggaatgtgtgcctttactgaataatacagaaagatatgtacctcaattctagggatcaccccacaaaaacactatatatacccccaaactcattaaggcaggggtcgagaattttgggtttcataagaactagagaaaaaagtcaccaagaacattctctgtaataaatactctcataaataacaaagactcgtggactaaggctcattaatgccccaaccacgtaaaaatctcgtgcattaacttcttacagctttcttatatattattattttattggttgccgaaaacctcggtcaacatgttctattttttccaatcaatacaaacatatatatattatttgaatattatttcagtcataaaataaaagtatgtttcttcttatgtcaaataaaaaattatgtttcttctattatctaatttatttgctcttattactataaaatccactttcttattaaaatgtattgttgaaatagttttagcagaaaataaaaaagaacaaatttactgaattaaaatctgagttaagtcgcaaattatgtcactctctttaaaacgtttgcgacattgtccaaaattgtgcaagcagactattagtctcatcatccctaagataaaacaacccagttgaatcactgtattggagctctattgcacaatagagaacaatcgaaataccacacccaacaaagctactgctcgaaatacatattgtaatataattctatataattttttctataaaaaagatgtatttctcatgttgattttgatgcattatataaggaatgcacagaagattgtaacggaaagaaatacgtttttgatcaatatgggatcatgagaacgatgttgaatatcaggacgggaaaatgtatatgtttaatatttaattaaacatgtttaaaagctgttttaaataattaaataaaaataataattttataaataatttttttttcaaaaaataaggtgcacaccacaccaacttggctcgaacagcagcgcgtgttcaagtgagtgtttgtgtgacctctctcttctataaaagtaagtaccccttgaaaaaataaaataaaccatatatattttttatttttatggatattatgacaaaaattattaaaattatggtttctttcttagaaaagggtatttatttatgagaaaaattaaaaacaaatattaaaaaaatggggaaaataaaataaagtactcgggaaagggttatcctattttttttttcattttttttatataaattaaatatgatttctgaaaataaaaatataaatataaatggtctatttttaagagaaaaaaaaatcataattttaaccatttttatcatagaatccataaaaaatatatatggtctagttttttttatacaaatatatatgttttatttgaatattattttattcataaaattatgtttcttctgttatctaaactattttctcttattattataaaatctactttcttattaaaatttattgttcaaatagttgctgtagaaaataaaaaggaacgaatttactgaaataaaaattgggttgagtcgcagactaggtagctctctttaatacatttgcagcactacccaaaattgtccaagcacactatcaatctcgttgtcctcaagataaaatagctcaattgaactactgtattggagctctattttacgaaaagaaccgtcgaaataccacacccaacaaaaattactgcttagaatatatattgtaatataatcttatataactgtatataatcttttttctttttctatgatattgatgtattatatagggaatgcacaaaaggttgtaacgggaagaaagacgtttatgattaacgtgagattgtgagaacgatgctgagaattaggacggaaaaacttctttgtttactaattaagtaaacatgtttaattcgagaggcacaacttgttatcaagcttggtattcgaaggtgtattggctcgggtcagtttactaacatcttgaatgaaccctggttgaatgatgatcaacatccctttattatttcatctcatccagccttggtcaatcaaaaagtttctgcacttgtcaagactactatcaatgaatgggatgaagaagttcttcgtgatgttcttacggaaagggattacaagcttgtcatagctatcccccttagtcaaacatctatggaggataaatggcactggtataaagagtacatggggctgttctctgtccgaagtgcatgccagctgattcaagatagcaaaccggtgaatggacagcctgataattctggtttttggcggtgcctttggcaactcaaagtccctccgaaggtcaaaaatttcctctggcgtgcgtgtacgaactgccttccaacttgtttccaattatcattaggaaaagtgccgattgaagtcaagtgtccaatctgccatggtgaaaccgagaccattttgcacattcttgttgagtgcccgttctcttataactgttggaggactgctgctatttctcaaattgcatcggctgcaacaagctttgcgggatggtttgatgatgggttaaaattatggaaaaaagaggaacaaattggagctacaatgttatgttggtcaatctggaataatcgcaacaactccgtttggaactctaagcaatcttcagttgaggaagtggtatctacaacatctcttgactttgtttcttggaataatgcttaaaagcagtcctttatatctccttctggccacggtcaacaagggagatttattgagcattggactaaaccaaatgatccttatatcaatgttaatgttgatggtgccattttttcaaatgaggaatgtttcggttatggattggtggctaggaattcttccggttatgtaattgaagctgtccaaattcgaaaaattggaacttggagtcctttacttgtggaggcaatgggtttgaaggaggctcttagttggatcaagaggaaagattggcatcatgccattatcgaatctgattgtcttacgcttataaatgatattaagaatgctaaaactttagattctccttatggttttgttttacaagattgtagagggttgttaacctctttatttgatgttgattgtaagtttgttaaacggtctgctaatggtcttgcgcatgctttggcgcgggcttctctctttgaggctgatcgtattcttagtggggattctttacccacttgttatgcttccattattttgggagatttgatttaataaagcttgacatgtttaaaaaatattttaataactaaataaaaataataatttaatgaacaaattttctaatcgtataaaactgcatataattttttcaatgagaaaaatatttatttctctcactggttctgattcattatatagggaatgcacataaggtagtaacgagaagaaagacgtttctgattaacgtagaatcatgagaacaatgctgaaaaatcaggacgaaaaaatgcctttgtttactaaataattaaacatgtttaaaattattttaattacttaaataaaataataatttaataaatacattttctctaaaaaataacgtgcacaccacaccagctcgactcgaacgcaggcccgaccctaagcataggcgggttaggcctgtgtctagggcccacctagcctaatggcccacaaaaaaaaatcctttttaaaatttatattttttta

SEQ ID NO: 225751 - DNA, 2067 bp, Cannabis indica
cactctctctctccccccccatctcgccgttgaacccccaacaacccactctctctctctctcatcccatcttgtcgttgaaccacctaaatcgatgcatccctctcgtcctaccgtaaacttgcactgcctccctctctgatcatcccttcctctcttgcgacgttgaagcaccaccaccaccaccaccagctagcgtctaaggtatatttgtttatttatttataatctaaatatatatatatttagatatatttatttatttatatattttttaaagatgaatatatgtatatttatttatgtaaatatttaggagaaaaataattatttaatttgaagttagtttttattgggtaaatttaatatgtaaaaatttgatgtgtgttttaaaaaatgcaatgtgttataaagttagtttttattataaaatatttaatgtgtaaaaatatttggagaaaattattttttaatgtaaaagattttggtttaggtaaaaaatatatttatttaatttggtattgtaaaaattatgttaatttagtttaggtataattataaattgttattagataaaacaaataattattagttaaatgtttaattattttttatgaaataagtttaatttaattatttaattaagtgttaattaataattttttgtaggtatttgataccgtttgaaaaattatatttaggcattagtggtgatcttgttcaagtaagtttattggtagctttattagacttggacttggtaggttactaaaattgtgttgttaatatacttattagtgaagtttaggtattgtcagcaatatatatatttgtgtattttcagtttatacatatttatttatatatatatatatatcagttgaaaatagtaataaagataaaaaaaaatttatctacttttactataatttgataagtttagctatttaataggtgtcgagttctttgtggttattaaagagtgcacaattgtaactatttttattggagaaaggtataatcatgaaaactttaaaactctttatttagtggagtttgaatatgttagatattcatccttagtgaagtaggttctgtgattaattgtaatactgtcggatgggtgaaatatgcatgttagatgagtttaaatatcttaaatattcatccgtagtgaagcaggttctgcaaatacatatattgtgatcggatgggtggataatttttacattgttaatgttattttgttatttttatattattttatgtattttattaattattttttcatgtttaaaattttggagaacgtctgatcacagccattatgctactgaaattttgctagaattaggataaatttaactaatatatatgtgtggtaattaatttaacttattatttactacacatattcaaaaaaataattaaataaagttttatttttttagaagtttcaaaattgatagaaattggatgagtgtgaatagattatcaggggagtatagtgagggtgttgacaattttttggacttttgtcagaagtatgcaaaaaatcctgaactggtgaagtgtcctaattgtcttaaatgtggtaacatagagtgtatggacattactaagataaaggagcatttgtttagaaacggaatagacaagagttataaggttagggttaaccacgggaaaaagaatagagttctaggtgaggaaacgtctaagtctaacaaggttaaggctgttaattaagactatgaggatgatcacattcttgaaatgataggaggtatccaatttgaattaaatgtcgatccatttaaaattttatagttttgtagaggacatcgagaagcctatttattctaattgtaataggtttactaaactatcgacacttattcgattatacaatataaaagccaaacacaggtggaatgatgagagttttacagatttactagctttcttagtagagttattaccagaaggtaatgtggtgccttcatctttccacgaggcgaagaagacactttcttccttaggcatgcaatatgaaaaaatacatgc

SEQ ID NO: 225752 - DNA, 2421 bp, Cannabis indica
cacgagcccaaaagtgacttcctggtaggcgaagaacaaggctctaagcaaccaaatcttggagagcccacgatctctttctcaaaaaggagatccttcccaagatagcttcccacacaacgatcccctggtcattacccaaaaaatcaggaatatgactgcagcaagatatatggtggacaatggaacctcttttaacattcttttcaaaatcaacacataaaaagatgaggctccaactcactgacttggcgccctgaaatcaagtgatgtgtggcctttctggccgaagcatcacactcattgggtatattagattaccccttgtattggagaaagtccaaccaccaaaaatttgagagcgttgaacatcattatcgacgttcccttggcttctaacaccatgataggctgactgggcctatacaacctaaaggcgataacatccatctaccacctttgcctgaaattcctaacaaggcatgaggtaggatgtcgagaggagattagcgatctgcctatcactgttacaacttggccttgtccaaagctaagaaatagaagatgcatccaacatattaggagaatacaagcttcgtgatagacttaggcctgtgctgctttaaagtcacacccttcagggctaaagaatgtaggggatacacattagaagcttatggacaaaatgttcaatgatcctatcagccacaacatgaaggtgtgcgtggacaacgtgtacaaacaccttgtatactacacaaacaagagacaaattgacactaaaagttggttcccactcatggagaacctgacccacaacttgcccttggcttccaaatagctaaggctatacttctagatacaccccataaaggtatatgttgttcaaaagttgtgataggttctacagaaacctagagcatcagaccagctactcaagtgaactactgagactcagccataaaagaatctcacaaccgagcatggccatcagaggtaaagctctcaccagcttcagggctaatcacagaagcatatctccctaaatctctcagagttcaggagaaaagcaagagccagggaagaagcgagaataaaagcccaagaggtgcgttgaccaccagggggagattgaggcacgaggcaacaaggttagttgcaaagcttctaacaacaaggctgaatatgaagctctgaatgctagccccaggctagcacacgaagtgtaggctaaccacctaaacatgcaccacgactctcaactagtcataggttatgtcctagttgaatatacagctcaatacaataagatgatggcctaccagagctattaagacagctcaaagcctatacaagaaggaaatcccccagagacagcacaatagtcgatgcactcgctcaactggccagctgcaccttgacaaccaagaaaaatttggtactcgctcagttctccaaagaactaagtcccgtttcaaaaagaacataatgccacagcagatgcacttgccctcctagcgagcagtaccatagctgacaaagcaaacctagtgtccatctagttcctaaaagatctcaacattgttgtcccagaagaggtcgacatgctggatgacactctaacatggctaacacctatcgcagcttacctccaaacaaagaccttggcaaagagcagggactgggagaacggctacaaggtgtcaaatcctgcgcagcataacacacaaaagtggtactccaacaccaccaaggagcgtttccaagaaaaagttgtacaactaatgatagaagtgtataaaggctctacgtcaattacgtcggggggcaaagccaatcgaatgtagacgggatccaaccacagcatcaactgggcctttagaaggctagtcgaccatgtcctcatcaagtttgcttgccatagaatccacattctggctggccaccacctccacatgcgggccggccatggcctcatccaattgcccaggcagtgctccctcaatatggctggccacttggtcttgctctagcaagcctgatccaccagtaatctactctcatacttatggtctacggtgaccaataggtgcacaacatcttgctagcagaatcccttgacaaaagagaaagaagaagagatcaagacaactcaaagcagcataactgcgcataaggagttaccaggcccatcaacaaacagattgaggaaagaaattcttcacaagagaattactccctaaagaatattccttaatagaaaatcccctgcagcaagcatgttcagaccaaaataaaaaggttcggaccattttataagataacagagaaggtgtacacaagtctggcaagtatgacaagaacttgaagttagactttctacctaaacactgaaatagggaacatctcggtaagtactct

SEQ ID NO: 225753 - DNA, 2891 bp, Cannabis indica
aaaaaatgaataaataaaaaccaagcctacatggtaggagacttggatagttcttcttcttcttcttcttctgcctcggcttcctcgtctaccttcttagcttgcttgcagtaagcaaggacttctctcatggccttgcccaagaatttcaaatccatccctagatttgccatctaggctcggtagatggaacgttgtgcaacagtattgatcgctcaatggtttcagcttctttccccttcgagcattactttggctacattaagttcctcttagagaatttggccttcttcctggagtttctgggatgactcggtcttatcttttgcctccttcttagcaactccaagctcatccttgtgggccctcttcatctcctcggcttctttgcttaggcgagtgacctccgccttggagtcattccattccttggtcacagcctcgcgttgcccaatcaccttctggatctcatcctccagatacttcattctttccagacaccgacgttgggcgacaaaggatatgaaggtttgctgaaaacaaataaagaaagaatgtataaataagtctgaggattgttaaaaggaaaagtgaaacgagaagggcaaaggaatttactgtgaggctaagggcaacactcttctcaagcatctcgtccaggaggtcgttgttgatcaagtcccagtcgttgggaacgaaggatcggaaatgatgccaacaagttgcgctaaactccccagtgtactctgagccagccctcctagcctcaatgggcagagtctcaagtgcttggctcgaagaggcagcaaactgatttgccttgggcatgggcccttcagtatgtgtggaggccgaaggatgggtctgagcctgagtctcagtcttagggacctcgagatcaacagtatgggaggctcgcttcttgttggcagttgtcttcctgggaattttgagaggctccacattgacatctgatgaagtctccgagacagtcaaccttttctttccctttttacctgaagattgaaggaggtcaccgagattcatttctacgagacaaaataatgtgttaacacttctttaaaaacaagtaaaaggggaaattggaaggttatctcccacctatgagatttaccataatcgtaagaagacgaagaggaaggactataatattcactaaaatctctacatcctatgatcatgaatatatcataggaattaattggttctaaatcccaactcgcatctatatgacctgccctatccagcatggccccatatcgctcagctatcccataatacgagtcagtacaactaatttggacatagaattcagggtaccccaactatcaaacctatgtgcaatgcgatctatgaggaggggattccaagtgtagaaattataacggctatcccgaaagaacactaacgtggttcgctcagctctaagcactgtgggtgaccaaccgcattgattacctcgggataaggctgagcacaaaattcaaaaaaccaaaaaaaccgttcaaaactgacctaccgaacactgttagaactgaaatcgacgaaactaaaaaccaaaaaaactgctaaccgttaaaaacgccattgaacggttaatttttttgggtaataaactgaccgaaaaaatcgaaaccgaccggtatacatatatatatattaatttattaagttttttttttgctttgtatattgtagttactaataatatattattattttattaatattaaagttaaaagaataaaataattagttcttgaacaattaatttacatatttgtagttgtaaaatgtagaataatgtgttcatagaataaattgtatcaaataattttttaaaaaaaaagttcggtttgggcggtttaaatcgaaaaagtcgtggttcaaaacagtcagttttaagataggttcaagattgattggtcagttttcagattgcaccaatccagacctaaaactaaattctagatttttatatagagaaaaatcgaccaaactgattgatgctcagccctacctcgagatgctccttcttcggcttcccgagggactatgctctgaaggtaatgcacccgagccacatagtcctgagtttcctcgtcggctgagataggaacctgttgccaagaagaatacttggaatatttgtaatcacaagtaaactccttcttcgtaaggagatccacggacctcaagttgacctcgttcaagaggaactcagccgatcggagaccatatggaagacccagcaggagcctgcatcgctcaaccatctctggagtagcggttggtcttctcgagatagctgtcaaaaacaaaagcaaaattaaagtcagcgaagccagaattaaagacatggaataatttaatcaagtcgtaggcaagtaatcacttacgtattatgcggaaggtggttgtgccaattggggaaagaccagttgtctaggaaaagtcatctttgaaaggggtcttgtttggcaacccaacaatgatcttacgatcgcttgtgtgagtcccgagataataaaaaacccctgcagcattcttcctcgcaggaaccgccttcactgagtaaaggtactctatttccaagggagtggggcactcctagttcaaaatgttgtacagaaccttcaaacgtgtgaggattctataggaaataggaaccaacaggaatggagcaattctgaggtgattgaggaagtccttaaagtagtctcgcatggggatagttgctccaaccctgatgtgttcgaggctctaagcacctatccctatcgagccactcctactggcctcgccactggtcccttcagatgcttcgcgagtaagtcgttgtgggttttatgccctaaataaaactcttt

SEQ ID NO: 225754 - DNA, 4008 bp, Cannabis indica
atatattttttttcttattttgtattttatttagtcgagaaatcgtgaaatatgtgaaaaaaaaattagcgacatgtagccacggtaagtgaaatgttgcctggtgactgaactgaaaaaaaacgctaagttttatgcaacttttgctggccatttgtcatacactgattatccttagtttcttgatgagctccaacgaccataccaaccacctgggggtacggctgacgatccacctgctactgatggtggtgatacagctatggccccgtagtcctaggtgctctgatttgttttctctcctttaattttattccacagtgaggacactatttattttaagttgggtgatgggaaggcaatcttaatgtttttaattttttgtatttgttttaattttaatttagttttcatgggtagatttaaggctttatttattattgttggatgactatatcaacgttaacttaagacctataggaattcgatgatgaacttatactaaactctttgatattatttagtatgtgtgaaaaacttttggattgtgtacttaacctattatgctttcttttgatattgttatatgagttatgtgttgttctacttgttctatatattgtgattttatgtaccagttaacgcagattttcgttaactaaaataaaatatcctttatgtaataaattatctttagaaatatatataaataataaatgatcagataacaccagaaatattttacgtagtttgtagttaaaatctacatactctacaagtccctattattagggatatttattgagtacagactacaatatcagaatttgaataatagtcttttctctctcaattttttcgtcctctttttctctagaatctgccccgatttataggaatataggttggcagttattccttttggggttgattcaaaatataacggttcataaaacgtggataatctccatgtttcatttaatcatatgtggactaatatttaataattactcaactgcttcttactcttatcctttagatggttattgctgagttggaaggtcgtatctcgcttgattcgagttatcctccttgtccatcttaataagaaaaaaatgttaagtcttaggaagtagatcatctcgtcatattcttttattggcattaataatgtgaggcggtcttctccctatgtgtaatgcaaggcaattatgttgttgcattcattctactcgagtggatgaatatccccctttatgtgtgtgtatattctgaggcatgtatatgtctcgttaatcccagctcaatagttattatccttgtctcgctgttgactataaagtgaacgaggtttgatagttttgaatatttatctatcaaacctctatgtaataataatgagttatttaatatgcaactaaggatataatattggtatatccttaaagttgattcatattccctctgttagacacatgtcagcttctggagaacggtcgaatttcgggtataacaattgccccttaaaaactactttttaattaaaaagaatattttaaatgattacaagggtattttcatcttaaccaacttttgaaaaattgcatgctttgggttttggcagttcagaactttgaggaacatcattagcattaaatgctctgactgtaatcttttccaatattccaatctgttagctcagatttctctttatttatcaataattgagtataaaaactgggaattacaatctatttcaccatttttgtatttcaaaccttcaaatcttttctctgaatcccggttgtttcttccttaaaattttcatgccctcattgtactttacatatttcttgcgtatcttaatcgatttcaaccatcatcccagagatcttcagaacccaatctcacaattttcagaatctcaatcatcaagcttttctctaccaagggattccaaccaaaatagtaagtaatacgctctcattttttttaattgtttcttttcctgaactcatattcttgctttcttgattgatatccttttatccgtgctgtttggttatttttaggtaattttgttttggcagtttgaataattttagggttttaaggaaaagtctaggttattcagttcataaatccttaggttatattgtatttagattttccagaaactggggcaatcatttgttcacaaatatgacctaatttttgctagaaattacaacccccagaattcttagaaactgattgtcctaaaaattttaccttttccttcgaatctaaaacttatgttcctcaaaccagtcttaagatgaatgatgccaagattagagatcatctaatacaaacaaatcaagacgagattttaagtcattgtagacaatttttgcaagaaatgtcattttctgcgagatgcagcttggcctaaaccctaaattttatcttctattcctttagcgagacccttgtttttaccttgagacactattgtttttcaccaggtgacctaaacctcgaaattatgacttcacaagtccaaaaatcaaagacttcttaagatcccacagttacattcgaggccgaacttattgaatcaaaggttaggtccatagcagcatatgttggggatgcattaagatcatgtgacatcaaatacgagaaaggatatcgtgttaaatttgttgctccaggagagtttagttatttttcccctgataaaataatctgagagagggttgtagtaccagtggctcatctagaataggcgcttgaagccttcagcacatcagagatggggcagtactccctctgagatattattacaaggagatctataattatctcgtaattgccccttttcagttaattctgagttcttataggattttggcatgtttaaaggtcttatatcaaattatggagtgggagtgtccaactcaacttgaaattttgtacatttactctgtgaaagcctgtcccgcaaggaagcgaggatcaggtagtttttattatctcgggtgccacagtaatgatcgaaggattattgtgaggctacctaacacaactaagttcaaggatgatttcttctagacatctgatctctcccccatcaatacaactccatttcgcttaatatgtaagtactacccttaaaacttggttttgagttttcaatttataaattgaaggcatttacttattgtgcttattttattgacagcaatctcgaagaggcctattctaactcccaagatggagaaacaacacaagattgtcctaggtcttccgtttaggttgcattcagctgactttctattgaacgagattaatctaaagacctctaatcttctcagcaccaaacaatccacttttgacttcaaagtccccaaatattctaagtgacaacaggttcctaaccttgctgacgaggaagacaagaactgtgtggctcgcatgcacttcctaaagaaaacatcccctcaggaagctaaagaagaagcaacccgtggtaataactgtggatgtctcctaacgtgcttagggctgaccgtactttgctaattaaatttgaggatagccagtataatttttatacctaggatagtttttgtatagatcgcataactcatagatttgatagttggtaccccaaatttcatgtccaattaagttgcaatagttcttacttcagaattgctgagcagtgtggtacaaattttgatagggcgagccatctagactaggacatgtctccacttaatccctttgatctgtacatgattgctggttctaaggagtttagtagttattatagtccttcttcatcctcgtctgataactatggtaaattcctctaggtgggagtttattccccaccttttttattgtttattttggtataagtgttgacttatttcttttctttgcatatatcgatcttgaatttgaagacatgctctttagtcccactctctcaactaagaagtccaagaagcgagcgac

SEQ ID NO: 225755 - DNA, 1505 bp, Cannabis indica
gatgagaatcaagcaattattatcttaaattcactgcctgattcatatagagaagttaaaacattaatcaagtatgaaagaacttccgtcacccttgaagaggtaaaatcaactctcaaatccaaagacttaaaaatgaagaatgaaaagagaaatcctggtaaggtgagtttcatctctagaggcatcacaaacctggccaccacgataggtcaggtggacactaccaactcgattggtcttaaaggccaacctttgccgccccaggaggaccctccactagcacctcgtactgaaagaatggccaatgtggagcaacctttgggcacctcgactggatctggtcctcggtattatgctagaaagacgggatcaggaattggtgagcaagccattagcaagcctcatgtagacttgggagaagatcttgggttagccagacttagagaggctgtctgtcaagtcgaccaaactgaagaaccacgtgttgttaggtacgatacatttggacaacagagacgcaaatttctgagattgatggatgaccgagagtacatcctctaatctcatcaggcaaaattacactgtcgtatagagaagctagtgacttgataaggcagttcaatgaaagaactgtcgggagaggttaggatctcatcggagatcctctccaagggagaatagtcgacagatcgggaatggtctactgacaaatggtccaaccaagttcttctagaactaggatagaccttcccctgcctgaaggaggataagtcttgccacgaagatctggtggtgaaaacagccagactcaggcaatcagcggcttagagagctagccagggatctctagcatgaaaattcccctacttggccaacctttgggcggccagtcctttagtggtgaacctctggttagccaaaaaggtgaactcccatcccgagacatctgggagtcacccaaaggccaatctttaaccagctaggtccgagaacgggtagaaacatccaagacaacaacaacttgagaagtgagactaatcactacaaatacttagatccaccgaactctagaaattggtgtgatctaccccttgtcaacacatgggctacatcagccaatcaaggaagaatgggcggccaggccctactcatcatagggatagttggccatgaaaagatgcctagagtagggttggtcagccatggctagttcccttacccagggctggccggccacagctagctaccaggcttaaggctggccagccttaatcataccctctcctagggtatggccggtaaggatctagccaatcctgggttgtagcctaaccaagaaagactaatcaacccagcccttgtagcattggatccttctgtgcaagcacagttggatcaaataagacacatgattaagggcttggctggcccaaagccttcaaaccttaaactagataagtcaaagggcttaccattcttggcatacatcaattccttgccct

SEQ ID NO: 225756 - DNA, 3452 bp, Cannabis indica
tgaaactccaaagacccaaattcttctcccagatttttgcctttctttttgaatcttctgggttttagtggcagtaaaaagacatcacagagagaatcgtcgaattttaaggttagttttcgaaactacttgcgaatttttgtttctgattttgagagaaacactctgtatttgaaatttttggggaattaaaaatgcatgttgttcatagggaatgcacatatagccttacttttctgctagaagtgattaatttccaggaaaaatagacctgaaatttgtacaatcgtgaattcaaggaagagtactttgaatatttgcatcttttttacttgctattttgagtactcgcaagtattgagatgaacatctcgaatactcccgtgtacatttctttaggaattcttggtacttggtcactccgacccattgtttagaactttagggctttctttatgctttttgtgtatttttgtgtgtgaatactggttgggtctttcaaatggtgtgtgtgtcgccgtagccgaatgttcatgcgtgcgattgcatgtcccttgagttcttgcgaaacccccagccatttgagacataaagccagttttcctctttccttgcatatccaagggtttcaactcgtaggatttctcgaaatagtgaggagtttcctgttagcccaaatgtttttcgagaagggcacgtcccttggtatacaggagactcctcagctgtttcttgaggtacgtcgccagttggatatgcgtgatgtgttcctaggttgtgattagttggatttctcaaaatggtgggtgtttcctagtaactccatggtcatgcttaacaacgcatgccccttgggtcgcggggagacacccagccattttttttgaggcactctactaaatgcacatttgcaatttacaccttgggaaggttggctggttttctcaaaatagtgggtgtatcctagtaccttaatacccatgtaatcgacatggtcattaggatattaagagacactcaaccatttcttgagaggccaaaccaactcttcaagaaaatcttgtgttttgtgtgcgggtgaggtcacttctattattctcacactttcataacactgaaaagatcttctatcttctagatgagagacttatcaaacagccagatgctcggctcaggaggtgatgccttcgctgacgaccaggaccaagagaatagttttattccgacttttatttctgagacagaaataccagctgttagaactacgacgttgggtccgctgtcctctgaggacatagaaaggatggttcaggaactcgctgaactagggacaatcgagattcgtgatagcaaatctacggtatctgctcatgaacatcttgttcactctaggcatgctcctgacgttgaagtagaggagatgagtgaggactaggagattccttaccgcgagtcagatgaggaggacgacgctgagggaagtggaactgattcattggataacacacaactaaacgagcccttctcatgcgaggagttggtctcacgagtcaccaaatccgacctcactacttttaggaggttgaatttgttgtgacttagcaccatgcgtcctcgctctactcagagaccacatctttccttcaccaatccgacaataatccccatggagaatgtggttgtctctatacccattcttcgatgtggcttattgcttcccttccatccattcatcgctgctattcttaagcggtatgacgtatccccctttcagttaaccccaaacagctatcgcagacctcttggattttatgcgatgtacatggagtacgcgcatagggagccttcaatggaggacttcagctatttttatgatataaagaatgtgggccttcataacagtttctattacttcagcaagtgggccacttctgaaatcaacggggtagaaggcatggtttccaatatgggagattggaaatctaagtagttctatgtatttaaagttccagggattaggactgactttaatcaccgacctagtacgtccaacttttcagtacttagttaatattcatattaccttatgatatcgattaacatgtactttcttattgatcgcagatagaccagctcgacctgttctggacccagctcacagagaagtcgcagaagttctcggtagcctccccgttcacgatcgcgattggcgattattgtgcacaactccaaagctgcgagaacataagctaattcttgagaacgcaagccttcatctagagccagtatacaaagagccgtctgaaaaacaaaaagagaaaatagacaagcgtcttccgaacaaacttgccgaccaacatcaggtaactcatcgtgtatatgcaataaataatcataaattgtttatttttaacttaacttttcttgtcctagcagaaatgactttcttgaagcaagctccagtgcttaatcgcaagctaaaaactagaacgacgacgacttctcctatcgttccttagaagaggaagagtgacgtagttgcaattcctatttccgactcatccaacaagcaaacaaaaccttctcaggacaaggggaaaaaagttatgatcgatccaggtgttcgagctcgtgacatcctagctcttcaagagaagttcatgggcgaggaattcatgtcaaagtttgaagggactccttctgaggaattaatgcctcgctatgcgaagttggctttgcagtttatcactatgtttttgagggcgttcgttgcttgctctaaggaggtcgaccttttgaagaaacagattgtccagcttcaggagaacaacaaaaagctgaagcaggacgcaaatgctaaggacaaagagctcgagaacctccagaagtccaaagagcaggtggaacttcaagctaaactctctcagtcaaaggtcgaggagttgtctcgcgacttggagattgagagggagaatgggaagaagaagtacgaccaagcggtctctgactatatatatacaaccttgtccaaggtaccagatttcgacttctcaattcttggagtagaggcggctgagatgacgaaagcattttgcactatgtcgcctactcagactcaggggtgcgaagggaatcttttcccttaggacgcagagactgcgaatactgaagaggtcgctgatgaggctgctagtaaggtcgcggaaggctccactactccaactgctccaaccactccgaacgcttgatttatctaagtttttatttctttaattattaaactctttttagcgagacatgggtactcgcgttttgtacttggacaaatctcactttgctttctttctatttcgaaccgcatatatcccttcgaggatatttacttatctgtttgctttttgcggtacacgggtactcgcatactatatagacttaatcgaaaactatttttt

SEQ ID NO: 225757 - DNA, 1642 bp, Cannabis indica
acgagtgatgctttttaacttgagtataactcaactcaaaaaagcaagggacaaactgagtggccaaaaattgactctaagcccaacgaaaaggcccaacgatcgaagtacttacaaagtccacttataagtcaaaaacaaggaacccgtaagtccgatggctcaccatgggccacgcccaatccatgtcttttgggtcatacccatattcgaatgtccaacccacaatgaagcttgatcttaaagtgtaatattagggttgacacgtggaggaggaagaacgttaagtttcctaactaacccacgaaaatagcgatcttccctagcatagcggagcaagaatatcaaccctctaagtgatacgctaagggtaggatgctcatccaggaacgaacctaaaagatgacgctcatccctggagaagtggaggaagaccatttctctagggacggaccacgtttcaagaggtagccgttttcctaagataataaataggcccacactgggactgagaggggggatgcgaatattcactctctctctatagttttacgactaaacttatcatttctctacgatctgacgtactctttctcattccggtgagcaaggtttgactgtcgatcatcacataaccatagacacaggaagtatttatttacatttcttattttcttttctacttcgcactataaatttactgacttgaccgtcagagtgccttcagccggcaccaccccggtgtcccaaggtttcacggtcatcctttgtctttgttccgcaggttgtcggtgcccactaacgctcattccgaccattatagattttagcatctacagatactaaaatggcaaaaatattacacaaatatattgggtctgctttataaactattatacaacccagtaacaaaaatttacaagaattcctccttctctaaccattcaatcgtaggaaccactttcttcaacaacggtagcttcgagcaactaaactagcacgccaatctaaaaaacctaagtaagatggagaatcaccataaattttggtgacttcacatgagaaaaagaccataaaaaatccaaacacatacaatttcagatttatgcaaaatcgtgcagaaaattggttcaaaattaaaatttaaccttgaattacgatttaaatctcataaaactaatcctcctaatattaattttcagattcaaaaaatgtggatctcttataaatagatctggaattctcgatcaatctaaaactaggtatgatccgaaaaaaaatgtaaaaatactaaaacaaatacttatctcgttgcattgacgttgttttctagatttttaatttgaatttgaacatatcaaatcatgaatagtattaaaattcaaatagatctatagacacatacatcaaaaaattattctagtttgttaagtttatgaaggattgtattacagttgtataatgattttgctaaccctttgaaacttgacatatcgttgattacaaattgataacgatacaatggtgtttatcataattgcaggtgttatccacttatccttattcccaaatgagttctacacggaagtatcaaaaggttgtcgtatgggaatatcccaggttccccttccttttaagatag

SEQ ID NO: 225758 - DNA, 2077 bp, Cannabis indica
ggctgaggttttgaagaccgtagatgaatcaaccacgttgttcaagtcagaaggggatgtcccttcgtttgtcactgacgatgaagaggacataaggccaaagaaggaagtgcagcggggaacggcaccgagaaaggaagagatgttgacgacgccgctggtgaaggaagaatcactaacgtcgtcggagtgggttctaccactagtgatgctaccgatggagaaaatttcatcttcaagcaacgaagaagctgcgtatggtcttcatccatcgaagaagacaagtcctgggaagggtattaaacattttacattgaaaccctattatttgaagcccaagcccaattcattaataaatgctttactggcccacttttacaaatatataatatataaacttcatttctcatgttcctgggctagaaatatggaatcctggttctccatttaagtcccatcactacaagtccaagcccaatttattagctttcaccccagatctggcccacttcagcacattaattgacttaaaaatttcaattaatgggtcagccaacttggacgcagatcccacccttcaaaacgaggtccatcttggaaaaacttttaatctaactttacaaagtaatggatcaatcttttgggacccaggtaaggcccaacacacttctctatcttcctcttcacctctttgtcatgagaaggagttctcttttccaatagcttctctttgtcaagcggctaagacagcaaccattgggttactcacaatcagagatgtcgactttcattttgtgggatcggagatacaatcgctgctaacgagttgcaggcggcaacaagcgggtggcgtggtggccggaacacagctttcacgttcagcttttgggtatgacgaagtgggaaagacaccaactgctcgttggatttttgatagaggttgaagagttgactgtgtggtactcgcagttcaagcgattaacacaacctttcaatcacttgtctcaagtaattgtttctctccttcatctttattctgggttgacttggtttatttggacgggtttttggaaaaacttcttcacaagagttggactttagatgatcgtgatttggcgtttaaccaggtgatccatttcatatgcatgtattcttggcctgacattcatgatatctcactggcaggggtgagtgatgagtccatatactatgggttatatttacctacacattattctctcaaaatgctcactttattgactattacagcacatagatttgggttagagaatggactgtggcacccaatttctataaatagtactttgagaatagaaaacaaaagagtgagagaaccaactttggacaaggatagccaggtggagttaagaggtaattcccagttgccactaaatttgcactctgaaattgggatacagctgtcatataaagaaggtgcactcgtcactattagttgtcgcttaatctacataagttggccacattttgtcaaccaattggttactgaagctctttctgcttggataaattatgttagattgtttgaaaggatacagaagaacttgtataacttgcagaagcatcacttacaaagctggaaatttgataacagagggcaaacatttctcttttatgcttgtgcaacaagtgtgcctcctttgcactgtgcttctatttttggggttgaggaacatgttctgagacagactataaggaggatttttggagatgccaagccttgccctgctcagtttcaattcctaaaagctgggttggtgcttttcctggagtcgtatcgatacacatgcctcaggaagatcttcgaaatacataccgcagttgactatcgcaacgggcgagcgccattacttcattggtttgttgacggaggacgagcacgacaagagcaattagaggtcgccagctatacgtctctgctcagctgttttttcgagcgtggtggacttgctgaagggtggcgcctctctctttgcttgaacgccatgcacttgttggcttggttctttgaccgaggacgcaaagttgaaactttgtg

SEQ ID NO: 225759 - DNA, 2344 bp, Cannabis indica
acactttatatttactactacttcaggagggttttattcttaaaatttgagcttagaattaaatgtaagtaaagtgataattaaaattatttaatcgtaaaaaaaactcataattaattagtctgatttgtttaagcaaagtagtcttttcttaatgcaataaaagcagtttagaccctctcctcttctttgcccatgccaagtctttttgagaaaaagcgtttatatcataaaattacatcaagttagacctctcggtcattacaaaatagagtttccagtatgaaagagaccgggagagacccaaacacctgataggtaaaggcccatctagctacattatgagcggcaaagttacaaagtctactaacataagaaaaacaacaactactaaaggagggagaagaactagtacaaaatgagatatagttctcgattgcccaacgagaccccttcccattgatagtgtcgacaaccactctcgagtcattctccacaataacatacttagagccgatatccaaagctactgacacagccaagcagtaagccgcagcttctccacaaagtgcatccgagaaatcctcccgagctgtctgaactctaatcactctaccaagatgatttcttacaacaacagcagtacacatactctccaagcccacttttacatcacaagtcagttattattgttttattttattaaaaaaacgaaaaaaagaacaaacttactaacaattacaaatgattattttgcattaaaaatttaatttatttttccatgtataagactcgtaaatgtggtgaggtaggtgactgacacactgatttgtttgtcaggagttattttaattgactcacgctgaattgaagattaggattttgctgacaaattcttttggttttgttttgttgatagtcaatttattttggcttcttacaaataattggtataatttttagaaaatattaataggtgctttaagatgaattcactacacatcactccgtatcaattgtatctctacttataatctgaatttttatatgatgatgtttattataattattaaagattattttatttttgagaatatgacattcagagttatgtgataggtaagagagatattgagtaagttgcataattttaaattgtttgggaatattttagttagttataacatatatgtaatatatatgtaatgatatattgaatttataataaaacatttgttttggtttatcggctaaactaatttatgtacatcttagaggtcaaaatttcaaatctcaacttagtttttttgtagtttatttatttattttttttaaaaaaaagattgtcttaagatttgaacccttaccaacaaaacttctatgtagtgtcttaactattaaaactaaccattttattgttatttttttttactttaaattatatttaataataatatgaacatagaagtttgtataaatttttaacatattatatcgtgtagaaaataaagtatattcttcctaacttacaaataaaaaaaagttcgccccctcaatttaaattcaaagtctgccactgtatgatattacacagttaaaaatacttaaatagattgataggtactaactatgtcaataatatgtatcttcttttcagtagctcattatttaaaagttccaaagttaagtatgttagaaaaacttgtgttggtttggcaggcttaaagcaggggcgttacagtatggctctgggattggtacgggctgaactagggtgcgagaactgtttaaatgaatttttatttttattttcaaaattaaaaagtacacggaattttgtagaataagttgaggaatttttaaaaataccgtattttatgttttatttataattttaccacttaaagcttttacttacaaaaatatacttgtaaagttttaaaattataaaaatacacttctctcaataaaaagtaaaaaaataactaaaaaacaaataactataaattaattataaataaattttaaaacaaccaaaaaaataacctcatgagttgtgacaaccataataaaactataaataaattatatatatatatgaaattattattttaaaaagaggtattttataaataaacgaagatgctcttttttgtcgtgagtgctcaagaaagagaattccatatctaaggacgagccgcgtcggtggtggttattttcagggttaggaatgctcaggtaataaaatccattgcaggagatgcttttttttttgggagttgtataaagttttgagaataattatcttttttaccccctgtacttatgacactatactattatg

SEQ ID NO: 225760 - DNA, 2542 bp, Cannabis indica
acctaattaatgaattttactcaaatgaatccaactatttatctttaaaaaaaatacttaaaacaattatcctccacaatacaaaaattaataaattgttaaacatgtcttctatttttattaacaatttttttacctaatgaataaaactatttatctaaaaaacaatatggagagattatttgtttgctctctaattttctcattaattaaacaatataatgagattattaattcctttaaaaaaaacctaatatctttttcttgagaacattgatgttataagacatcatcaataatatatatggttattatttttacttatgcatatttatgtaatatacatacatattacaattgtttattatgtaattttttattaagtataaaatggtgacattatttttcttttaaaataaataaactgattttttaaaaatatatatatgcgtcgggcctaacttggcccgattatcttaggtcgggcctgacccactaggcaaaaaggagtcaggccgggccaaattgatatcgggccgagtcggggttgtggcgggtcgggcccagcccggtctggcccgattgatattcttatttaaaagtctaatgactttagaccaccccgtgaccttcaaagggaagggaccagcagctagtcttaggggaagcctcgcaagctctaccagaaaagtgaagaatatgagattcagagggtgaagatcaatgaactactccacactcgaacatacttatgtgaagaatgaggtgcttggtgtaggtagttcgcctgaggtcccgacgaacaacagtacgaatacttcctttgggtgcctggagacatgttgaacttgaaaattttgtccaattccctccacacatgtgtctctgaggaagactatttcaaagaaaatagtttgtatagtactacgaacagttgctcatgaaggaaacactcaagatacaattttatcatcatagaggagaaatcctcacggttgtcatcaaggccacatcaccagacaataaccacaaggcccaggtcaataaatgcctttgatcaacttggaagacaaaagaacctacataacgacatcaaaaataagtagctagctgatacacacatcaccacaatgtataaggctgaatttgacacctttgtcgctctggttaagagtatcactactccaaagacaacaaagtatgtattagattgggagtggtgttatcctctctcagatttaatcaaggctttagagatcccttcaaagttcatatatccaatgtggtatccatacagtggcaaagaagacgctctctctcacatccacaactttgaagtacaaataagtagcaaggtactctagacaattctcattgtcgagtctttctagtgatgatattagaagcaacataacagtggtatctcaaactttcccctagatctattgatttttgggagaagctcaagaaagcattatatgaccaattctttcaatcaaggcatagaccaattaagctaaccgatttggtctgcatcaagcaacaaggagagaaacctttaaagggttacttacaatgattcttagaggcaacaacatagacaaagacactcagtgaagatgccaaggtcatggcaatcacagttggaataacagtaatgagtccattctagaaagatttgaagttcaaataagtatacaccattaaagagcttctagacacagttgatagtttcatcaagcttgaagaagccgttaagaaggttaaaggagttgctcaaccagaagcaaccgattacaatgcttatttatttcttgattctcaaacagacattgaccaagaaagtgaagaagaaataacaactaatgcctccacgaaaatagactcctcttttatttcccatgatgaactcgagcaggagatagtgatgatgaatcccctgctacttatcaagaagacgtcgaataagaaagcagtgataaagaatctccccctacttcccaagatgactcaagagaggggggagggatgaagattctccctctatttctaacaattataaagaacaagggagcaacagtgaagatgtgtgttattagtcttcgaaagatagtgaccaagaaagcaaaactgaagactccaattgagagaggggaggcaccttaaattgccacagaagcgtttgaacctcgaatggatctgaaatgataataaacaggttagtgtttgctatgactgccacttgaatccagtgacagtacgaaggcactggaatggggaccatttgaaatgataataaaatagttgttccctaaaaagttcgcttcacagtgatatttactttaccttgtgcaagtaaatcgatcacctctcaaaccataaagatgagacaaagtcatcttcagttagggaggtattttgctaaggtatggcctctacactatttttcgaatatgacattagtgtagtgggctatgaaaaaaaattaaagtctacaactacgacttcttttcctttcaacttagctcacagtgatgtaatt

SEQ ID NO: 225761 - DNA, 1409 bp, Cannabis indica
acagtgaaatataatcatgattatatgtttcaaagtttatctcccataagattcaaattacacatcctctaaaacccttttacataaaaactttttctctggtttctctctcgctcagcttttgagctggcgccatggcaaagacgagatctaggaatttggggaagaagttatctgtgtcgaaaccaaccaaacctgcaaagaagcgtggtccgtcgtcctctggtgatggcaaaaaaaccaaatcaatggaagttgtattaggtattgaaccaatcgtgttcacagatgaagaagatgaagagcagcagtcagtgcctgatgatgatggtttcaaacatttatctcctagatcttcacttcgcgagttgcaacgtcaggatgaggttcgaacagactttgcacacttcttggaggcaaataatcaatgtaacagtgatcttagccaaggtaagaactctgttccccctgtcttacgatctggatctgttgttcgaagcttgaactctacttttcagaatgttgaaaaacctaatgtgaagataacactagatgatattgaggaggaggtttctttttggaaatcagcaattgtatggtatgtgttaggagctaaccctccattggaagtgcttgaagttttgccagagaatttggaagaaaagtggataggtggtaattcgtatggaatttcatcataagattcacgtctgttgaagagagggatgttgtcttaaatggaggctatactttcttcaataaacgaccgatcattatgaaagcctggaaccctgatactaattttcgaaaggaggatataagaaaggtgcctatttggattcagttagagcacttggaattgaagtactggggttagaatacgctctttaaactggttagacatataggagaatcgattctggttgatgaaataaccaagcacgaggcagaaattaaccttcccacgggtgcttattgaagtacttatgaatcaagaactgccagaatccattgagtttgaggatgaatatggaggaatggcaaaagtgggaatcaaatacgagtggaaacctacagtttgtaacaattgtaggggcctgggacacgaaactatagactgcaggaagacacaaggcacataggaaacaacgagcaatgggttgtcaaagaacgaaaagagcctgcacaggtagaaaaaccagcaacaactgatggttttcagctggttagtaaaggtgggaaattaaaagagaaaacaaagaaaggtgccactagtattgggaactcctttactgttctgcaagaagaaacttccatggaggaattcccaacattacaagaagcaaatggagatgagagaggaggcgggggagagcctcctctcttaaatggatagaatactatcttgg

SEQ ID NO: 225762 - DNA, 4307 bp, Cannabis indica
ttagggaccaacataggttctaacaataggagatacacaataataatagtactaaaaatgacacttgaatcatacatacataataataaattacaacaatagcaacactaagctctttcatttttaacattggctaccaactaagaaacatagaacaaaaaaaaaaaaaaaaaaccctaaaaaagtgaaactccaataaaacaacaaaaaacccataattaaaaaaatcagtttctaaccaaattaaaaaaataataacagaaacattaaaaacaaaataaatacaacactaatcataaccgaaacaaatcgatgaaaatgagaacaacaacaatctgatgtttagaaaaataaaataaaaaaaaaactaaacactaaacactaaacacataacaaaactaaaccaaaaaaatatacaatacgcataaacataaaatattatctaaaaaactaatacaataatcacttcggataaagcattttctatagaaacaaaaaaaaaatcaacacattcaaatgcccatcacacaaacaacacacaatacacacattagaaagattaaagaaccacaaacaccacttccaaaaactaaaacgaatagagagaaaaaaaccctaaaataaaactaaatcataaaaaaaaaaatcaccttcaacaacaagagacaaggacaacaaagctgaacacaaaaacaatgccaacaccttcaattgattacaaaacgcagaaaaaaaaaaagagaagaaataaattagaagaaaatggaacaaaaggaaagaaaaaataaggaaaagaagatgatgaaatagagagatagagagtgtgagttggtttgaagatataaactgaaaagaaaatgggagaagcaacaatcaaatcacaatagagtaagtaaaatgaaacccataatcgtatggttggtgccctgtttgggtctgtagcagtttgtgctttttaacagtttttttaggattttaactacttttttcaaatattttccctcccgtgtttccctagcagttttctcatcagaaccgcaccttccttcttcctctgtttacaccagccaccgtagctatgtcctccgatattgaccctctcttacactccatggattcaactctgaaacttactgatgaagaacgatcggtcttcctcctacacgatgatgtgattccttcccacactgccatcccaactcctactttccttgctagagttattacccaaaactatgtccataagcctacttctatcaaccaaatgtccgaccattggaggggccgttttccagtcacaatcactgagtacagagatgattattttaagattactttcggctgtgatggtgatcaattcagggtcttgaacaaagaaccatggcactttcaaaatcaccttgtggttttctgcacactagatgctctgcaaaatgcttcagtcaatactttcaactctagttgtttttgggttcaggtgtatcgtctaccgtttctcagcaagtctaaaactcttgcaaaggctttgggaaatctcattggtgaatttgtagatgttcatgaggaatctcttgatgagggatggggtcccttccttcgtatccgagttaagattttggttaacaagccactcccaagaggtcgaatgattagtctgccccgaatcaaggatgatttttggattgactttcgatatgagcgtttaccggaatttcgcttcgaatgtggagtaattggacatccttttgaaaaatgtgttgcttttatagaaagaatgaacaatggtaatgatgatgatttggagtatgggccgtggatgaagggggctagacttccaacaacgggttatgataaatatcgaactgatttttcgaaagccaatgcttggccttttgttacccgacttgctcgcaaagctcttgtttcatccattccccaattggtttcacgatcgcagccccaaccgtctactctctaccaaggtgaatcttctactgctgatcctagcccaagaagtttagccaacaatattgtgtcttccactatgcctctattttcttctcacacggctgccactgctggattcccctttgttatccctggtagttctgattgcagccctcccgtcccacatactctatcctcaccaactgtacaagctcttacacatccatccccaaatactctctgcaacttgcactcccctcaacttatctccaacagcagccttttaccatctcaccctactctttcggttactactagccttcccttgagtcaacctttgcatctgaaccatgatgttaaaggcaaacaaaagttgctacctgttgatcatcagaaatcacttaatgtgactccttcctctgcctctaaaacataagcttggctagtttactagtcacagacctcacacacatttatgtgcccgatgtccactcttccacttttgcaacctatccacccgttctcacccctatcaccatgaactctcactcccattcaacctctctcaccttgcctatgcaacacaataccactcacttttccacaaatattacttctgcaaaagaaaaccagccgccacattccacttttaaaagggccaatgactctttgtctatgcggaaattactcaagcgatgtcgtaatactcaaggttcatcttcttctcctttgtcacgagatgatgatattgagactctagtttctgattttgaagattctagcttctccactgactccattgcggaggttgcgaggcaaccccgcaactcatcatgaaaatcattagctggaatgcacggggtttggggaacccgagtgcattgcgacacctgagattgcttgttcaacagcaatcaccccatgttttgtttcttatggagacaaaacttgctcagaattctattactagactccgacaattactacgttattctaatggtcttgaagtctctcgggttggacttagtggtggtataatgcttttatggactgatgatattgatgttactttgcttaacatggggcctactttttttgattgttatatgaagttcaatggcagcccaagtttccactttactggtttttacggggctcccgaggctgctaataaatcggattcttggaccttatttcagcggtttggtgatgttgctccacttcttccttggctagctatcggagatttcaatgagattttatccaacaatgataaatcgagaggtgggttgagacgtgagtcctaaatggaagcctttaggactaccttggataaatgtttcttgcatgaagtatcatttattggtgatccttttacttggataaaaaaccgtactgctgtgcatactcttaaggagcgtattgattggtgttttatcaacaacctatggacaaatcattttcaagcaccaacagtggaacacttggattttttccactctgaccatcgtgccattgctgctggtttttcctgcattacgcacgctgatatcccacagaaaagcaggagttagttccgctttgagaagctgtggctcgctgaccccaagagcgctgaaatcatctccaacagttggacctatgaccatgctacaaacccgattactgccatgatacacaatttaaacatatgtgcacaaaacttgcaaagttggcatataggcaaatatggcaagatgaaaaagaatattaatactttgcaagcaagggttgctgatttaaataatcaacctgtccgtaccagtgaacatctccacgatttgcaaagtgttgaatctgtcctcgaagagttacttgagcaagaagaggtttattggcaacaacgatcaagggttgattggatttctagcggtgatcgtaatactaagttttttcatgctaaagcatcttcacggaagtcaatcaacaatctcaagtttcttttcaatgcttcgggacaaaaagtgcaatccaagactgccatagcgactgttgttcaggattattttgctgatattttctcagcttctcaaattgatgatgccgctcttcatgccactctctcatgcattcccactttggttagtactgaattgaatgagtcacttactaaacctttcactaaggatgaagttttctcggctttgaactctattgggcctgataaaagtccggggattgatggcatttctgccatgttttaccaaaagaattgggctgttgttggtgaacttgccacaaaagttgtactcagtgttcttaatgatcatgcccatcctacagatttaaacaagacaattatcactctgattcccaaagtt

SEQ ID NO: 225763 - DNA, 1507 bp, Cannabis indica
taaaaagttgtgactaaaagtagcaattttttatagtgcattaaaccatgcttccccaacttctgtaaatatttttttatctaatattagtgattatattcttaacattatatttaatagtctgtacacacacttcaacaatatgcattttctgatttaaaaaataatcattattgttcatccatatttggcaaaccaaactagtcactattgttagtaactttttttttgcatttaaaatttttgttcttgagatactttggaaaattccagataagggtctcacatttatctgccagtctagccatttcttaagctccaaaagcacctggaactaaattcacaatcaaaaataagtgctgaatattttcagttgatgctccgcataagagacaaattgcagctagcctatccttcgtttgtaactaattttgaattgcaagccatgtgatgaaactatgtttagaaatattataccaattccaaactttcctgatgtaaccaattttggattgcaagccatgtgatgaaactatatttgggaatattttaccgattccaaacttccctataccatgtaactttcttttgcttctcactaagcaccatgtagcccgtttggatactctatttctctgtcataagagtttgataatttggtatgaacttatatttttctttgattttcactatttccttccaataccaattactattcgtaggggaagaatagtccaccaatttttatcttttagatagacactatgtatccatttcacccataaattatcttgatttgatgatatcgcccatacatacttggctaatcccgctgtattccatatcagtgtgttttagatccccaaaccaccctctgattttgggttgcatataattgttcctatgccttatagccaggtgcttgagtctctgcttgtcacgccataaaaatgctctacaaatcgaatttatcttctttagtacaatttttggcaacaccgttatttgagaccaataagaataaatggaaatgagaatcgcatttataaaagtcacacgaccagcaaatgaaatattccaagttccccatatttgggttttctctaccatcttttccaccaaaatatcacattctaaaaccgataatcttctagcacatttcagaatacctaaataattaaatggcatttcacttcggacaatacctgaagcatcaataactcactgtatctcattctcatccatcccacaacaaaaaagagttgacttggtatattcagatgtaatcctgaagacttagaaaataactccagtcgttgtagtaaaaagtatatggacttgaaatctccatgacaaaataataagacattatctgaaaaatatagatggttcaattttaaatctaggcgtcattcatggaacttgaaatcaactttttgacccactttagatagtattctagataggtactccattcaaagcataaaaattagtggggacatcgggt

SEQ ID NO: 225764 - DNA, 2719 bp, Cannabis indica
tgaatttcattgatatgtgttgtgttaaggacaattcgactcatactatcttgatgatggggaagcagaagaatggtctgtattcgtttgactctagccatgtcaagattgttcctcctattcctaagcaacctaccaaacaccagtaccagtagcagtacccttacagactgtcccttgaattattgagattgttggatttataaaacgtttgtccaattttagtaagaaaattctaacatagatgaaagtttagaaggtatgatttggtacatgtcaaagttcgatagacgcaattcggtaaatatcaaagtctggagtatgatttagtacataagcaatcactgaattaataaaattaaatgaaattagacaaaaattcttaaatataacaatcgcaatagttcaaaagaaatattttgatacatgtaaaaatttagaagaaaaaaaatcctaatcaagcatttaaatataaattgagtatctttgaggaagaacctgaaatagaaaactctcccgttgaataaattgttcaaataaatctaatatctaacaaccttttaaagtgggaaatttgcggcataaatactcaaattgttgagtttgttgcaaataaatacctaaattttaaaatagcagcaaaaatactcaatttctcaatttctttcaatccgttactacctatttaactattctgttaagtgctaacataaatgccatgtgtcaatacttttggtccatctcataatattcattttagaaaaataataaaaaaaaatcatttaattattataacaattacccatttaactactctgttaattcatccaaaaaaaaaatttaccaaatgttgatattttactggtccacttcaaaatatttttttaaaataatcaaattattaaaaatgtaattattattatttttaaaatgaaaactataattaattgaaaaattatgaaatatttttaaaaaaatctttttgaattaacattaaaacttttctgtaccatcatcttctctgtcgcactgtcaaatcccaaattatttgatcttcttccataaaatagacccgcattgttatttctcaggcaagcatggatgggtacagacctggtgtggacggaggggtcaggcgaggttcaaaatttgggcaactctttctctccgacagaggcgaggaatgacgaaggaccattgaaggtgcatcactcgtcggtggcggctaagggacgagatctatgttagaaatttctttatgggatgttgacccgggcaaggtattgaaacttggagccggagatggatccagacgcatgggttgaacacatggcatcaatactcaattgatttttttattgttcttgatggcatgggtgttgatttttggtaatgaaattttttgtttagttatttctctcgacaatgtgaggttgtacgaaatttttttattggggatcagtttgtttttttctttcttttttttaaatgttaaattttttgtttaattttttaagctaaaatcagtttaatttctaaaagctattttatactttaatatctttattaaatgatttttttttctaaaatgaatattatgagatgcaccaaagaagtattgacacatggcatttatgttagcacttcacagaatagttaaatgggtagtaacggattgaaagaaattggaaaattgagtatttatgccgctatttttagaatttaggtatttatttgcaacaaattcaataatttgagtatttatgccacaaatttcccttttaaagtataagctaacatcttgttcattagaatttaaccgttttgttctaaactatgtagatatctttgttccaaatcttagcaataatacaggattctcagtaaacgaatacaaagtttgaatattaatgcacatttacattaggcaaataataatacaaatgttggtacctgttaatgatagcatttagcaactgttaatagttagttactgtctgttattaagttggttagttttctgttttgctagctatcattctaaccaattctgtaactaattgctttgttcttcttgctgtatataaattcttttctgttctgatgtaaagtaattcattcaacaataaagaatatctttcttctctctcgttctctcttcctctctaaactcaacatggtatcagagcttccttcgttctaatggcgtctgcaacttcatctggttctgttcttcgtcccactggttccaatcaactaccgagaccttcgtccatctcattcaatcatactctttcagttaaactcgatgaaaataacttccttccatggagacaccaagtctatgcagctatcaaaggtcatcgtctactcaagtatcttgatcctacagcagtaccatcaaaatatgcaacaacagaagatgaagcagaggatcgcatctctgaagattttctggaatgggacattcaagacagccttcttgtttcttggttactttcgtccatgactgagaaaattctcactcgaatggtaggttgcaacagtgcagctcagatctggatcaccctcgaggaatactattcagctcagaatcgtgccaaagtcagtcaatttcgcactcaactacgtcgaacaaagctcactggtatctcaatgattacttactcaagatcaaacacatagtcgactctcttgcttctattggtcactctttatc

SEQ ID NO: 225765 - DNA, 3651 bp, Cannabis indica
cctctcttgtatgagtttttttccttttttttgtcttatttgccactatttataattacatagtggacagttatttacaatattgactgcaatatgtttacaaaaatcttcccctaaaatcgaggggtttcattacatatcacgtagtgtaaatgcgattatgacttgaaaattatatagctgtgattttcccgcttttgctgggtcaaaatgatcgtgtgttaaacacgtctttaattgttattatctggagatgtcttgacagaaacttggtttcagtgatcccaatagtgagctggggccatttctccttctgaggtcgatgaagcatgtcttgcaatgatcgcggttcttatttacaaagagtccttcaaagctcatttgaacgttagctactggctcgtcagggttataagcctcgctgacgtaactggatgaagctataggaagcattcccatagcgagatgggcacctcgcttacttggtctcgagccgatccgactattacagttagtttgtacattatacactgagggctttcgtaattgatatgcatcgcttttgtcttccttgttgcctcgctattcgcattcaacaacatatgatttctcgctaatatagtaagcgccagtttgtatattaattccttgccaaagaccctacagtcagcaggttacgaatatactctgatacttacgtaattaatgagttattctatataaagtgattgcatcgatccttattccctttatctggacacgtgtcctccactgagatggcagccaaatttcgggtataacagagataattttggttcactattactcttacaggtcaatattttttctctgtaaattgtaatagaaataactagattatgttataattagttgagcaatgatgtgatggccatacaacaacaataaaagaaaatatatcaccaatatcatgatgtgttggaagaaaattgaatttacccacaacaaatctactagaaatttcatttagatggattgaaattttaatgttcacatgcatatgtagtaatcgtcttttatacaatctatatctatttatctatctatcaatatatatatatgtatagtgatataaatgaaaatacaaaaaaaaattaagtggcatcttatattttttgtctaactgttttcactatgagattttcataatttgtttaaaagaatacataggttacatgtatattattaatattaattaattttaaaactatcaaaacttttagtattttattattaattttgtgtatttttttgtttgggaaaaaatttacttatgtgctattaaaatatatgagtgcactcttaaagggtattacccattcatgggtaatattgtgaaaatttgagtttttatacttagtttttctatctgattgaaaaatctctcatttttatattatatgagtttgtgttgtttcattagttgaaaaaaaaaattaaaaaaaattaaaaaagaaagtttttcgaaaaaaaaaaaaattaaaatttggcttaagtattttgtataaaaacatatttttgaaataatgtaaaaagtgatattttttcgcatttttttaattaagtagctaaattaagttgaaaattttaaatttctctattattattcgtcattagatcaaaatctaataatttaatatttttaaaattaatatttatagttaaattatttagtaaccatcaatgggtaatacccattgagaagtgttctatatatttatatatttggtatgctaatgtaatgtgcatttataacttttaatattatcattaattttgtgtatttttattaggtaaatggtttacttatgtgcaattaaaaattataaaaattttatatgctaatataacatgtacttggattaaaataaaaatgaaagaaaattaatgaaataacaaagttaagagatggttaaatcatagttggaacaataagctttactttagacttttggtaagatcatgatatttttttactataagactagagtgggcactatccaattcaatctaattgaaccgaattaatccaatccaatctaattataaaaattgcatatctaattacaaaaattgcatacacaattggaattggattcgattggatgttaaaagatcgactctaattagattgaatcgattattgggtatcaatctcaaaatccaattaataaccgatccaatctaattccatttatatatgttaaaaaatactttatataataaaaaaatattaaaaatataacatatattaattatatttttattagatttttttgtgttggatttttagtttttgattattttatgtatttattttcatgatattttgttatattttattacttagtaatgttgttgttgtaattatttcaaacttttagttgtattacacttgtagcgattgtatatttatggagtattaaacataaataaagggtgatatttagttcatacgcatttttttttcatacttttaagttaatattaaaatataggtgtgtaattggatatccaattaaaagaccgatcaaatccaattagtaattagaatagattggatgaattttgagttcgaattggattggatcgaataataattttttgaatctaattactatgttaattggatcgaatgaggagaaaaatgttagattagatcggatgtccacccctatctaagaggattagaaagagcattttaattgtgacaaatttgttgtcgtaaaatgaacccaagttcttttcatggattacatttaattacagtttttttaatataataatattatttttttaattttctgataacaaagtgattttcttatcttcaagattgaaattggtaaacttctgttttatgatatatcttaggttccttgaatacaaaataatatttagcagctctcgaaatttttattttttttagttcttttttctcctattcttaattggtctttaattctcatgattaaagtctgtcttagtgtaatatagtttgttagtgggtggtaagagggttaaagagtagcagattttgaatgatttgatagtgtttaccatgatattttcttctaaaagtatttcctcctactaattaaaggagataacacatgtttggataaattgacttgttctcttttttctttatttaatgttaaatacacatagaatctctatgttatttcaataattttctttattatttgtaaaaaataaccccatatttctacatatattttacaaaatatcaaattttatttctaaaattctatcatttaatctattattttttttttatataattctaatgttataatctcttattttaaattttaccaattaattaatactacaaaaataacaacacaaaaagataacaaatattgaacaataccaggggcttagttctctagttgtttgtataaatgagccataacacatcacatgtacgtgtaactgttggtcctgcgtatatattgcttttagttcactatttaaagaaaataaaaaagaaaaaaaaccgtacgtacatatcatgtgcaacctaaagagctctttataagcaccaaaattgaaaccttaattcatattctatcaaaaaaaaaaaaa

SEQ ID NO: 225766 - DNA, 2895 bp, Cannabis indica
catctctttgagatagatctaaaatcattttgtctaacactattttgcaacatggtttgagatttttgatataatcatgctcttgaaaagtagcatttgttataatcatgttcttgtcttgatgactataaaatagtccaccactagtttcttttgaatatccaacaaacatataaatctcactttgtagttctatcttttcttctttctttcttaagacatgagcagtgccccagattccataatgacgtaagctaggcatacgaccattctataaatctaaatgtttcttggaaacaaacttagatgggacgatattaaaaatgacagttattgtttgtaaggcatatccccagaaggacactggaaaagctggatagctaagcataaacctaactatttctataagtgtgcaattttgatctccacaacaccattttgttgtgaagtagatggggaggttagatgggatgctcttccaagttaaaataactaatctttcaactgcatatcaaaatattctccacccctatcagctcgcaatatttttaatattttgcctaattggttttgagccaaaacatgaaattctttaaacttctcaaatgtttaagattttttatgcattaggtaaaaatgagcatatctagagtaatcctcaactaaaatgacaaaatattcattaccacccttagcttgtacattcaaaggtccacaaacatctgaataaaccatttctagtggttcagtcgaataatttctctttgtagagaaagtaaacttcatttttccttctaaacatggtttgtagacaggtaagtcaacaagtgtgatatttctcaattatgaacccatggttggtctacaaattctgtcatagccaatatgacaaagacgtaacacatatattatctatcatttgctttttatgttgtttagttttaagagtctgttattaagtgtaagtggttcattaggtctcagaatataaagccattttttccgtacacacaacacataattgaaatccattaagagaaatagatacattataactaaaaaaaatcaatacaaaatgttacaattgtaaattggaaactaaaattaaatttctgttaaaatttgtaataaataaaacaatgtccaaaaaaatatacatttattgccaaatctaagatgagtagttcctctagcttggatcgcctccgaagcaccattcccaagtctaagctttaactcttcaggatttaaatctttccaattctcaagaaactcaaatgaagtacacatatggttagtaggtccagaatcaataatccatatggatttatcattctctaaaacacataactgtaaaaaagattcagaaaccttacatttattcttgcgtgctcgaaacttagaacactttcttttaatgtgtcactttatattatagaagaaacatgtaactctagtttatttgaatttcacaagggacactccataattcaattgatatcttattatatttcttgcacttgcaatatctttgcccttgtagtccggaagagtaataggactaatcacaatagtgttaatttcaagatattcatcatcataaaaatatagatgactatattattcatatattataattccccatcaataaaaatatcagagttatgctcatcatcctcatcaatgacaatattattttcaatgtttgcaccagcagaatccattagagaattaggaacatcttcatgtggaacttgatagttcacaacctcttgaagaaaattttgtaagtcttccatataattattcaacacatagtcaatgctaaattcacaatattctagagttaaaattttcataatataaccaataagggttttgatttcacaattaaccccgacacatgtctcatgtctcgttctgaaataaaatcatcattcttgacaaatgatgttcactattgtgccctgacttcatgtttatttctttaaattctctgagaaaatgggtacaaaatgtagaataaacttgttccatttcaagagatgtgattatgaataaatagagatcaattgcttgttcaagtaatgaagatatggaaaaaaaaatacaaaaaaaaaataacaaaataaacatatctcaaatatttctaaggtttttcaaccaaatgatatcaacatctcggtcggcgagagtaaagataccactagttgaacatagttgtcaatttttctaaaatagaaactattttagcaatcttttattcgattaaattaagaattcaacaatgtcccaataggcgagagtctaagttatttttattttatgagcttctactagaatttgatttataaataattatctttcaagatctaatggtgttaaatcatttctttgaaagaccatttgtagtaggaaaaagtcaaagcgtctcgaggtcccattagaataagatgttaatttttatggtccatatcagagtaaaaagcggaagcgatggttttataaaaaatattttagatgaaactaatatgaactataatccccaaaatgtcaacatgattacataaattaaatctaaactatgagtacaaaaattttgccacttgatgcctatcaggatattctcgattatttttgtatataatattgttcatccaatctaaaagcaatatgaacttgatgaagacttcacactaggatcttccagatcatcctcaacactcagaataagagtgggcttataggattaaagtgatgaacaaattttctatcacagtgtgtactcaattcatgagacattgtgaactgagatgagagaaaaatatacctttctctagagagagaaagtggtgtgggtagagagagagagagagagagagagagagagagaga

SEQ ID NO: 225767 - DNA, 6038 bp, Cannabis indica
tgaatgatagttaataaatagatactaattaaatatatttcactcgttctactttaatgatccaaaaactaaaaataacaatataaactgttataaaaagaaaaagtcttttattctattattcattaacgtaaaaaagtgagaatggtatttaatttagataaatttatcaactaccatccaccacttcacttattttacaataaaattgaataaaatgtaatggtagaactgcattactttaaaagttatattttgaagggtattattaacaagctgtgtactataagaggtacatcttggtagtgtaaaaaattaagaaacaaaaatgctaattaatatatacacatatttatgaaatcaattcaattgagtttgtagtacaaaaccaaacaggtcacttacccctgatgctgagtttcacttgttgagcttctcccatgtcaaaagatgaacaaacttttacaaacaatggttggattggaacatggagagaaagaagccttaattgtattcaggtactaggcactgttatagatgtagactgcattaaatattgcattacaaataagaaatatctcatgggatcatgctagagctggcaaaaaacaattataaccacattttgttgtcttggtatttaataacgattgactattcaatgattgatgatggtagttgaagatttgcattaacatattaatttattctctaaaacatatgaaaagtcattcataaaaattaataaaaaagtaatccacttagattatatttttttatatttacgtaagttattatatcatatatctttctaataatgcatcatttgcaagtcaaacattctcttttagcttaatagtgttttgtacataaatgatatgcactatgaattttgattggaccaacctgcaaagttcattacattagttgatatgttgaggagaatagaggtgattatatgagcataaatgaaacattaaggcctcatttagtaagggtcgtattgtattaaataataaataatattatgtttggataaaacaatgtattgtattaattattacgaccaaaatttttaatacaatgtatgttgtattatttaatatatagtccgtattagcttgtattataatatttataaaggattcggagtcaacaccaatctctaatctagacttgggacccaaatttggaaccggaccccgacccggacactggacctggacccggctccggccccgaaaccaggccccggacccagatcctagaccccggaccgcggacatcagactccgacccggaccccggacctcggactccgacccggaccctggatggacccaggacccaagactcggccccagaccccggacctggacccgaacccagaccctgaccttgatccgaacccgacccggacctggaccccgacccagacccagacccgatcccgaaccctagatccggacctcgacccggactccgaccccgacccgaatccaaatctgaacttggacccgaactcggaccccggaccgagactcgaattaaataatactaatataatataatacaacacagtttattaatacaagtcaataccaaacataatgttgtattaaataatactattataatacaataaaatacaattcaacacaatacaatagaatacaatacggcgtactaaatgagccctaagacaataaatattgtatactaaagagtgattttaccttgtgagtaactagatacaatctttcattttaatttattcttttacatttacatgtatagccctcttaggaaacaagctaaactagttcataaattcaaccattggttattggattgtcattcttggaacttttattgtcaagatagttttgataaacatatgaaacaaagccccaaacagccataaccatagacatagccttgatcccattcatcttttcatggaataaaaacacagccataattgggacaataggcaaacccaaaacacttatgacatttgagaagagggaagagacttctagtattaaacccaataatccaatagagaaaacttgccatgttatagctgtccatgataatgtcatgacatatgaaactttcccaagttgaaactcattcatttcttccctcaaagttgaccactcactgcttgcaaaaagtcccacaagaattataactgttgccacaactgattgatacactatgacatcaatgattactgaaaagctttccttcttaagaactttattcatgaaatactgcattaaagagagacccaatccataagctgcagagccagccacagtgcaaacaaaaccaattgcatacttcccttttgagactttagaagatatttgagaactgggctctaataccagcagaacagaagagatggtgagaagaactagggagttgattatgtaaggagtgaacttatgtgagtttagaaagaatgagaagaaagcattgaaggccaattgggatgctaatatgattgagtaagttgacactggaaggtacatcagaccaacagagtatagataacaaatcgctgctgcgattaggccaagaaccaagtaaaccgaggcaacagttaacatagaaggcttttttgattgaagaggaagagtattagtattcatgtaactgttgtgattgttttcgattttatacttcttttttcggaagagatagtaaggaagaagaattggaaagccagctagctgtacaagtgatcccatccatttactctttccacctttctcataatacaatctccctaataaggttgctgctgcctggccagagagaacaaggaatgaataaaacccgattcgaatccaaaatacttgttttctggtttggtgactagttgattggttggattcatttacatggccatgggaatctccttcattagcttcctcagctggttaagatgacagatacacactaacatatatatcagtaagtactttaacatgaatgtttcactgttttcctatcaatacatgacagttaggtggagtttgtttggagttaataaaatagaacggaatagaaaagaaacaacttttcttccaatcttttgtttggtttcccttccaaccaaacgccacctaatgaggtgttttgttatgtgagtttgagttagagagagtagtttgagggaatataaaacccaagtattggaggagattaatttaaaaatcaggatccacttaaaaacacaaactcctttagtcattaaaatttaatttaatttgacatttctattctcatcaggtctaaacctcataccaaacattcccaatatatagagtaggactatagttgcttcatttataaactttgaagttacatatatgaaaataattcaatcttgttgttcaaaacctctagcatttattgtttacacacatatatatatgtaagctaaacatgaaagacttacccctaatgctgagttgaacttgaatttcttcaactttttccatgtcaatagatgaacaaaacttcacaaacaatggttggagaagagagattgagccatatgttctcaacttatatatatatatatggaagggattgaatgtgtgtttgtgtgagagggagagagctagttcttatttgtattagtcaatactagagatggcattaaatattgtccaaatagtatcatgtggaaatatatatttatatatatatatatatatttatatatatatatataatcaagcaagatcttttagcccaaaaataatgcttactcatatttatatctagttattttaatatgattgagtagccatttcaaaatggtagctggagaaatgtttattaaaatatataggatactgaaaacaatttttttcccatgtctttagaaaattttaaataattaagaatattgattatttgcacttataatgatattgggagtttagatctttgttttgtcaccctaaatttttatttaaaaaaggaaaatcgaaggaggttcattgtaattataatgaacacttatgtaaaaaaaaaaaaaaaaatagatacaggaatttgttttttttccttactgtcaagctcgttgcttttctttgggtataggtacggtttggtcggggttatgttttgttattgcaatttaatttttacttttacgattagtcttgtctatgtgatatgatttttagtgttttatagtcttgtctctataacatagttttgagtgttttaatcttgtgtgtgtgatataattttgttttgttttgtttagtttcgttgttagttttttattcgtggataactcgtcattaaattgctgttagtggttgggaataacaagttctctgcgactgaagaggttattagtacgtagtgcagttacgtaccttgcacaatagttgggtgctcaagctacgaggttgaacgaatttactgtaacagtttttactgttgtgtcttctgagcggtagatgaaactaaatataagtgtttttaaagttaactgtgatgctgtaatttttttaatttgattttatttttaatttttgtgtcaaatgatttaaaaattaggtaattgattatttgatttgtttttttaattttaatcctaattatgttttcaacgaaaaaatattttaattagattgcatattattattttaattaattactattagaaaaatgatatgatttattaggaaaaaaacaaacaaaaataaaaaacaaaattggtcatatcttattgcattgttatagtctttcatgtatatgtataataaaatgtagtgttgctctcatcaaaattaaagtgctattgtcttgtttgtttatgctttatttctatttttagttttgtttatttctatttgataaatgtttggttttgagataatatttgttagatagtttcacattcataatttatagaaacttaacattaataataccatggattacttactaccaaattgattttgaaatgaaattcatactttttaccatatattttatttcttcttgctttctaaaccacagttccgagcattgtaatgagctagtagttgaaaagatttctgatctgtaaaaggtataattcaaattattttttttttcttttcataaaatcacactaaatataatttttatcaaattactaaaatttatcatgaatttaaaggcttaagaattctaatcttattataaaaaatttaattctttcattttttataaaaaggaaattgttaaaaagtattactggtgtttagtacctttcacattgctattgatacaattaaatatcaggtttcatataacttaagaaaatagcttttaaccacttgaggttagctcaagtggccatagaagggtacgtgtatgtcggaggtcttgaatgcgagtcctaaattatgcatcgttataatacataaatgcttaaatacaaaaaaataacttttaaagaatattattaatcaatcgtgaaaccctagttacaaaaaataagcaccaaagtggtgcccaataataatttaaaaatttcatcatatgtcccatcaaaaagtcaattagaatgaaccatgttcacacagaatataatattcattattgagttatccccacttgcttcccacattcaatttcaaacccttctactagccttacctacctaatatgggtgaggcagagagaattcccattaaagttggagaacatgacagaaactatatataatatatatatatatatatattttgaggttgtaatggaaactaaatttagaaacacaattatgcataataaacacgtgattttattcttacacactacttctaattttgataattatttgagaataatagaaaagaataaaagatgggagagggaaaaagagagattagaatttcataagtctttgtgacagtcagtagtcccgtgatccgtaaggagaaatatcgggtaagctgttcaatcccacatcgcctaaggaaggtcaagtgggatgattctaagactgt

SEQ ID NO: 225768 - DNA, 2585 bp, Cannabis indica
tccttatttgtttataatatgtgcagaaggtctttctcgattgtttcaattcgaagaaacagctggtaatttatctggtttacgtgtggctcgtgggtctcctgccatttcccacttattcttcgcagatgacagcctagttctgtgcaaagccaacagccgttctgctgaagccattaaaagatcattgaacacttactgtaatgcttcaggacagcgtttaaatgcagccaagtcagtcctctccttctcatcgaatacttcacagcatgttcaattaattttccaacaaattatggatatgcctatccagccatgtcatgaaagatacttgggtttgccatcttattctggaagggataagaagttactgtttgccgacattaaagacaaactttggaaatttctttcttcatggcaagaacaacttttctcaattggtggtaaagaagtgttattgaaagcggttgcccaagcaatcccaacttatgccatgagttgcttcaggctatctaaatcgcttattgatcaaattgaagtaatgatgaataagttttggtgggggtctaactcttcgcgtacaggaatcaattggaaaacatggcatgctctttgtcattctaaagtcgaaggtggcatgggttttaagagtttcgtgcatttcaaccaagcactactcgctaaacaagcatggcggattttttcagatcctacttctcttcttcaccgtgttctcaagccacgatacttcaaaaattctcacttcctggatgctggaactggtctatacccttctcttacttggagaggcattgtgtggggtaaggagctcttaattgaaggtcttaggtggaaagttgggaatggtcaaaccattgtatgtgctactgacccgtggatacctggtatcacttatttaaaacctttgctattcaaaggcagagatctaaatatgaaggtatcagatttaattctagacaatggcagatggaatttaacccttttacaatctctctttctagcctctgatgttgagaaaataatgagtattcctctctccttttttaaccaaactgatcaacttctttggcatcatgagcacaatggctgttacactgtgaagtcaggttatagtttagccttaaaactggaggaacatcagcctaacaccagcaatactgctgccatgtcgtggtggaaaaaattctgggctctttctattccgtctaaggttcgcatttttctttggagagcaattcaagattgtttgccggtacttgatattctgcactcaagacatatcagcgactccaatatttgcccattatgccacagagagaaagaaaccattttgcatgcacttttccattgtaaacgtccaaaaaagttctggcgtttatccaattttgttgttggggatttacttcacacacatgtttcacttaaagatattttcctccatatatccttgatatggtctaacttggaattggagcaatttgcttgtattttatggagtctctggacagaacggaacaatgagcgtcatggctcaaaaactcaaccgattgaattgttgctttttaaagcaatgacttatctagatgaattccatactgccagaggtgtaaacaactcacacgagcagcccatatcgcagcagcagccctctgatgcatcgcatgacagcaggtcttcaacaacgataccaaaatggttgaatccgccctctggaagactgaaacttaatacagatgcagcggttagcaaagctactcaaattactggttttggtgctatattaagaagcagcagtggtgattgtattgctgctatgtctaggcctttccctggctgttttaaaccagaaattatggaagctttagccttgcttcatagccttaaatggctcaaagaccttcagctacaagtagatttcattgagacagactcactcttattggttcatggtttgaagtctactcaagctacaatttcagatttccattgcttgttggctgatattcaacttttagtgtccaatttccctggagttcaaatttcacatgtaaagagaggagctaatacggcggctcatactcttgctaaatttgctcttacggtggatactgattgcttatggttggaggaacttccgcctcctctaatgtctattgtattataactctttgttttaatatagtagcctcttctcaaaaaaaaaaaaaaagtagtctcttatcttatttattaagagaaatgtaagtaaattacctatttctaactttatagatagttaatgtcccttttttaaaattataaagcaaatgtcatttttttacttttaaatacctaaaatacctttcattatataaaatgtattatatgttttatttctttaatataaattatgaaaaacaatagatcaaaacatctctattgtatttttgtcaactatttttttttattatataaaaggtattatatattttattcttttagattttgctgttgttgttgccgtctaatatgttattaagtatattaatttagttttttttatttaattatatcgtatgatatac

SEQ ID NO: 225769 - DNA, 7293 bp, Cannabis indica
ttctaagggttgcatcccgttacagtttctggtgcttccagcttgatctctcccgtgtggtgcttaatctttcatcaataatctgtttgttgtatatactttctcttacctcatttaatgtgatttaaccctcatttaatcctctgcttccttctttttgccttttcccctttctccttcttcgctcttaattgcatttctcagagaatcaaactccagggatttctttccttggatttttctgctctctctcttcgtatatcccatcctcataaattgaagccgtcgttttggctttctcaaggaggagttcgatgattacacctacgagctttggatttgggctaggatttctgcagaataggtcgatcattgcagatgtttccttctctgttaaggtttattcatgcaggtatttctctaaatttatctatttaagggtctgggttctctggcgatcattactattctgcttgattctcttatctttctctgagtattactgggagttctgtttatctttattgtcttgggtcatggagggtatagcagataacatggcaaatgtgctttctctcactgagagagaagctgttgttcatgagcatattgatgatgtgggagggggtgttgagcttgggagagctttctgcttagtttttagggtcttcaccactaggactattaagattgaatggtttgaggaagctatgagaaatgcttggatcactcgtgctcctatcattttctctgaatatggaaatggaatgttcatgcttgaatttggatgcgaaggggacatgaagagagtcattgaaggccagccgtggcactttgatcactctcttgtcactagtgccaatcctgctggacttgatactctcttcctaaccaaatcagatattctcccttttggatccaagttcactccattccttttggcatgaagtcttacaaactggccaaaatgattggggatgaagttggtgatttccttgaggctgacaaaatgaccctccttaaagcttctggtttttccttcgaatctgtgtcttgcttgatgtctctaagcctattcctagaggtatcttaattgattttcgaaacattcataaaaaaatggcttaactttaagtatgaaaatctccccaatatctgttttcactgtggtatgtttgaccacaccttcacaaagtgtgtctcttaccttaagaaatgtgatgaatttgcctacccacctcctttacactacaaaatccctttgaaagctcctgccaaaaccaatttcaagcgaaatccgtttgacctctccaattcccatcctttagatgaattgccaatctctcaaggaaatgttgatcaaagccttgctgctgccgtgaaccagtttctcaccacccaagatgcaggggctgactcttcttcctctggtgccatccctaggacggatggggctgtttcctctggctttgttggaaacaaccctgttcctcctcctgaactctcaacttttgagagacataccattgccccaactttcaaccctggctttacttgccctgctcctgtggatgccttctatgaggctaaccaaactgctttccctacgacagccatagctgtgcacaccaatgctgaacctgatcttgtacctgtccaagatattgaaaggatcactgagaagtccaagggcaaagctgttgctagagccaaaaggtctgcttttcttcctcactctgttatggtgggggattctctcagaaacatcctcaaaagagcacgtgctggacctgtgatcaatgaagcttccactgatgctgactctccttttcaacaggcgggtgttgctgagcaaccccgcccagaaaaatgagtcttatgagttggaatgcccgtgggttagggagttcccaggcattccgtaatctctcccttgtagttaagaatcataggcctagtttgctttttgttatggagtctaagcttttagctggtcactgtgacagctttagaatcagactctcttttgataatgcttttgaagtccctcggtgtggtctcagtgatggacttctgttattttggactaatgatgttaatgtaaatattttaaattactcctccagccacattgactgtactattacctttgaggataatatagctactcacctttcttgcttttatggttctccttatgctcatgataaaactcatacatggactctcattgataggctttttgataatgctcctcaacttccttggttagttttaggcgattttaatgactacctttctgctaatgacagaagtagtacctctaatattccttattatgctatggtaaattttcaagcttttgtcaataagcattctttagttcctattcactttgttggtaataaatacacctggaaacatggttcaacttatgagcggttggattgggggatagctaatgataaatggtttcatcactatcctcaggctctcctccaccaccttggtttttatggttcggaccatagggttttaaagattgtcctatctgatgatagtatgcataaagttaaaaataaaaggtttctttttgaaaaccattggctcactgagccctccttctactccacggttgctaattcctggtcttctgtcaatcacaatcctaggactgaccctatatcgaattttcttaagaatcagagcaactgcatacatgccattaagaattggaacaaatcctacaatagtttatcttataggatcaatgaaattgatggtcaacttagcagcctttcttcctctctccctgcttcccctgatcagttgcttgagatttctaatctccaatcccaacttgatagccttctctataaacaggagattttctggaagcagcgatccaaagtccattggcttcgagctggtgataagaacaccaagtttttccatcagaaagcttcctccagaaagaaaaccaactttattaggaagctcacccttgaagatggcaccatcatctccaatcattctgccattgaagctgaagtctgccgttttttctccaatctctttcagtctcaaggcagcagtactgatgctgttaatctgctcctctccactatcaattcaaggctaactcctcaacagtttgcctttcttgatgcccctttcactgtggaggaagttaagtctgctttatttcaactctctggggacaaagctcctggctctgatgggctgaatgcttatttttatcaaaagaactggagcattttaggaaatgacttaagtgatgcaatcctgaatgttctcaataataatgctagcatggattctatcaacaaaactctcatcgtacttatccccaaaaagcaaaatgcttcggctttaaaagactttcgtcctattagcctctgtacaaccctctataaaattgtttccaaaactattgctaataggctcaaacttataatggaggatgtaatttcccctactcaaagtgcattcctctctgaccgtcttatttttgacaacatcctcattgctcaggagatgattcatgccatcaatcacaggaaaacggggaaaattgggtgggtgggaatcaagcttgatatggagaaagcttttgaccatgtggaatggaatttcctttcagcaatccttaaccatcttaatttccctaacaaaattgtcactctcattcatcagtgtctttcctctgtatccatcaagtttagtattaatggaaacatttctaaggaaatcttccctactcgtggcttgaggcaaggagatcctctttctccctaccttttcttgttgtgctctgagggtcttgctgctgccctttgcatccaaaagcagcttgggaattttgatggcatttcaattgccagatctgcccctgctgtttcccacttactctttgctgatgacacacttatctttgccaaggctaccttctcttcttgcaatgctcttcaagcagcctttcagttttataatcaagccacaggtcaatgtgttaactttggtaaatcctccattcttttctccccaaatacctcctcccaaatctcgaatcatttctatcaaactcttgggatttctaataggccgttcatgtcaaagtatctttaagtcccccagtgttttggtagatctaaaaagaacagtttcagcttcattcttgaccgtgtcagttccaatctcagggtttggagtcacaaattcttctcgaaaggtggaaaagaagtcctcttaaagtctgttatccaagctataccctcttatgccatgtcctgctataaacttccagtctctatctgtcacaaaattgagaaactcatggcacagttttggtggggttcttttgggaatcactctaaagctcattggaagtcctggtcttctctttgtcaatcaaagttctttggggggcttggctttcgatctttaattcatcataaccaagctttactggccaagcaagcttggagggtcctaaccacccctgattctattgcttctcaaatccttaaggctaggtactttcgacagtcctctttccttcaagctagtaaaggtcactctccctccttctcctggtctagtcttctttggggtagggaacttctcaaggaatggcttatttggaaagtgggaaatggtcagactattcgaactctgcaggattcctagatccctgatcttaggactcttaggtttaagaataactcctctcctccttcagataaagtcagattcttcattaattctaatggctcctgggatttaaaccgattagctcagtactttgatcatgaccttgtttcttgcattctaaaagttcccattggaggtcatgacaaagatgactgcttgatctggaaaggagatccttctggtcttctcactgtcaaatcagcctatcatctctctaacacttccaccctaccaccatcttcctctaatacaagcttttacaatcgctggtggaaatttttttggcatcaaagtattcctcccaaagttaaaaactttggttggagaaccttctaccacattttgcctaatgcatttaatctttttaggaggaaagttgttccctctccttcttgctccttctgtggttgctctttagaaactgtaacacatgcactgttagactgttccagggcgagacaggtttggaaactctctcctttatatcatttttatcttttgcataggaactctgatgttaaagatttaatactatctgcatatactgatctgtccagtgatgatttctctttacttatatgcacactttggtctatttgggagttcaggaataaaaaacttttcaggaatgctaacccaaatgcaggtgatgttgttcagtgggccaatgcctttttgtctcagtacaaggaagcacagctcaacagaattgacatggatccagcctatcagccgaatgttccagctccagccccccaagtaagagaaggagcctaccaattgtatacagatgcagctgttcaaaatagaaatggtaagcttgggcttggtgcagtagttaaggattggaatgggtaggttattgctgggttctccgtgcctatgacagccaacatccaacctgttttggcagaggcttgggcacttaggctagccctagactggtgtagcagtgtcaagtttcccctctccaacattttctcagattgccaacagctggttgggaaagtttccagccgaaagaaggacctctcggctctggcagatgtcgtgtgggacatcaagaattccttatcacacttccctaatgcctcagtttcctacactccaagggacaacaacatacatgctcaccaaatggcaaaaggagctttagggcttgatgaggaattagtttggaaaaacaattgtccaagctttctctttgtaacttgagcttattgtttctccccctcaatgttacaaacgtacaaaaaaaaaaaaaaaaacaacaaaacaaaacaaaaaaaattgccttgcatgagtttgcatcatttggataatttttctaagggttttgttatagatagactgggaaattttatttacactccaaaaatttttaaagatactatattttaataatttttattttatataaaatttatatctttaattatactaatttttttttaaacttttttttttccaattcatatatattcttaaaaaatatacttattgaacaaaaataatttatattttaaatatcatgacaaaaaaattaaaataaaaaattatatgaaattttcttaaaaatatatatttatatatatatacatgagttagaaaaaattatgaaaataaaatcaaaataagtattgaaattaacataaaataatgtgagaaaaaaatttaaaaaatatattaagagtaatttttaaaaaattatttaaatttatatattttttttaataatagaatatatttatcattttatggggtgcaaatagaactccccttcactttgtacatacaattataactacaccctaaaattacatatttaacctttagttaaatgaccaaataagtattttaaaagttttattaattttttttatatattttaataagtgcaacctgcgattgtttgttgaaatcttttagaaaataaaaaactactaattaaaatctttaaaaccctaaaatcatttataatcctcatctattcaagaaattgcaacacaaattcatacaaacaccactactaaccgcaagcatttagtgaaatccatgtctctatttccattaccacctactactacaatatggacttttcgagactgttttttcacttattggtgtgatgatacccgcttagttcgaaattgacatttagaaacggttttttggtaaaaaaccataggtatagaaattaactataccatttagagtcagttgtgggctggaaatttttttcagcattattgattaactctataccgtcggttattaggaaataactctatacgtgagagtcatacgtacagagtaaagacgagtttagttgtttcacattctcattcatatgttaatttgtttaaatgtttcttctgacattaattaattaattagaagatgatcaaaagtacttgattcttcttccccatgaacatgtagatcgatgtagctaataagaatattaacattatgatcattctggttagctttgttgatttagactatgatcatttgataataagaatatatatgcatgaatcatgatcatgtgtcgtt

SEQ ID NO: 225770 - DNA, 2541 bp, Cannabis indica
ataaaacaattgaacggtatagtctgtccaagagacatagcttaagagcgacgatttttgaacatactgtaatttaggggtggtcatccgaccttaagtaccagtttgtttttgaaaccattgagctaaggtccgctcaaaaaagtccacctacttaagagtgagtgtttaagcattgtgtactttaggggggtcaatcagaccttgtacacttattggttgtattttctcagatgttcatcgttccaataccttggtactagaaccagttccatgttttcatcataccgacaaagtttgtatgctcaagaatctgtaacttttgttacttgatatggcccttcccaattaggtccaagcatgccagatgccctatcttttgtgtttaagaacactcttctaaggaccatatctcccacaatgaattttctttccctcacttgcttgttgaagtatcgagctaccttttgctgatgagcactagctttaggtttgctgaaactctttttcttcaatttcatcaagtgattttgcgaggagggcatggttagtttcttgatcataagttagtctcctgtgggatgggggttctaattccacgggcagcattacctcataaccataagccatgacaaaaggtgtctgccctgttgtcgatatttcagttgtctgtacgaccataatacttctggtaattcctccggccagttccctttaactttttcgagccatttttccacggtgtctttgagtgtcttgttgatttctttgacttgcccatttgtttgagggtgtgctactgcagagaaacttttgatgattcaatgtgttgtacaaaaatctgtgaacatttggctatcgaattgttttccattatgtgagacaatcttgtgtggaagtccgtactagcatatgatgttttttactacaaaatccaataccttcttggatattattattgtcagaggcttggcttctgtccacttggtgaagtaatccgttgcaaccacaacatattgtactccacattttcctttgggcaattgtccaattaggtctattccccatatggcaaagggccatagactttgcatctatattagctcatttgggggtgcttggggaatcttcaaaaatctctggcatttgtcacacttttccacatgggcctttgaatcttcgatcatagtaggcctaaaatatccttgtcttagtattttttttgataaacttttcccccagcatgattaccacaaaatctttcatgtacttcgaacacgagtcgtgcagcttcttctgttgtcacacatcttaatattggcatggagaagccccttttatacactacaccttccactatgatgtgccatgtagcttttctcatcatttttcgagcctagtttctgttgctttgaagttttccagtgttgagataagctgctatagcagtcatcgagcttggtctagtatctatcatttcgatttctccatagaggtgatactgggttcttccaaatattaaattagaactaggttagccttatctgttaccgtgctgcttgcaagttgtgccaaggcatcaacaattgtttttcttcccttagaatttgcttgagggtataacccttgaattgtgcgagtaggtcttggatcttactgagataagccatcatttttttctccacgagccatgtattcccttgagagttgatttaccaccaactgtgaatcactgcagacttcaatgtatttggcacgtacttcctaagcaagctttagtccagctatgagtgcttcatattctgcttcattgttggaggctttttatttgaacccaaatttaatttatttatgcagaggtttcccccaggtgtgatgagggcaattcttgcaccaaaaagctaatcagtgactgatttgtctacacgtaacttccagatgggtttgtcttcattctcttcaggtagggactcatgttttggtcctttgtctggctcgagattatcttttagaatgtttgcttctttgcctatgcattctgtcacaaagtctgccaaagcctgcccttttactactgtgcagggttgaaaaattatttcgtactgacctaactctacagcccatttgagtaaccgtccagaagcattaggcttttgcaaaacttggcataagggttggtcggtatacacccgaataggatgagcttggaaataaggcttaactttcttgtggctaagattagacagtaagttagcttttcaattaaagaataccgacctcgtgccttaactagtcttttactgatataatagacttgatgatggacattgttctcttctcttatcagcacggtgcttacaacatattcagtgactaccaggtatatccttaattcttctttgtccaaaggttttgagagtacatgaggtttggcgagttgctttctcagttctgggaaagaatttcacatttctctgtccattggaacttcatattacctcgaaggatgttgaagaaaggaacacacttgtctgtagattt

SEQ ID NO: 225771 - DNA, 3221 bp, Cannabis indica
acatcatctggctgggtcttgccagtatcaacaacaagaaaaaaacgatatttgatctgagcagggatgagaaatgagaactcgacaagggttttagggctccgtccatggcttcgaccaaatctcaagaaaaaaaatacaacccttaactacaatctcctttttcctagtgaaaaaacacctagctagatccttgatgagacaaagattataaattagtaatttgcaacttgaataattatcaaacatgaattggcaaataagttcaagataattacgagtcataatcaagtttacataatacagctttccaatagaagctaagctgcaagaacatgaatgttttgtggtagtagctgagagacaactaaaccttagaaatcagccagtgatttcagtatctttcttcaaaatcaaatgaatttgaagaatgatataaacaagttgcataaattttaaaacagcaacctgggctgaaaaaagtgagaaatttattccaacccaggttataataattgaaataaatgttttatttttttattgttgagaccaaactcgttttctggtctttggagaaaaccagtttggggaaatcaatggttgccaggcttgcccccaacaatagatggagctgcacctctggttgccctgacgtaggatatatagtcactgtattgcatagtacataatgtgctctggtaacgggtcagcttgatcttctttcgaagggtttcggagatggtgccgctgtaccctgattttcgcatcaaggagtcgatggcttctaattttgtccagcctgaaaaccgtttcaaacagatcaaaaatacaagaagttagataaaacatttctgcaaacacatggaattaactgatacacttggacttaagaatgaacctctaaatttcctaaacacatagagcaatccatagaaagcttatttttcaaataaaagagtaaacaaaggatgatttctaagaaaaagagtaagcagatcactacataggggcatgtcatgatatctttgttttactataatttgaacttgagaacactataaagcaaacttgcaggctcctcagtaacaaaagagattaaaacttctcccttggaatggcaaacttgaattttgtaacaaatttcgattaagatttcatccctcaaggccaatgttaagaactgattaccatacatgctgatatcgttgaagatgcctattgtaataacattctgaaagtggaacatcctattttcacttccaatctctcacctctaactgtctgtcacagacacagaatgatgttcatgctaattttagttcataaaaggtggaaaaagagttaccttcatgggcagctatctcaggcaaatatgtggcacttcgccttgtattatcaggatcaataaattcaatgattataccatgctttccaacctgaaacactcgggcaaccagaaatatgactagattattatgtgagcatgctaatctcatattgaataaagagattgatccaatcaccacagaataaccaaacccatcaaaggactaaagttcatacgtttaaatatatagcagtagggattaaatgtttgaacatttactaaagtacacaaatcacatattactgccaaaagatttaaatagaaattaaatttaaagtttttttaaaaagtttctggagtaagaacatggtaacatccaaaatgaagagacacatacctcccaatcaagatggttgtcaccggtttcataatcagtcaatacagaaactgtacactccaaagaggacaattctttggcatgtatgggaggaaatctacgatccctcaaagcactgcaaagtatcacaacaaagtaaagctaagaacatcatcagtcaaaacagaaactgcatgttgacagtaagaagattataagaatcttggtctaaatatcccatgcatgttgtccctctcgattcatgtctttcatttcagcaagaatgtacattttcctaaaacaatacagaattgaggtaactcggctatcgtttctttctaccattttgtgtgtgaggtatagttctcaaatacctaaagatacagtaaacataccagcagatgaatttacatgatttgacttgtgaccattagaacaatacatgaaattcattttttttttacgatacctgtttagagcataatccttgaacccattaaccaaccaccgtgcttccagggttccaatgcatccacgtagacgaggttccccaccatttacagcttttttccaagtgacaaacaatgggctaagaccaaagtaaaatatattatgattttcacagaaaaaatgtagatatctacaattctacttcgtaacttttccattaacaagaaattatgtgaaaagaaaatatttatatggtgtttatttatgtatagagaccatgaaactaaaaatttcctctttttttattgtaatgtttcacatttaagaaattatgagaaaagaacagaacagaacaacataatataagcaccatgaaagataacaacataggcaaagaagtacagccaaaatggaatttcactgcagacagtcacatttctcccaaattttagcattatgcttcaaagtgactaaacttactatgattgttattatcttttacaatggacatatggggaatctgaaatttttacctccaatgacttcaacattggagatgtgacaaatcttgctcaaaaaacacaaaactattaactacaaagattaagcctttattccaatgtaatatcttcccctgttcgaatatcactaatagaaaagcttaagaaaactataatgattttatcgagttgagtacacacttgaccatttagttgcattatcgagtcacaacaaatactacattatgaaaaaaggaccctcagttagaactcaaattgatcaagcaaatgaactgttcaaactccccttagtcttcacaaggaaacccaggaaaggcaatattgccaattcaaacaccaagacaaaacgaaacccataaaaataacaataacagtaacaaaaatgaaatcccaaatcgccctttagagctaaactcaactcagtacgtaaaggtttaaactttttaaaaactaaacgccactcaaccacacacaacacaatataaattacgaaactttcatcacttcaataatttcagatgaaacccaattatcattttaaaaagat

SEQ ID NO: 225772 - DNA, 3019 bp, Cannabis indica
ggtgtttggatttgggaacatgactccgacctagacacagaccagaactcggacccagatccacacctgaaccttaaattgtaccctgtgacccgaaccctaaaccttaaaccctaaatcctaaactctttatacttacccctaaaccttaagccctgaaccctaaaccgaaacttgaaccagaacgtgaccaggaccatacaacaggatcaggacctggagcacgacctggatctacaccaggaatcggaactaaggctcaaactaagtcctggacccggttccagaccgagagtaggactgaaactcgaacgtgaacccaaacctgaactcgggactcgatcccgcacccagaccaatcccctgacctaaactaggatttagaccttgacatggacttgaacctagacccggacctgaataccgacccagaaccagaccgagatcgaaacacgggacctggaccagaaccaagacctagaccctgacctgaacctaggacccagacccaggacccgaagctggacccggactctaacttggacccagactgggatctgaaaaactcgtacccggactcgaactaagactcggaccccaaccccaacctggacccagacccgaacccagaaccaaactcagacccaaaattagcactagaactatgactaggacacgaacctaagaccagaaccgaacctaaaccgtaaccctaactcagaccagaacttggactaagaccttgactaggattaggacctgagaccttggaaccagacttggaccgggacatggacctgacttgttcctaaaccctcaccgagacctgagacccgcgaccctgaccaggatcaacaccctgacaaggacccgaaccaagactgagatcgagacttggacacaaatccggacagggacatggactaaaaccaagactcaggacccaaacccgaacctggataggggacctagaccagggcctataccacgaaacccagaccaagatctgaatccaagactagtcactgaactaggacctgacatggacccagcaatccaaagtttgacccagaccaagacccgaaaccttccctgaaccccaacaagcacaggaacctagacacgaacccacaccaggacaaaacccgaactcggacccgaacccaaaatcgaacacaaactggggacccaaactaagacccatgcccagaatcagatccaaacctagacctgcacccgaacctgaactcgaacccaaaccgggatcgaaacccaggacttagactcgaaaataaacacggactcaaatcgagatcgaaacctggtactcacacccgaacgtggacccacacccaagacactaaaccacacccggagcccgatcagaacctaaacatagattcagacccgaacccaaactcagacacagacttgaaccccgacccgaactcaaaccccaactccaactcataattgcaactaaaactagaaccgaagtaggactaggaccaagaccgaaacaaggaccagacccgaacctaaccccatataataacccagaccgagaaccaaacacaaactgcgactgggaccaaaacccaaacctagattggacccaaaccaagaccagacggaggacttggacccaaaatcgggatagggacctgtggaacggaactaggaccgggacctaagacccgaccttgacccgaacttgaacctagtacccagctcatgacccaccacccgaaatggaaccacgctgggacccaagatcgggatccggatctggacccaaggcttggaccgaacccttagtcaatgtctggatctgggacccagccccgtacccaaacctagactaggacccgaacacagactcagaccctaacccagtcccagacccaaacttggacctgaacccgtaccttgtgacccgaaattggaaccgaaacttgaagtagactaggacccgagaacgggaccgaaacccggactttgacttagaccaggaaccgtagccggagttggacctagacccaaaaacagaaacggactaggacccggactccaacccagacctagaccgcaaccaggacacaaactcgaatcccaacccaaacctagactcgagacccgaactcaaacccaaacatggaaccagactcaggacacagaactagggtcgggacctagaaccgcaacacagtcaaggccccgaaaccaaactcgtacctgggacccaagacctgaaccagaaccagaccgggacacgtgatagggatccagatctgagactaagaccaggacccaaactcggaccctgacctaaacctagaacccgaaacttgaatctcaacaagaaccggcagaccaggaccctcgaacaggactacgactgtgactaggacccgaacccagacctataaccgaacacagacctagcccaagacccaaaccgagactggaacttaggccgagacacggtcgtgtacccagactgggaccaagatccggacctgaacctagagccgggacccgatcctagacccagactcagacctacatagggattcagatacaacttggactcgaacgcagatctagaaccaaactgggattgaaactaaagacctagatcttgaaccgagaccctgacccatgcccaaacatggacccgcactcgggaccgaaactcggacctggacctgaaccaagacccagaccgagatttcgacctacacctagacccggaccaagactcagacaaggactcagaccgcaacacagactcagacccaaatctgaacctagacactgaatcaaaattcaaacttggactaggacctaaaaccccccgaacatggacctagactgggatagaggacccggaccttgatgggggacctagaccttggcctcggaacccagacctagatcgaaactcaggactcgaacccgagctagaccataaccaagccctgaaacttgagctcggacctagtaccggtcccggatc

SEQ ID NO: 225773 - DNA, 1881 bp, Cannabis indica
ataacatatgttgcatgttgaaaggcatgccaccaataggatagttgtaaaccagattgtgcaagaagagtcatccctgtttcattaatgtgtcgatgtttgcgttcggctctcccattttgctcatgatcatgaggacacgaatgctgaaactgtatgccatgtgtagctaaaaatgatgcaaatgtgcgatactcacccccccaatccaactgaacttttttaatgggaatactaaattgcttctcaactagttttttaaattgaagaaagatggggaaggcttgagacttaagagtcattggaaatatccaagtaaaccgactaaagtcatcaacaaagtgaatataatagcgaaagccttctttggatggttcatgagatggcccccacacatccgtgtgaaccaattctaagggcatagaggcccttgaggaggataaagggtgatgaactttatgtgttttaccaagtttgcaagcatcacagaacttgaggttttttaaggagctactaatatttagtttattgaggactgtggctagagtccttggggcagggtgtcctaatttacagtgccaaatattgatatctttatgaaaatcaacatgaaaagcctcagataaaggtgctgaaacatcaagatttttattactatcagaagtgttacaagatgagaaaactgtagaaacagtttctttattacaagatgttgtacagacagaagcattagaagtggtagaggcttttgtggctaagtgacactcgagctggacaggagcagaagagcctaaggactttgtcagcacgtacaagccatttttaaccctccctttgagcaagattttcccggttatcttgtccttaacaaaacaacaagtggaatgaaactcaagaaaaacattgttatctttggttagctgagaaacactgacaaggtttttggttattttaggaactttaagaataaaatgcatatgtactggagtggaagaggatggtagagagtgattacctatgtgagatatttggagtcttttgccatcacctacagcaagtgtatcatgaccatgatagggaatttcatagtctagattttccattccagtggcaacatgcttgttggctcctgtgtcagcataccactcagcatcatgggcaaaatcctgaaccatgggagagctatagggagccacatcttcttcctcaatttctgtaagataaacatgagagtcaccagacttgagaggaatgaatgtcttgtcaaacctgtaatggcaaactgcggcagtatgcccagtcttgaagcacacttgacaaagaagtcgagagggggccattcctcgaccaaattatctgcctgaagggcgattagattgagaaaagccatgtacacagtttggatttgttgcagatcgagaattaggcaaaccagaagcaaatcttggggagctggtggtgagatttgccatcagttttgacgaggagtcattgacagtaaagtggcgttcaaggcgactttcatgagtgaggagaagagattgaatcgactcaaatgagagattgtcgactaagctggtaacatgaacaacaactgggtcatactcgggccctaacccattgagaagatgcattatctaatcactttcgtccattggatgcccagctgtggataaagaatctgcaagaactttaaccttgtcataataatccgaaatggaaaggttacctttctggattgttgataattgggacttgatctgcaataatcttgctttcgattgagtaagggcaaatcgactgttccaaagctttccatgccgtggatgaggattacatattgagtctaaagaaccaagaatggtttcggacattgagatc

SEQ ID NO: 225774 - DNA, 1720 bp, Cannabis indica
tattatgattattattatagtactataaatatacataatatacatatacatacatgcaatagaagaaacacaaacataaatatattgatatatcgtactagtggctatagtgaggatattaattaaagatggagctaacgatagaagtgaagaagacaacaatggtgaaaccagcggcggcgacacctcgacatgtgctgtggaattccaacgtggaccaattggtgccaagattccttcatgtctcaaccgtttatttctacaaaccaaaacaaactcatcatcataacttttttgattccaacatacttaaggaagccctaagtaaggttttggtacccttctacccggtcgccggtcgcttagtggcttcctccaccgagagcggccgtgtcgatatcgattgtaacggtgagggtgttctctttgtggaggctgaaaccaactctttgttggttgatgattttggtgactttaagccttcaccaaagcttaagtctttggttccttctgttgaatattctaaaggcatatcttcatatcccctcctcctcgttcaggtaataatttttagaggagtggtactgttaatcttctattacaatctcttagtcaacttctatgttcaaaacacatttccggaattattttttttaatttttttttttcacaatcgtgttcgttatgcttataacatcatccctgtaaatttttaaaaaatctcgaatagtttacagtgccgaaaatacgtttgaagttttttgaacgcgcgtggtatcactaggatatcaggaactctgtttaattttcaaaaattttcaaaaatttacattattgtaactataacaactatcgctatgaaaaaaagatttgaaaaaaaaaatatttcgacatgtgatttcaaacgtggaggttgactaagaggttgtaatatataggaggttataattagcactcaagaattttttatttttacactttaaaattgtttttttatatatatttttactgaattttacatagaaattctaatataacaactaatggagcaacttaaattgcaactaaaatttacatagcaactcacatagaaactaccgaaaaaactatcgataatggtgttgataaaattagattgaaaataatgactacatagtatatttagcagaaacaattttattggagatgatctaatacttaattatactaataattatatgaaattaaaatatataatagacactaataataatttttaacatctcaaaattattatttttttgaaaataaatgaaactattattattattaataattttatgtttttccttatagaaaaatctgaatgtgggggcaggagtgttttggtccccaacaccatgaggagatataaacaattttgtcaatataaatattaataacaacaaatgtgactttattttttttttagtatagtgtaatagttttacaattatatattagcttaatagtttaaaaatcttgggttcgaacccatgacctcactcattttcccatccatccctcactactaagttacccttagtagcttccaaatatgacttcatcaagctcacgtcaaatgtctttcaaaaaaaaaaaactcacgtgaaatgtaaaatatacatgtaatatttttaggtttttgggcaccagttttatttagttatttattttattattattattgttgtttttttaa

SEQ ID NO: 225775 - DNA, 2052 bp, Cannabis indica
aaaataatttccaacagtaagctccccacgatcttccgctttccgaatcaacttcgacagaaccatacacaagatgaataaatatggcgacaagggatcaccttgtctaagcccacggcctggagagaacacatttccaggagccccattaaccagaacagagaaggaaacacttgtaacgcattgcataatcagtttgcatacatgattgttgaaaccatttgcgttgagcacctcagcaagaaacccccattcaattcggtcatacgccttatgcatatccgtcttgattcccataaaaccttttcttcctttaattttcctcatggtatccatcacttccattgctaaaaccgacattcagcaatccaccgcccctttagaaaggcactctgaaaagggctaatgatcttatcaaaaatcggctttaaccgatccgtaaggatccttgcaatgaccttatacctgaagttacacaagcttataggacgaaattgatcaaaagaggaggggttattgcattttggtataagacaaataaaagtatgattgagttctttgacaaaccttcctgaaacaaagaaatcttgcaccatatcgcatatgtcgcccccgattgtattccaataagtgcgatagaagacccctgagaacccatccggtcctggacttttcaaaggatgcaagctccagacagcattttttatttccatgctagtagggactcgacccacctctaagttatcagaatcagtcacttcggcatcaaaaagcaactcaaactcccttccaaaactaggatctgaggtggtgaacaagcctttaaaattatcttcaaagtaccggcatatttcttccctgtttgtgatccaattttggggagtcacctttatcgctccaatatgatttctacgccttcgcacaatagttgcagtgtgaaagcactttgtattactatccccttttgccacccacaactccctggacttttgtttccaaattctctccactttatattccaaataaagaatctccaattggattgaagcttccttagcacaattctcggaagtaattggagctccctgaattagactgagttggcgatgtagagtacgtagcttcctgtcacagaacccgaagcaatcacgattccaggtcttcagagctttcttcgtccacgacagtttcctcataactcgaaagctttgtcttcctgcacatggttggttccaggccctatctatcgtagtgccgcaagaaggatcagaggctcaaacctccataaatctgaagggatacttgagtccaatctcattcagtcaggtatccaacagtaaaggcgcatgatcagaactgagaatcgggtgatgattaactctagcagaagggaacatcacacaccaatccggactagcaatggccctatcaagtcttttacgaactcgagcctgcgcatctctagcattgtaccaagtaaaggctgagccaatacacccaagatcaattcccccacagtcattgacaaaatttcccaaaaaatatccttcgtgagcagtaaactcccttcctccctgcttttcatttgcattaagaatagcattaaggtcaccaatgatcaaccacggtccctcacaagctagaataatacctgtgatccactcccaaaattcagccttcttatttccataaggcgttccatagatgcagtaaaggaaccaaggttcgccaccatccaaagactcaactcgaagacaaaaacccgaatcaaacacttctttcacattaattaacattccttgcctccacgcaacacaaaatcctcccccaataccaactgagtcaatgcagttaacaatcggaaacccaaacgattcatacaacttaccatagccatactatccacctttgtctcagctaaaaataccaaatccactctttctctttgagcaaggccacgaatagcccactctgccgacggtctccgaagaccacggcagttccaagcaaggcacctcatggcgcaagtggggcatgaatctggccgcctcc

SEQ ID NO: 225776 - DNA, 2410 bp, Cannabis indica
caggtcgaatgaccatcttaagtatgaaataaaaaaaaacagttactcttaagtaagtggcattctaggaaaactacacccaaaggttcagatgaaacgacaaagtacttaggtcggatgaccacttctgaaagtacagttctattttacgcaatttgttttgtttatgttaagctaaagatcagactagatcaatataatagcttctatgtaagttactacggtaacaagtgtgttttgaccaataattgaataaaaatgcttattttaattcaaattgtgtcaactcaattagaaagttataaatttaccattaagtgcgtacaaaggtctgctcgtacccatagacccgaacagacaaaaatcatacttgtgaaagtaagtgaccaagagttaaaagtatgttcagtcacttggggggcatctatacctgtacaaagcatttggtaaaaacaaataacaagcaccaaaaaaaaacacacatagttgcacaatgatcttaacaaggaacaaaattcattaaggataacaaagcatgaaaaccggggattaaaagctgcccgatcagccagctgtttgaaaaatgaaaaatatattccaagtttatagaaagaaaggaaagtattcttctggtgtaactgagaatttcgctacaatagactggcgttttgatgattctatgcagtcttttttccaaaaattctgcaaggcgaagtcattaaaaagtaagatatctcatattcatgttgctcaccaaatagtccattatataaaaggtttaagaatttcttgttctaagccttggtatgaagatgaccatattttgttctttatagatcttaggaaagaaagccattggatgtttggccatcttgatttgaacgagggaattacatttctttataattccttgaggactgccaagatgaatgctgcagcaaggaatgcaatgaaggtgtattatgttgtgctcccattattctttgatcttcttgaattttagaagaataggcccactgttcctgatttgggttttgatctgaaaactccattaagagtggtggagattgcaaatctcctagttcagtagaaaaagtgagttgtttttgtgttgttcctttctggttgttttgtgtttcataatagttgattagctgttgtatttttctgttttcgtcgaacagagattgtagcacatttattgctgcttttgcagagtttttcatccatgataaagatgttcctaatgaatttgacattgaagtttaccgcactcgtcttgctaccttcttgtttgcccatggtcaaaacaaaaatgataaaaatattaacagtgaggatgaaaagtagaacaagtcttcgaaggcttgtaaagggaagaagtagggtcatctaatggggaattgatttatgaacttatgtgatttttaatgttaaatgataatacttgtttatggatgctactgttttatttctcgttttatgttatagtttattttttggtgtgacttattttaatcttttatattttttaagacaatgattgttttttttttttttgtaaattgggatttaatattttttgttgttagttcaagctttttaattacagtatatttttttatatggcacccaaattttttaacaattgttatgcaatgttataaaaactattccagtatgggaaaacttcttaatcttaaccccaaaagtgtaatgaacttataatgaacgttttgaatatattatttttggcattatatttacaaaaaaatctactatgaaacttttaaaaagtaatatgataagaatcttaataggaatatatttttagcacgacacacaactgtgagacaactgttatacaatgttaaaaagaccatacctgtacccgaaagtttcttagtctaaacaccaaatctgttatgaacttataatgaacttttttaaatataatgtatttctcatacaacttaaaaaatattatttaacttttaaaaaactaatatgttaggaaccttaatagcaatgtatttttaacttggcacacaactgtttagcaactgcagtgcaaccttaaaaaaattattttagtataagaaattaatatcaatctacctaaagtaacttttatgctgtaagagttcacatagaaatttaaaaaatttaaataaatgtcatgtctctatttagatgcttagttgtggcatgtcttctagttgtgacctttttggccacatttgctgcacctattatattttttgtttcccatccacctaaaaaccttctttttcttggtcttcctaatctcactttttgatttggtgacagaataatgatatctttaatattttgaggtacatcctatgttgtgtgattgtgtacaggatatattgacccactatatgtt

SEQ ID NO: 225777 - DNA, 2152 bp, Cannabis indica
acccaaatgtcaagcgtattcagggttagtagcttcgggtctccaccaaccttcaacctttcaataatcaattgcattctatcatatatccaagggctaccattgatcacacgttggatatcgaagcctggtgttccaaccaatcccgatcctgcgattagcagtacgaagcctgggcagccaggttctgctacagaggcgtgctcccatgctgaagaaccagacaagacaaatgtaaatctcaatgctttggagaatggcgggaaaggaaacttacccacaaaaggaatgaaatcacctgggaatccctctgactctgatattgcttcctcttctaatggtagcaaagtagccgttagagatgaagggaatttcacattgatgaccaagtttcaagtaggacaatcttttaaccctcttcttgggccgcaggcccaaccattatattagccttcaagagcttgttgggcttcaacctttgggcctctaactgggtcaaaaacagttgataaatatcatagagaacccactattttcaacccaattctttgcattgatgatttcaactgctatgaatcggaacatgggcctaggaaaagaaaggctatggatggattttatatgatacctggagttataccaagcccagaaactattcccacacttgatgataatcaaaacactttagcaaatactgaacttcaaccagatatagaggagactacggcttctatattctcccaggctccagtgacgacaagccggccaaacggaaaagaggcagaccccgtaaatgtgatgacccaacctccacttcggtagcaactgacaaaaaacgtggaagacccccaagggacaaagcgtggacgggtgtaacccccaagagcctgaagaaaagaggagtgaattcttcctctagaggtaaaactaaacactatcgtaatttatggaatgctaagtgttttgaccttgctatagacctagacaaccattttgtggtgattgaaaagaaaaaatcagagcacccaagctgcgtaatagaagaattggaagagagtgacaaactgcaccaacctacggaaaagtgctctggaatcattgaagcaaatgctgaaggacaggattttcagttcggggctatggagacttgcccagaaaagtctccaacgtccccatgaagctactagcttggaactgtcgcgggctcgggaatggcgcggcagttcgacaactgacggtaatcgttcgccggtcaaatcccgatatggtgattctatctgaaacaaggttggttcttgataaatttgaaaaactgattcataaacttcattttattgagtttgtgtacatacctccaattggtctctcgggcgggtttggggtatgttggaaacaaggggttgtttgcaaggttaaggaagcggataaaaatgctctgcttggttcgattgaatctgatcctcctgataccaaatggaacttcattggaatatatgggccgcctacaatgtcaggaagagaagatttctggaatcgtattggagactcgatagtaaacgaatcgtcacccacggttcttattggtgacttgaatggaacacttgcagatcatgaatgcctaaactatgccaatcagaggaattcagctagatactcctttgacttgaggagaatggtggcgagaaccggcttggtagatcttggttgccttggcggaaaattcacctggttccaaaaggcctctcaatctactgggggagctttggttagaagagcaaggctagacagggccttagcctccatagattggagaattttatttccaaatgcggttgttgagctcctcacagttggtacttcggatcacaaaccaatccttctaaataccgaggggggaacaaggtgtttgaagcctcaattcaagtatgagttaatgtgggggagggatccgagatgcttctggatagtgcgaaatgcttggcgagacaatcttcaccatgacccaatggtgaacttatacaggaaactaaggaaaacaaaggaacatctgaagacatggaataaaacgcactttgggaaaatccaacaacaagtggctgatgccaaaaagactctggataggatcgaaagttccaataatatgcagattgcg

SEQ ID NO: 225778 - DNA, 3530 bp, Cannabis indica
agagcacccgtgagccaagcccagcaagacagtataaataacattatgcaatatattcttcattgaaataaatattgatgccaccgcatctattgtctatttaacatagacctacgtgttgcgctcacacatctatttgtaataaggtcttagattagtttatttcagttttgattaccgagtctaacctaattatgccttacccgcataattctttatctaaacatatacaacatagtattgcattcaaaattatttaaacactagagtaataacctagatcgtataaccgctctctttaaagtaataaccctgattctaatttctcaatcaatcacaagcataatatcaacatgagcacctcaatgcttaactctacgtgctaactactgtcttacccagtatcccaagtaggtggagtttttaaatccctaggtgttcctaagcaagcgtcggtaatcctagtcacacatttataagattttacaaataggattaatctcaaaattcaatttcaaataatcacataattttcatttcaagtatagataagcatatagagctcgaaatgagctttccaacgatatcaagaatgtcccaaacggagttccaagtcaaaaattatgacaaaaataaaaacccaaaaataatttttggggaaagcaggacctcgcagcggcgagcccagccgtggccgcgaagagggccctggaaacctccaaaattgtcattttatccaacttcaaattttaacccaaaattcaaaaccaacttaatcaaatcatgcataatcttaaattcaaagctagaacaacctatatccaataatagcatcaatttctaagctaatcaaagctcaaatttaccaattcaaacacatactaacaaatgcatgctacaaaaccaacatcacttcaccaaaatctcatgcttaaactcaaagcattcaaacttataaaagatacccaaaaattcaagcatcaaattctcatcctaaaccaatcaaaatgcatcttacatgaatctaatggtcataatacactacaaccactaaaacatgacctcaaatcatcaacatgcatcaaaactcaacaagaacacattcaagtattttcaacaagctattaatttaagaaattaaatataaataaagagggattaaaagcttaccaaaaatacataagcttcaagcactaactcacaccaaatacactccaattcaagctttaattttaaaaattggttaagatttaggaaagatgagaaagggagagggagagggtcagctagggctaagaaaaccagaaaatgatttttccttttttcaaaattatttttgttggaaaataacttaagtggtcaaatgaccaaaatgcccctagagccaattataaccacacatatatatacaagggcaaaatagtcattccaatcacacatacataacacaataattcaaattttctcaaccatcatattaatgccataattaaattccaaaaatttcttttgggccccaaacccggttcgtcttaaaatacccgattgtgattataccgcgccgacttattagaaaatacctgcagatagatagaataaacatactatataataatatagtctataagcataatatatcataaaattacgattttacccttctttggtcaaaattatgaaaatgctcctaacacactaacaagttcttaaaatacaatttatcaatataggtttgcatattaaattatataataatataatttctcaataatacataattaaactagttagggttgctaatccagcttcataaaccttaggatattacactttaattaatggttgctagtacaaatcactgatgcccgttcttcagtgcaagtaatcttggtttggattacgactgtagtgagaaatcaaagtgaatgtactctatataatagagattatatatgataaggaccgatatgaataaatctgtctttatcaacatgtcgtttatcataaagatctaattcatatcataacgatgatcaatagtagaccaacttaaatcttgagttatcatgaactcttcttcatgttatttgtttctttgattcactcgttaaagtttattagaaaagattattcttataacttctattttgggaatctaataacatggatggttggaaacatgatgtaccattgtagaatcctaacttcctaacggatcgaatgttagttcccgtaaagtgttaattctggaattggaatattgtgcacaaattcagatggcatcttgaattatactacactagtgaattaatggaactaaaagtaaagaagtaattagaaaggtaaaatggtattttgaccaaaactaattatgaaccaacacatggagggctaatcacttgaattgattatattaatagacaatgtaactaaactcagtaaatataattctataattactaagagtgtaacatatttatagtggagtaatcgtgaaattaataaacaaggaattatttggttaatgagactcaattaataatctagtttatttagagcttataataatagattcatggtccccgaatcgccaccttgaaacattgtcaaggtagagataaagagttgtataaagagttcaaagaaaatctattttgaattagaaaaatagtaattaattattttttaattattttttgtaataaataaataattttttcaaattaattaaatagggaaaaagacagaaattattaagacaaaaattttcgagacaagatttgtcaagacaaaagttatcaggacaaaagacactaatcttgtcctaaacaacaaggtaggcgcctaggcttggtcctgtccctattgaatttttctttttggggtaattaattaaattatgtaaatatctaatatgaaaagtggttaaagatatttcaaggttattgagatattctctcaagtagttgagagattttctcataaatattactaacaaaatttggttatagatatttttatttaaacaattaaataataatttaattaaaaagatttaactactataaataggagtctgatttgagaaatcaaaacatcacttttcacactgctattttcaaattctatagagagaaaagaaactttattttctctttattgttcttactcatgtgttgaaaagtcaacaagaacaaggttatacactatattctaatagcccacactattctttgtgtgtggtggatcgatttagaagacactggagtgagtccaaattgaatttacctcatcaactacattaaagaatataacttacagaagttttgaggataccctgataggcttcaggaggtatactctaaacttattattttttattattttgatttaatgtacacacgtatggagatcctaggggctatggtacaatgataatcagataatacgaaactcttctgccacgtacctaatttagtaccataaaaccaacatggatatcaatgtttcacatgtggcaagaaaaaaaa

SEQ ID NO: 225779 - DNA, 3333 bp, Cannabis indica
aatactatgttaaactttaattatactaaaatattatatatttaggtgtatataaagttaataccacatatagttttacattccacatatatttgtggttctttttgagaactaactgcaaagatgaaggctttgtgagtattagataattgataataggaaaggaatttttttagatagtgtggtgtgaaagagtgatcctggatagtagagtaacacataaagttgcgcaaatagctctttgtagttgagagactcaacttgaccttcttagacaatgggggagtgagtagatgcagcattttctataaaaaaatcagaaactggtgtgttagaaacaatgtgattagggagaaccaactaagaaaatagattggtactagaattatgatcagtgtttaagtgtgaaaatgaaatatatttttatgaaataccacatttctcgaaacaaagaattgatgattgttaatgtcatagaatttgcaacctttgactctttaagggtatcccgtgaatacacatgttcgtgctcttggggaaaattttgtcctctgagcagacaaagtaaaagcaaacacaagatagccaaatgaccttagttgatcatattttagtgctttattgaaaagtaattcatatagtattttattgtataagagtggtgtgggaaccttattaatcaagtacgttgtaacaaggatacattaagaccaacattgaattggtattttagcttgaaaatatagtgcatgtgcaacattaagcaagtgttgatgttttcttttaacaattgtattttgttcaggtgtctcaatgcaagtgaagtcatccatgcattataccatgttgtgcaaatagatttttaaaaatgaataccaggcgcattatctaatctaaaggttttaaaaattcgtccaaaatgagtttgaacataagagagaaattgagggataatagtaagtgcattagatttttgttgtaataaataaatcctagtaaacatcgagtgatcgtcaacaagctagtgtaagaaagtatttgtgattaatgtatgaaagaatgtgttagggaccccgaatatcacaataaattaaattaaaaatttgttcaacaaacttgatattatttggcaaaggtagtttctttttttttcatgggagaaatgtaaaaaggattagttctatgtaaagtagatatgttacaatgcagagtatccttaagcaaatctaaatgtttatgacaagtgtggcctagttgggagtgctaattagtttccgcataacatgagatgatgttggtgtgacacaaggatttagagatcatctacaattttacccttttcaatcatcttcttgctgacattgtcccacatataaaaattgttagaattgaactttatggtgatagggacattgttggtcaagtaacttattgagattatattgtacttaaaatttagagcataaagttcatcagttaagataagattttcaattatggcaattgtgccactttcatggacaaataagaagttattattgggtaagataagcttagtggttggtattttgcttatacattgaaagagtctaatattagaacaaatatgttatgtagtttctgagtcaatgatccaataatcatttaaaagaaggttaaaattgtgtgatagaacaatacctaaattacctgtcgaagtgctggttctgaagtgttcataccaggttgttgagaggcaagcaagttgagcaactgctagtactgagttgcagccaattggggcaacatgtgtgactttctatagggttggaagtgatgtcctcattggtctgaacctggtttgtgttggaatctttaggtttgttttgctgtgaggataaccatgaatcttataacatctttcaatggtattctggtaatcttgacactggagctgcttttaccatggataatcttgagaattctattccttattctcgtaaaaaaaaattgtagttgaaaatagtaagaaacttgtgatgtctcacattggtaaagctaccatttcttccccttcttctcaccccttgcacttaaattttttttacaattttcttctataactaaaaatctagttagtgtatctaaacttactgctagaaaatgatgtttccttagaatttcacaaatattgttattttgctaaggaaaaaaattgggtgtagttctactcaaagggaagcttaaatgtggtctctaccttctaggagatgaacattctagtattttcaacactttctgagtgtcatttgactactattcatctttcaagtttctgaatgtaattctaattcttgtcacaagaattgttatgaaaattagatttaatttgtttccccatgtattgacaattctattaataaaaattcaaggtctctttattctttcatgttatctcctactgcatttaccaatttatcatttgatgtcaacttgatcatatctgtaacattaaacaaaatcttaagtacattcaatatacctcattcgctcaaaaatttacaattttgtaaggctggtcacgggggtagaagtcgtagactttccttttctttgtgttaatatcctggtaacaacctcttgaacttgtgcatactgatttatgaaatcgttctcatgttacatcgaaggataattttaaatattatatggtctttgttgatgattacaacaagttctcttggatttttcaattaactctcaagtctcacgcattttaaactttatcagattcaagcgtttagttgaaaataatttaatatgccgataattttttttcaagcaaatggtggaggagattacaggtcttttgagaaatttttaggtgatatcaagaactcttattttagtatatccttgtccccacactcatccttaaaatagacgagttgaaggatatataggtaaatcattaaaacaagattaactatcttggctcattctggtttggatctgacatacacgtggtatgatttttaaagtgctacctatattatcaatcgaatgtcatgctttaccatatcaatccatatgagtgttcatttcaacaagttcctgattacactgtgatgatatcttttaattgtgcttgttaccctcatttaaggccttacaatcatcacaagatggactacagacatgaagaatgtttattttggggatattcttctaagcgtaagggtactagtgtcaaaatgctactataagatcatttatagctcaaagtgtagtgtttgatgaactctccttcccagccatttagatctacatcctcatctcaggtacattctacct

SEQ ID NO: 225780 - DNA, 3897 bp, Cannabis indica
attttgcccaaattattgtacttgcaagggctggtcgcccaggtatggaactttgcaaagctggccaaccaatgttggagttttgagaagctggccggccagccattctatggagattctatggccggccatgccttttttctggcactaacttagttttgttttgatttcaggccctattaaagttcagccactctcatggcaagaccaagtgatcctagggcgctctctaggagaagcttaaagcccaagagactaagattttggtaaagggggaagccctcaccaatgtagaggctcttgttgaacagaggtagggcatgattactagattggagcacattcttggtatcaaaaaccaagagaacaacacacttgctgctgagacctccaggttggaggtagagctcgggaagagggataaagcactgaagcttacgcttgatggccagcaagccattacggacgagtatgttggcttgtctttaaagaacttatacgaggttaagctgtacaaccctaatgatgatctctcctacgtctgagcttctttcgttgaaagaacactagcatagggaagagaattgtatgagggcaggatgcaactagactagaccatcgcccaacccaaagagtcgtcgtcaggccactttgacgtggttatgtttgacacatctactgaggaggtggttagccaagctcctaaacaggagggcagctagcctgtagaggtcatggccaacccacttttttgcaacttagatgttgcagcttccaactagactccacctgcacctacacacgattaaaaccactttattagtattctggatttatgattttattggcatagacatactagtttcatattctgtatggcctattggccttttacttttgaagactacttattttcagccccagggctttcacgttcttacttttggcctctagacactctatttttgaacattactattatatatccctaaagctttttatcatagatatataaccgataatgcagtctttaatccttgctatcttcttatttccttgacatataactctctagatttactttttttgtccaaatttttgaatgcttaacatgtggattctaacatagagaggctcaatgataatcaacaggtcaaacaccattgaccattgttccaggaagatagaagccctagctcacgggaaaggcctctgtgaaggggactctcctgcagacaatgatgcggggagcatccgcgatcagaagcctgtcccgatcccgagaactaaggccaactactccctcagaatcgaaattgaatactcctgcaacgggtatgaatttctcccaaagtacctaaggatgccttgcaaaatgactatctaagttgtaaccccgtttggcgaaggctctacttgtacgtgttagactacgaacatagtagctgggcttttttaggtacgacgtcaggatttgtcccccatgatatgtcatagtacagagcatgcatgctcaatcgtacctgcgttagtgatccaacgaccatgaacaaaggaaatttaaaaaggaagaccctgtgacaacaaggtatgatctccagctagtaccatctgatacccttaaatgccatgtgataaaacggccacctattagattgacagtgggatcttctcctaacgtgatcaacccaccaaacgcatgaagggaagctggcctataaatacccctgccctccataagataggggcataacactttgaagacaaaaaaaaaaaaaactatagattacatactatttataactctacaaaaattcctacaaagcttctccttcttcaagtggaacatgaggaagaaagagttttagtccattgtatacaaatctgtatgaacattcactggccgaagtgcctaataaaatggactcgtgtactaaggatagttaacgcctgaaccacgtaaaattctcccatttgttatttagtttgctatatcattcttaagatttaaatattttgtttttgaaaatatcaataaatattttggtgctttcattgagaggtgtagaaagagagaaacatgcatagtcgtcaccgtcacaaataagaaggagagcccatccaagaaaagaagaagaaaggccgcctgactatccgccaggatttagcttaaggttagggttgtgtaggataacggtgtcattgaaagtgaaggcctacacccatgtcaagacggagaaaataaataaggtgaacacatatcgtcttaaagtactcacagtacccatgcatgtttataaaagcttagatatggctggccaactctctgaggagatggctaacaaccggtatcctcgagctggggtcccctgctgtccactaaggcatgaccacgcagaagcaatgaggtgcatgagatgttggggctaggtggagaagctaaagctaattgcttcgacgatgaataacttacgaagggctattagatataactacattgtctagctcacaattccgatccctcaaccttcaatctcagtgtcggtgttggtgccaatgccagatcagccgccgacaactacttccacaacatttttgctgagttattaagttgatcagaagatgacattgcaggatctcgtggttgcagtgattgagagttttcctctggggtcatcaccgcctgctaagttcctggtcaagcttggttttggtgttgttggtagaaggtgcgttgtcaaggcaaatcacttttggtgaaggttgctgacagcgatttttgtcattacgatgtaactataactcctgaggttacatccaataaagtaactcgagacattataaaccagtcaggacatctctatcgaagtgacgcttaccctactggaagcccaagcctctgccttcaaaactactgagcaccttgaaatctcccaaagaaagatattgcccaagagatcatggagggcactaagttggacacatctcttgaggcttatcggagttcgggtggctcgtgcatgtactttttcgtgcatgaaagatcagtgggggtatgatatgtcttcaaccctccttctcggaaggaaaggattgcttgaagtctatcacacgcgtagtgatgtttcaccctttggtcttctaatgccaagtcatcgcttgcaactttagcctttcctcacgaaagttgaagtctactacataaaaattcaacatgacactcgcatgcacgtagttttttgtgtgtgaaagatcacttggggtacatacgtcttcaaccctccttcccggaagagaaggactacttgaagtctgtcgcacgcctagtgatctttcaccctttggtcttttcaagcaaagtcatagcttggttttatgaaacttaagcctttcctcgcagtgaagtttgccacataaaaattcaacgtgattctcacacgcacgtagtttttcgtgcgtgaaagatcattgggggtacgatacctcttcaaccctccttcccaagaagagaaggactacttgaagtcagtcgcacgcctagtgatgtttcatcctttggtcttttaaagcaaagtcatcgcttgaattttagtgcaacataaccctttcctcgtgatagccgaagtttgctgtataaaattcaatgtgactgtcatgtatcgaagtataccccagcctcgaatagttgctcaagttatggcgtagtttcagctttcctttaaagaaaccaaaagcttgcaacacaaatcaatagaaattccacggattctacacctcaaccacatggtctttatcgtggcaaagtatcacttttgaaacttatggatggaaatatcgcttgaaagatcagcgcgacttcaaccctcccttttagatggaggaactacttgaagtctg

SEQ ID NO: 225781 - DNA, 2486 bp, Cannabis indica
cttatttctaggccaaaatctcacaaacattgggaaatggttattctcagctagagatgcactaaattggagtggagtgactagggatgtcatctctcggcttgaaattcatgacattggtgaaaagtgtttgagataggtgttttagggtggcacttctcgcatatgatgtcacgtgggctgtggcatagttctccaacatcccacacttaattacactacttaattctcgagtaaagtgtactagcctgtcttgtgagctaattttgaacctgataatttaagagttgagctatgactatgaaagacacttagaaccgtcttgaaattatctttccagttcaagtcgaaccaggtcatttggataaaatttgagagagttatgcttattttattgaagggtaatttgtgttattttgctccaaatgcgagcactgacacagccaaatggtagctctcggtcgtgcatgttccctgaccccttgtgtaaagaccgcttcactttaatacaataaattattaaataattaaggtttaattataaaattaagttattaaccatgatttatgtatttatggagattaatttaaatttagaatgtgctatttatgatatatatgaaatttcttattttccgtatttgtgcccgataacagtgggacgtaacgttgggccattagagagtcacattttcatatggtttagaattttattagtattggggtaacataattagatattggaagtatcgggaaatgatcaggatttagaaatgaccaaattatccttcggtgtcattaaacttttggtctatgctaaggggcaaaatggtcattttggctaggaatttctttttgtcttttatggatattagcatctgatttttatttagatttaattaataataagttatattagtctattgaaaagtgaagttagaagattaacctagaaagttctctctctcaccaattctctctctctccttcgaaccaacaagcaaccagctggggattttgattttcttagcttaattcagtgaattctagcagagttggagtgtttcaattcaaggtaatgtcattataataacatattattatagagtagatgtttaaaaatcaagatatttatgttcaaataaaatcaatatatgacagatttttaaaaatcaacacattatcatgatttttaaatataattagtacggtaatataaaaattttaaatcaaactcccaattgttatatatataccaccttcatgtatatacacaaaactaatttttcatcaaaataccttaatgccattacaatggcattgagataagaaaagaaaattattcaactatatgaatctcatttgttataaaaatttattttttgcgacatcaatcaccattctttacgagcaacaaattatgcaaatctcaaatcgtaagctaccatacataattttcggcaccaatagattaaaattgtatatgaaaaataacaagagtctacatacatcttatgtattatacaaacaggttgtttataagcactatacatattaataaagtgcttttacaattttatttttacagatgagattatattattattattctaaataatatgtatgatgcatgttgatatatatatatatataaacaaaattattgatacactattcaattgatactatagcaatatatattcttaaactaattataaacaaaataacaacaattaaactaatatctgaccctgatacaaaactattaaatattaattataaaaaaaaaataaaaaaaaaactaattttgcttcattcctagtttcacaaaaaactaaaaagtaaattctttttatataaattgaacattcctggtttccacaagtttctatggtagtacacacatgtctccaagacttctatttataatgtattaagacaagataccacccttgttatctgccgcattgttgtcaaattaatgcagactcacacgcatacccaaacacgcacaaaacaaaaaagcaaaatgcaaaatgtaatatttcattactggtactaaaaagtaaccatctctttaagtttatagtgagtaacaaaatacacaaattttaactcttcttttttactatcaaagtacacaaataaatcaaaaagaatttattacctggtatgagtaataagtgtgcagatcaacagatgacatgaaacatgtttgtgttggatgtctgaaaaatgaaaatcaagagacaaagagttaataggcaaagacacaaagctgtgtaaataaataattatacacagaataatgatggaagatgaccatgcaaattctgtagtatttttctcagaaaaaggagacactctaataggtgaaaactaatgagaggaccatactccatatacatagagaaatgcacgaatttttataaaaacttgtaaacagagctttttgcataccactgtagacaaaataatttagtcaa

SEQ ID NO: 225782 - DNA, 2209 bp, Cannabis indica
attctatgggcacctagttacccgcggttttcatatttttttttaactttttattaattttttttccataaaataacattttttttaaaaaaaaaattatatttttgcaacaaaactctatttggattctgccgcttcatcaaagatttcatttaactaaaaaaatctttacttctacttcaactagacttcacacagatatcaaacccatcaactcactaactatatgtactaaaataacaaaacactattcatcaacctatattttaataaaaacaataaaagattaatgcaagttcaaataaaaatctaacattctcccacttggactatattaattatttttttttaaatggattatatgcatacatatcaaaatagttttagtagaatttacacttaatatagaattttaatattttttttacttaaatatggcatatttaactttgcctattttttatgacattttattatttttgagcttttttatgggtttatatttgccataatttgtaatagaactgatttcaataaatgagatttattgaaatataaaatttaccaagaaaaagtttgaatatctaactaatttaaattagggaatgtatttagttccatctgatttaaacctgttcttaataaggtggccaacgacccatagtgctgcttgacggttatcatcatgtctagaatttgggttacatgtgtattcattgtgatacatagtgacctcaaacaagtcacaatgtgccttcttcctccccatcactctccattaacaatttgaatccttgcaagttgcgtaaaatacattggtgccaaacttcctcaccatgaactcaaaatttatttttaatgcaaaccttcccactatatttttcaattcagtcttgtttgtgtacaacttgccaatatgtattttccctaaaggtgtaccactaagagaagttttataaatattatttttctctatgtctttccttgtccatacaataggttcaaattttgtacaaacttcaaaattagatggtacagtactatgagtaggacctagccagctgctactagtgcctggtatttggtgattttcactacgaggggttcttttttcttgccctgtcctctggttacttagtggtagtggaggtagttctaacctcaaagcaggtacctctacagcttcatcaacttgcaactccacattaccatcctcgttcaaatctaccacatgattattgttgtaaaagggagtatcaaactcatcaaaccggtcacatgcattatcaaacctgtcctcatctatattagtaggggtttactcattcaaacttatcgctggatctatttctaggataaaactcccaacaacacttcttagggggacagttggcggagtaggccctaaaattgcatgtctcttaaccttaatcacaaatagtggaagaaatttttccacactcatttttgtcttcattcttaagaagaatcttaattgactatctttcactaaaacctctgacagtatcatattgcctttcatgtatatgtaacacacatctactttcagttcatacacaagaaggtctatatccaactcttcatacaaaatttattgtatcttctgtaaagtagtatcaacctcaaatattaacatcttgctttttgtgttattgaatatcaagttgaaacattcatctgcccaagctccatcataaagtatgaccacaaatacacttgaatctgcaaaaaaagaagaaaaaaccttagttgagaaaaatatgtcgagaaatatcacaaagtgacatcgtgaaatgtcgataagttcatcgccacatattgcaacatatcgataaatatcattcccaaattcactaatatataactcgaataatatcgacaaatatcgcaaataatgtcgatatacatcgcgaccatcgtagtttgaaaacataagataaacatgtcgtaaatatagtcgcaacttgtcgccaaatatcgttaaaagtcattcctcacaatcagtatgctctaatatcgccacatatcgtaaaacatgtcgccaaatattaataaatgtcatcctgaacattcagtatgctctaatgtcactatatatcgtgaaaagtatcgcaaaatgtcattaaaacaaaattaatcaaaaaacacaaaattttgacagctcgaatttcaagaacaacacaaccaa

SEQ ID NO: 225783 - DNA, 1802 bp, Cannabis indica
aatttagcacaaaaattgagtttttgttataattagctcactatttacaattatgcttcaatataaagatgtaaaaacaaatataattatattaatcatcattaatattatattgaaaatatacaaacattattattttttattttttatcgcttaagtaatggtaatataataaataaagaagattaagtcatgtaaaagtcaatgaaccataataatgactggcactataataaataaaaaatgtagaatttatttaggccaaatttgacacgatgctatatcttgtaccaaatttagcacaatttttagcatgtgccatatttgacacattttttagaacaccattggagtagtatttttcttaagtgtgctaaaatatagcaatagaatacttttttagcactccattagagatatgcaatgcacatataattggttttctcctaattaatttaattaagtgatgttaagtgcaataaatgtttcagattaataaccatccatgccttgccacgtgtatatgaaatataccaaaagccatgccaactaaagctttatagctacccaatagcccagattgacattccaacatttgcttccttcccataatatcttaagtcattgctttgcttagagagtctaaagatggattcagtcattgaaacaaagaagcctcacgcagtgtgtgttccatttccagcacaaggtcatgttaaccccatgatgcaattggccaagcttctacactctagaggcttccatataacctatgtcaacactgagttcaaccacaggcgattgatcagatctaaaggattggactctgtgaaaggcctatctgactttcactttgagaccatacctgatggtttgccaccatcagatcgtgatgcaacccaagatattccatcattatgtgactcaactagaaacaactgtttaagtccgtttaaaaagcttttacataagcttaacaattgttgtgaagtgcctcctgttacttgtatcgttacagatgggttaatgacgttttgggatagaagctgcacgggagtttgggattccagaggttgtgatatggacatcttctgcttgtagcttcatggcgtatctccattacgatgaacttgtcaaaaaatgtctcgtacctttcaaaggtacaaacttttcaatttgtttatattaggggtgataatttatgactcaacaccactatataattttaaaacgtagaaaataaataatttcgggtgaaagtactttatttttcatgtcaaaattatgttgatctgcttaatatgtttattagtgtcattcttcggatcaaacacacttacccaaaaataacactaccacataaactgaacatataagtatttttaattttttatattatatgaagtaaaaacaaataaataaaaagaatttccttaagagcatgtttgatttagtgtaatggggattgtaatgaaattattattactattacaatattatttgcctttgtaatgactttatattgtaatgattattacaatatcttcattacattataaaactaatgtaacaaatattagactgttagaaaatagtttaccgttttatgttacttttatataaattttaaaaataataaaactaaatgtattttgttaatatacaacttactttatttgattacaatatctattatagagataaattaaatatcataataccattcactacaaaaaactactacttttagtaacaactttttaatcacaacatactttttttgttacttgtgactaaaatat

SEQ ID NO: 225784 - DNA, 2192 bp, Cannabis indica
gaaatctttagaagcaaactagagctagccatcacttgaacttcccgatcaagttatgccacgaaccaactcaaagcatgacagactttaaacgttttagaaaaggaaataaacttcctacctaaattgttttgtaatatctttcactttcatgcttaacagttacatagtctaatcaagttattatagaaaaacaaattaaaaaatagtgtcgtaattataagaagtatatgagcattgttattgggtaccagtggtgtctagcacccttaagacgtgttgccttgcgattggctagcgatactccctaaaagttattatattaaactatatgggacccgatacttaattagactaatagcgatattaacacataagagagtgcttgacaccagtacctgcctttcagtatttctccatatatatatatatatagttatccaaattccattccacccttttcaacctagtctattggtagatgcgccacgtagtaattataggcatgaaaacttaagcactattagatattattagagcattactaatactattattgggtactagtgatgtctatcacctctagacctctagacatgtcctttatgattgattaactatattcctaaaatttattacattaaattatatgagaatccgatacttagtttgagaaataataatattgccagataaagtggtgttagatactactagttctttttaacattagtcactctcatgagaatgtgtatccaaataagacatgggcccatgatctacttgacaagcttatgaggctatatatatagctttattatatatgccgttcaaacatgcccccagccttccctattaattcccttgatggtgttgatcattactttcacaattatacaataatgactttattcccagatcgttgaacatgaaaataaggcatgtaggaaagcaacactccaactactactactcctcaatatgaccaacaaatcatgcataaaaagtgacctagctgaattcatttttaattttcacttttcttttctcttttttctttccacgtaccttttgtcatttcatctctctcactccacaatctcaagtctagtgccttttaattatgtaatagctagttattaattaattacaacatagtttatcacccttaatgatttcaaatattataataagcctaataaatgcattagttcaattattagtacaaaacgatcgtacgtagaagatcagtagtttagatatataatcttaaaaacatgcatgcagatcaaataattttctttattattttttttgagaaaaaaatgattttattaattattactacgaagttgcaattgataacctcagcatgcataatgagttcaattattaatcagtgcatatatatatatattaatatacattgtattcgtacgataaataatagtgaagtgcgtgtgaacccagcctataacaaatagcttcttgcagtgtttgatttatggatgaaaaagccaaattttatggatctcttctccatcgcacatgtttataacatatctatttgctgacctgcgatatttttggataaggttataaggctatatgtggatcagattttggtatgatatgattacattttgtggtatagtttatccaaataaaaagatctataaaagatattcgtctcatggaaagacatcatctagaaggacggtctctccatccgaaagtagtctctagggaagctagtctgcctctagaaaagtgttccggatggttagttgtttcctcctggaagggttctagatagtcgactttaactgtacgtttatccctatatgagaagttcatttagtgtccaagaagcgtgcctctcattcgaaattcgaaattaagaactttatcttgagctgatgtggagataatgttacgaaagtttgttaagtcgttactgacttaacaacttaattactacaaccattgacttaggaatccatatccctgatctatactcatcacttgcaaggggtgattttttttttggagtgactttgagggttgaagattaagaatgcacagagagatttgaaaggttagagagagtagagagaggtacgaataaatagaaagattggattttgagtattgtatgaagaatattctgtagatgaagaagattcttaggt

SEQ ID NO: 225785 - DNA, 1240 bp, Cannabis indica
tgttgaaaaaaaaagaaataaaggttggtctcctactgtgcttagggtcgagcaaacaactttagttaaatttagggatggccagtataatttttatatctgaaactacgtacatcaaattgctcatagatttgatagctggtatcccaaatttcatgtcctgttaagttgcaatagctcctatttttgaattgccgagcaatatggtacaaactctgatacagcgagccatccagactaagatttgtctcctttaaatacctttgctctcttcatgatcacatgttccagggagtctagtaaatattatagttcttcttcgtcatcagatgatgattatgatatttttctgagtgggagattacctctccacgttttccttatttagtttatgcaagtgctgaccctgtctttttcctcgcagatgtggattttgagagccttgttactagctcgggaaaaaggaaagaagaggattgcagcttcaaagacttcctcgggagcgaacccagagccattaaagagatcaaggaaaatgacggccaataaaaaacatgcctcgagtcaaatttttatcgagccaaccgataatcaagtaatctccccaatcccagctactgagatcactgatgaacaggtcttaagatcaattctccaagttaagttctcgggttcaacaccagtgatggtcttattggagccttcctgccccttgcctagtcatgcaggtatcatcggcttgcaggcctgctcgcagtatgctacctcatgctggtatcattataaatccttccaatagggtaattgggacttgatcaacaatgtcaagtttgaggagttatctaaaaggattttgaatctctttctctctctcgattagtctctttcttcatatcatattttcattacatattcttccttggttatccttcttctgactttatctttactgtaggcatctttgctgtctcacttggcccaccaaagaggcctttagtgaatcaaatagttagaatccaagctttgcaaatccattgaacaatgtgaggttaaggggaagaaatggactgatgctcaattggagaacacccgactgaagaaggaagtcgaggagcagaagagaaatcttaaggctgagcttaaaggtgcttaaaaggaagccaaggatctccatgaagcccaccaaaaagttaaggaagaacttaacaaggccaatgaaaaacttaagggtgccgaggcc

SEQ ID NO: 225786 - DNA, 1583 bp, Cannabis indica
aaaaaaaaaaaaaaactagcactattagagttctactgcctcggacaaagcgtataaagcttcacatgaaaagtagcattatttaatccaagtcaatgtttacaatattaatcaagattaacttgtgcttgcagatgctctgttatttcccaagtaaagtgtatctacttgaactgggtgagattttgaaataaaaataatttacaaaatcattaattgtgagtcagcaaattgaaccaaatatatattcagcttgctataaatttatggttacataccattaagcttgcgcttttgccgctatctgcagctgcaggttgattgctcaaaataggctcatcatcgtcaactggatgttgaggggaactcaaagaaacatttgtattattttggaatcctttttctactactgttggctgcatctcattccagttatattgttgatttgaatgtctttcatccatctcagattcacactcactagaaacattgtcatcgtcccttctcgaaactggttgcacactacacggaacttcgaagccagctttggaaacttcaactatcattctacgttttttcttgaaagtttcaacctacaaatgataaactggataagataattgttccatcatgattttgttacattgttaaacatatgcaacaaagacaaacctgaccaatgtttctagatgactttagaagagtatatgcaccatcgggaattgtgtatttcctacaaaattcatcatcaacaagccattcacaagggatgtaaaaaagagagtgtaattataaattctatgagtaaaaaggataatccttactgtaaagtctccaaactttttgttagcaaaagtgctttttccttctcttcctacacaaaccacaagcaaatcattacacataattacaacaacaatccaagtgaacccacatgtgcaaaatgatggaaaatcacacctccaactttttcatcttctttttttgagatttgctcaatttaggagctgggtttgccttgatttcttcacacccctaaaaaacattcctcataagattagaaaaagaaagaaaacactttttggtaataagatcaaggtgttacaagggatataccatgcccttccttttgttctttttcttactttgcaagatcaaagcattgctgtcattatctccaaaactaccaaaagcaagaaaaagtaataagaataacatattgaataatggaaactctagcctcactttggtatgctaaggttctctaattattaataagcagaaataagttacctcaacgtatcttgttcacatgacaagttccgagactgtcttctactttccatatccaaattgcttatttaaatttttaacttattcaacagcgcttgcaccaaataacaggcgacaatcttatgctaaatgcatagacaaatttagcttgatctgacaagactggatatcaactgaaaacacaagtagagaactttagatatacttgtcagttgctgtaagacaaatcaatcttacctatctaacgttatttgctgcgttttgatagaatttttccaaaaaaaaaaaaa

SEQ ID NO: 225787 - DNA, 1712 bp, Cannabis indica
agggctagagatcttgaacagaaggagtcattatatttcgctgcaatcaatgtaagattttcttaaacccttatgtgtttatttcattgttacatttaggatgtgaatcaacatagttgttagtaaatcttgatactggtaaaatattcccaacacacatatatattaggaaaagaatattaaaaaaataaaatggatatagtgacgtgcaacatgggtagctacaacttttgcagtctttaaggcatgacgtgctttgagtaactcttaaggggtttagtgacccacactgaaaggtcactaaatactgcattttcagtcacccacattagtgacgagcagtgataattcaccagaaggttttaaagtctctcattataggtcactgaagcctctttttgtagtagtgtaggagtaattacatgttttatttgttataatatgtaattctattttgaaactaaaatcgatcctataatatatcccaacataacttacatgatcaaaaggaagattcttattccaaatagcactaactttatttttttgagtatgcttagctagataataagcaacaaaattagcttctctaaaaatataaatttaaaatcaataaagcaatgtcttggcatgatatttttaatgctccaaagaataccatctacgttgtcaccaaagtatatgcttgaagaagagagaagagaagtgattttagattgaagtctacgggcaactaaatcccatttcttatcgccaataactcgggtctgaggctgttaaagaatctgttgaagacctctcgagcaaagactattttcatctctaacaactgtaatactgatgtacatctcttactatttactatttggattctacgctttgatttgtttataaaatgataattttatataatttatagtgttgaaaatatgaaataaattattttgaaagtgttagatcattttttagcaatttagttatcaaaatattatttaatttattctgcaattaaaataattttcttgtgttaatttcgtggctttgattgctcttttcctttaaaggaaatatttatttacagctgttatttttgtttaggaagcttgtcttacaagagaaggaattctctttatggaaagttgcctatttttggaaaacttaactttcactttctgctaaatgttaatttcggttttgctatgtggataacaaatcaaataatttttatttagcagatattgaagaccaaatcgtgatcttggtccttttcaaaaagtttactaatctattgtagtagaattcgaatttaatgttgcaaattagggatttttttaggtaggaaagtcttgtacagctttgaaaacgtttttgtggttgtctctagggtttctatgttctataaataggacctatagagaagcaaaatgttacttatctcttcaagactcatattttcatatcttagttttgtgagaagagtgtttcttttgtaaatacatagagtattcaactaggttttggttttcttgtaatgatgtcttgttgttcatagaataggttgaagagaagctttgaacaagttgttggaattattttagcaggatctagatttactaacaagtatgtttcattaacatcctaatatgaatttctaaaacaatgaaataaacacataaggatttaagaaatccttacattgattgcagcggaat

SEQ ID NO: 225788 - DNA, 2846 bp, Cannabis indica
atatttacatttaagcatactaaagcaaatttccctaatctttgtattattttttacacatttttttttatctcgtgtggtttttttttagtttttcttcttgttaaataatactataaaaaagtataagaggttgatgtttagtttggtagaatgtaatggtaatagtaatgtaatagaataagaatggtattgtgcaaaacgaaacaatcaatgacttacgatacaatgtacggtgccaacaaacatgcaacacaatcaagaaacatatactaagagatcacaagaattcaagatgatgaattttgcagcaaaaatggaggagaacaacaccaggtttaatgagttcaagccatgtacaatgctctacatctcggttggagcagtagcaaccatatctgtattgatatttgtgtttccaaggctacaagaatctttacaaacttctcagagattacgataagaagtttctctctctagtttagactctaccttacacaatcacgaatttcactcaagcaaatctagtctgattcacacacaatttacaaatatttacagctatatatagatttgcattgttgccatatgtatctcttaaatcattgtggcacatttacaccgccataaatgatccagctcatcaccaacaataataatccacgtcatcttgaaatacgcgctttcagtatagacaatctggaagcattgtaatacacaagccctctgaatacgtacatgacttcattcccagatgaaccttcaaccctgaaaaatctatctaagagtacaccttcgaattagtgacaagctatccagaagagacattccatacacaacacaagcttatctggaagtaccttctaaattctacaagaccttttacacagggcttttcagatctacactaagctttcggtatctgctcactggattcacagcttccaatcctagacgacaaaatttgtaaccataatcaataaatctccactttagtttcaagttgaagttgcttgataaatcattgtctaggtgctgtcccctcagcccctccgggctcagttgacttcaattagcttcaggcaatgcttaaacttactacttggcactaccatagttatcatatcagaaggattgtcttgagaggaactttggcaatcttcacaacttctttctccacaacctctcgtacaaaatgaagcttgatatcaatatgcttagtgttgagattttatgccctaaataaactcacttaaatataatcagatttactaagtaataaaagatcagaaatcatttttattttgcatggttcacctaatttctttcatgattatacgtttaatgtacaaattctattaactccataacatatagttattcatgattatagtgttgtcaacacagtagaatataattatgattatatgtttcaaagtttttgtgccgtgatttgttagtacactgaatttacattgacatgataatcagcgataaagcttacgtacaccttggataagtattatgtcctttctatggcattggtaaagtatgctagtatcagatgtatggagtatatatcgaactggaccgatattgaaattggtaaagatatcataaacttatcgttgtatctttctaagttaatatcacttagttaatcttagatcaatagatattaatcctgatatggttaggttcgatctcaactatgtcatttatatgttcttggagttgttatgtaaagaccgcttagctttaattttgaaattagtagataattaaggctttattatgaaaattatttattaatattgaattaattatttatgatgatttatttgaattcagaaggcatttttatgtcacatatagaaatttcataattttgcatattttgtgcccggcaatatttgaacgcggtgtatggctatcagaatcacatcttagtatttttagtatagcgggacaatattttagacattgggaataccgggattagtcagggttttagaatttcccaaaataccccttagtgcaattttatgacttttagtgtgggaggggcaaaatggtcatttggccccattggtcttttgtcttttgtcttttgtcttttgtgagtgtgttttatgttattaaatctgatttttatttggtaaattagctgatattatattttaaataaaataaacttaattactcatttatttcaaaataagaaaatcaaagggaaaaagctatttcactctccaactctctctctctgttttgtttcacccaagagcagctagggttactttgctcttcaaatattcaagaaattcagcagggttttaagtgattttaatcaaggtaaaggttcttagctcttctcttcatgttttcttgaattgtaagaaaagaaattttgcatgaaatgatgttttggctgctatgcttgctgttagggtttgatatagttttcagaagttgttatatgttagattatgttgtttgaaacatgaattggtagttgtttgaaggtttagccaagttttgagttttagaactcaaacttggagctttaatggtgaaaattgattctgagctttgattgttgttctataacttggaatatgtttattggggtataatatgcaggtctggaatgtttgattgagtttggaaacagtttgggttggggtttgaattttgttggttttttggataaaacaggttacccagattttgtagcagggaaaacccgattttaagcttgtagtttcgtgtcagtttcaggttcctaattggttgagtccctgctagtttagagtattaccatgttaagttgcagtagatagggt

SEQ ID NO: 225789 - DNA, 2680 bp, Cannabis indica
attaattgttgatgttaaaaagtctcaattgcaaatgagtaaaatataataccatatataagatttataagctatttttctggttgccaattgattttgagaaagaattccatacaccttatcatacactcactttagtcaaaaaaagttacttgtgattcaataataatgagccaaagtgtcgcttgtattcgagatcgtccaagatcaataagcaaaaaaatacccacatcttagggaaaagtttgaatattgagaaacattctagcatttctcaatattctaaaatgtttttttttctttttggaattcgaactaacttctacccattattttggagaaaatacaaataaattattcaagcctaaaattgaagtaagggaaaatggacagatttgaccaaatcaaacttaaaaactatatcaacacagttcatttccatattaaaatgacaacatttatgtttttgtttttgaaaagtattgaaataacataatctgctatattaatgaagacaattttatttcatttttaaaggaaaaattctcattagactttcattcactgaatttttttttaagttgaattcaagtccaaagtgcagattcgaaacgtttcacgacatttctacctacatttcaagcaaaagaatacgaaaagtaaaacaaatccagattaatttgcctgataaaaacgaatttaaaatcaaaatcagagtccaaaactacttacatccatctcagagtgttcatctgcacagttttcctctgaataattttcctctgtccaactaagcaactgaaacataattaacatggttagcaaattcatatggaaaacatataaacaggagctaaatttttataatttgaaggaaactacataattgaattggctcacattcacaattgtttcaatgcaatccttcatttcttgaaaattcttatcatactcatcggtagttgaggcacgaataaagggtatccagctcaaattaaaacctccatcttcgtcaaactgtagtaaaagattaaacataagttaatcacaatgtcaaaatttgattcaacttgtttgttaactttgcacattaaacactagaaaccaatgtatacaaacatgttcatatagaaaacttatgattcctaaatccatcaacatgatcaacatatgtttatcaaaggtataaaaacaagacatcattggtaccttaatggtgagttcacaatcaattgccttcaaagagaaggtttctacatgagggaaaagctctacaaacgcattgaagaaattggcctgttgtgaaattgggaacatcctattcgtgatttttaaatgcgtcagctgataaaacggatcgggaagcatatcatagtgtctcaattcttctggaaatccctgaaacacaaaaaaaaatagatacatgaagttgcattggtatctaacaataatacaaaagctatcaaaatcaatattacctctaaatgaaaagacagattcaatgctccacagtcgctgaaaatttcgagaaaatttctcagcctaacaaaccaaaaccactctgtgccatcaagagaacctgtgtacaactcgagcttgacattgagtaacccagaacagtatctaaatttagagattgtaaaaatcccaccagaatatttgaagtaccgaagattgggcgtgttgaattcaaccttgcgcattctatagcatccggtcaccaccaaactcttaagattggaatgagagattgaacactctcaacaccctcatttaaatgacaatttattagtctcaaattctcaagaaagggaatttgaggaaggtactcatctaatgcattggctgtattaatttcggtacgatcaatcagcaaagtcttcaacatgttacaattcgtaaatttaagaagtccatgggcattaaaggccctggtgtaagtgaaagattgaagattcacacaatcaataaagacattttgggctatattagcacaaagggatacctccatcgatttgagtttgggagacgaaacacgtagctctgtgaaaacaaagcaaaacccaaatacaagttcttctagcaatgggagacaagacatcagatacctaaggctactgttatcaattcctataacactcaacacaagcttctttacagaagagaatactggcaatgtaatcgcaagcgataattgaaaggatttcatagacaaaacatcgagcgatttgcaagcagaaattaacgaccacaaagaatcagtagacaaaatcctatggctatgataatcttcagagcagttatggagttctatgattttgacattacgattctttgcaatggatactaattctacaaatcgaggaaagaatataccgtcggcgccgacgtcggagtagacagaaagcttttccatattgactctgtcatcgcagtggtcggaccagattgccaaacagcgttcggcatagtcgtagaaatctgactggttaaaaaggtagggatttctcttcaaattcaaaaaccggagatgtaatccaagccgatcgccatagcttggaggtcagagaagctcgaattgcgtcttttggagaaagaagtttcaatatgctttgaatgactggctccggaaggtacgagttcggcgtgggatgatccatgatggaacgatcaccatacg

SEQ ID NO: 225790 - DNA, 1685 bp, Cannabis indica
ttttttttggaactaattatttattttagtttaatttctgtttctctttctataagctaaacctattcgaatacagattactacaaaaaaaagaaaaaaagctattcgaattctaccttaaaaaaagactattcgaattcgatagcttatagaacttttgaataaaaacaaaagctaatatagaactaaagtgccacgtcatcgaaagtctaatatattatgaaaaaggaaagaagagaagacccacaaaactgaatagttcactagtcactacccgccttctttaccattaccagagcggtctctttttctctctctcctgcactttctcagtctttcaacttcttggtcggtctctctctctctctttcttcttcgtactgtttctagggttttacgccaatctatgccatgagtatgaacaacaccacaggttcgtttaggccgtcaaggccaccggagaatcaccgtagaattcgtcctccctcgaccttttcttcgttaccgaacagaacccatcatttaccggtgaatcaacgccattatctacctgtgaggctgagacccactgttacccctcctccaccagtggttcgttataattttgttatcgacatccttcgtgatcaaaccaccaacgtttcggttaccgaagtccaggccctggttgatcagtgtctgccaaagccggataagattaatgtaagccagtctggaatgttcttggcatctctgtcctttcataaatgggttgatgcgctcgaagttgtggtctttttgtggaaatcgcgtcttcgcggggatcaccggctgacgcacaaactcaatactggtcgaatagcgccgaatgatcgacaggaacttgaaaaccggctccgggccgtgttcgcagagagcattggcgagttaattgatggccaaaaggtgaaacattggagtgaaaagcatgatcatctgtcgaaagagcttcagaaggtgacagggttgcttcgaaagccgaaggctgtaattgtacataaggagctagttgaaaagaagaaaaggcttgcgcttgagatggaactggtggataagagattgaaacaattcaagtctgctatgagaagtctgctttcttattttgaagggaagggtttgaaggagtatggcgaggatggcatacaagcgcttaggcttgatggggggtttaattggagtcatattcatagcttgatgtcacgagagtgcaggcgcctcgaagatggtttgcccatttacgcctataggcaggaaatactccaccaaattcatacccaacaggtaactatcaattttcaattattttgaatatggtattgctggctttacatgaatttgttgaatattattttatttatttattttttcctaaagatattggttgttactcaattgcactgcgttcttgaccttggttctcttcgtttgtggcctttgtttttcaacttcgttatgaattattttttgggttgaagaatatgttatggttatatccttttcactaccctttatgtttttatcatggtagatttagcctaagcatgcagtttttttctctgttcaactttttttttatccgtgtcccattttgtctgataattatttttacaggcaatggtcttgattggggaaactggttctggaaaaagtacacagctggtgcaatt

SEQ ID NO: 225791 - DNA, 1178 bp, Cannabis indica
aataaaaaactaaaatattaaataaaactaagactacgtggcttggcacgtaacaattacctagtatacatatatttattgatgaaacactattttcacatgcctcctttttatatttgtttcaaatcataactcgtaaatattttactcattaattaattaggtgtttcacatggccaaagttggggaggagcttctaatgagaaatataatataaaatttgttaaagataactaaattttacttaaaattagtattgtgtaaattagtatggattaaatttttgatacaacacgaaattaacatgagcttaaaaaatttgagcacgatctgatatgaaaaaagtatgagtctaattaggcacaacacaacataacaagtgaaagatacgacacaataaatttttcgacaatatttaatcataatatttgtaataataaatatttatttattgatgtgatttaaaatgataataaaactcaaatacaataccaagtatattataattctataattcatattattagaaaatttaaatctaaaagtatatattaatttattttaagagttgtgaattaaaaatataagtatttacttgtgacagttagtagtcctgtgattagtaaataaaaatatcatataggctattaccttgagaagatcaagtgtgttgattctgagactgtctatatatatgagattacatagttaaaaaagacttaaatagattgatgagtactaactgtattagcaaggtgctatctcttttttttttttttttttttgtttagctcatcactttaaaacttcaaaattaattagcgtgtttaatctcaaataattttgagatgattaatctcctgagaagtttttacaggaaatatgcaagtagaggcaaaacatgttgaaaacacttgttagttagccggttttactcgtgtataaaaactataactttgtggggtagcccagtgaaagtcaagttcaaattaaataataaatataataacttactcaacttggttttaaaattaaccctaaagttggaaaataaaatcaagttcaaattaacttttatttgtttaaattaaaggagtaataataataataataataaaggcatagtcaacagtcaacacattcacaaagtcttacaaacgcaaaaatttacgtgcata

SEQ ID NO: 225792 - DNA, 1256 bp, Cannabis indica
gagagctgcctagactccgtcgagagacagtcccacccaaatcacaaactctctcaaggtaaaaccctttcccttttcttttttctttatgggtttctttcttatcatttttcaattccaatttgtgtttgatttcattgttttattttgggtatttcataacaaaggtagaagtttccagtatacaaatgctttgtctaacattatatggaaactcattttgattatggtaattgggtattcattgctcttacttatctatcaaaatatggcaaactcgtttggattgttttcttgtgtttatgcaaatgatttcacccatctgaaaagttgtttctagcttgtatttgtgtattactggtcgtaagtatattagtttaaattgcacttaatttgagatttgatgaagaagaaattacagctctcaataagccatggtttctaaagataatgcttttatcagagtgattgtgtattgctgttctgtgttttttcttgtggcttgttctaatctctatacatgtagtgagagattcacttatcctgctttccataactgtagaacattatgtctttgaatgaaaaataaaagagtgtttggcattactttttaaaatgaaaggtagagaaaatagcagatgaaaatatatgaattaaatggggatttcataattagatatgttaaggattgacatacgtttattatgttttagcttatccatttcaatttgttgaacaggaggtaagcaaagagggaaatggagaagtattttggcaatgcgtatagaggtgaccccggtgtcccgcatgctgatccagaccgcttctggaacatatggattggatcagctaccttttcagcactcacctggttcaatccttacatgtggcaactctctaaccagttcaagtaagcattcccagtcttccattccaatttatctaagatgtatattgtaggtgaatttttgtgtaactgaatggcggtgatcatgtacttgaacgagccaattaaattttgttattggttcaatctttcagtttggttttatgataaactgtgctgctgctatatggtatagccggatgaaaagatttctgtatctgaacgacattcattgttatatttttgttccttcactagcgctatatgattaaccatgctgaaaactacagcaattgttatgtagctactcaagagagactcgaatttcagactttgtgagagcaaagtgttaggacctagagagcattac

SEQ ID NO: 225793 - DNA, 2040 bp, Cannabis indica
aattggtgttggtagtctattaatgaggaaaactacaatgttgaaagcatgccactagtaagactggattgagcaagaatagtaagtcccatttcagttatgtgtttgtgtttgcgctcagccctcccattttgctcactggttttggaacatgggtgctgaaagtggattccctgatcacttaggaacctagaaaatggtctttattcccctccccaattagcttgcactttcttgattgatagattgaattgtttttcgaccatggctttaacctttagaaacatgtcaagtgcttgagatttttgagtgagagggtatatccaggtgtatctgctgtaatcatcaaggaaatgaatataataaaggtatccatccttggattttatgtgagatggtccccatagatctatatgtacgagttcaaagggctggttggcttttgtatctgtgctagggaaaggctgtttatgacttttaccaagttgaaacgcatgacaaaactccagttggtgaatggtaccagtgtggggaactttttgtagtattttggttaagacagcaggggagggatgccctaatttgttgtgccatacattaacatgatttttggtgatagtttgtaaagtagtggggttatagagagtcatgggaacaatattgtctttagtgatatgagtagaattacaagtattgtcatttattacattgtgtaattgaaaatgactagtataagtcatagctgtaggactattaccactaggcacacactattgcaatcctgccatctttgatgctttaaagcattgttctagcacatataagccatctttaagtgtccccttgagcatcaccttccctatttgcttgtccttgacaaagcaacatgatttgttaaattcaagaaacacacaattgtcattagttagtcgagatacactaaccaaattttttgttattgcagggacatgaagtacagagttaagtttaagactagtaaagctatatgcaggtaatgaagctaatccattattagatttgagtaacttcttactgtctccaacaacgagaccttcagagccaggacatgtcactgtagattcaagattgtgaagaccatttttcacgtgattcgtggcacccgtatccacgactagcctgaatcatcttcgaagttaagaatgaaggatgtggcaaatgcttgaggatcatagtcaaactcatgtttcgtgatgtaggcacgagtggtattgttgtttgacgatgtggaagggccattagtgcttggtttgggtgtaacccaagttttgtcgaatctgttgtgacaaactggtgtggtgtgtccatatcaaaggcagagttgggagagaggcctattttgttgattctgggtgtgaaaaccaggtttgccaccattcttagtcgactgaggtggtcgataaagaggattgcgtgagcctgtgaacgcaacattagcctgaagtttcattgataagtcggtgacagagctgtgatgttcaagacggctttcatggcagagcaaaagagcttggacctcttcaaaggtgagaacatcacttcttgcagtgatccatgagacaactggatcatattccgatccaaggccatttagcaattgtaagatgagatcttgatcaagaatcggagaacctgcgactacaagggagtcagcaatggcctgagtcttgtccacataatcagaaatggattgacctcccttgcgaattgtggaaaactaattcttgagttgaagcaaccgtgctttggattggctcaaaaatttatgttcaagtgcatgccagactgcatgggaggaggagaagctagcaatagatgtaaggacaccttctgtcattgacgatcgcagccatgacagaagcagctggtctttgcatttccactgattgtattcagggttcggttctcctgtgatgagaaattgcaatgggggatttccagcaagtaagatcttatctagttcatggccgatcatagtggggatcacctgagatttccaag

SEQ ID NO: 225794 - DNA, 3271 bp, Cannabis indica
aggcctggagcgtacgatcgtcgggacagcaaggctgaattttgtaactggtcgttagacgacctttatatttttgtaatagttaaacagttaaaacttttgtaaatgattttataaatcgggatcccgagccttttgtaatattattttacaagtttaatcaaaaagcaaaattttaattaatcacgtttttccataaacctcgttgattagcaacgagctgcacagtacgtttaaaaatcacgtaatacgcctaaggtagttagggtgttacatgatctctttttgtgcattattccattgtttggcaacaccctcgcattgttcaatggatttgtgaaggtcggcttccaattgcttaaccttctagagaccccgatgctaggccacatgagaaaaaaaggaggcctacaaagaaaaatatacatgattttttatgaaattttgaaagaagataaagaataaagagaagaagaagggaactaaccgataggttaaaatggagacttctctcgagcatttcttcagagctaccattattaaccatatcccagtcgccagactggaaagatttgaaatggcgccatcaggaagtggcaaattgcaagtagtactctgagccaatattccccacctcgatgggcaaggggcaagaaggttcaagataaaccatttcatgcctcttacccgaagacgtggtagcctggtaagttaagccttgggctggttcgtcaacgtgtacaatggctggagtatgaacctgaacttggtcttctgaagactcgaggtttatgggttgcgaggaacgctttttatgggcagttgttttcctaaatctcttaggaggttctgcatcaaccctgaacgaggtttttgaagtagtgatcctctttttcccctttttcttaaagtgttaagaagattttctagatccatatctgcgagacaaaaagataattcagcacttattcaaaaataaataaaaataaaatggggaataaattcccacttaaaggagattaccataatcatcagatgatgaagaaggaggactatagtaattactaaattccctagatcctgtgatcatgaatatgtcgtaagggttaattggatctaaatcccaatccgaatctgggtggctcaccctatccaagttggtcccatactgctcggcaatcccatagtacgagctagtacaactaagttggacaaaaaaccttgggtgccaactatcaaacctatgggttctacggtctatgaggtaagggttccaattataaaaattatattgactatcctggaatgttactaacgaagtatgttctgcgctaagcatagtaggcaaccatccacattgattacctcaggatgcttcttcttcaactttccaaggggttactctttagagatagtgtacgctagccacataatcctagctatctttgtcagctggaactgggaccttctcccttgaagagtactttggaaacttgtaatcataagtgtactaatccgaggcaagaaggccaacagtctttagattggcttcattcaaaagaaaatctaccaagcgcaaaccaaaaggaagacccaacaagattttacgtcactcagccatctcaagagtggggattggccttttggaaactactctcaacacaaaaaaaaacataataaataagcaacctcaaagctataaatagagatacaattcaaaaccaattttttcaaacaagttacttacgtatgatgcgaaatgcaatcgtgttaactggagaaaggccagatatccagaagaaatcctccttaaacatggtcttatttggtaatctcacaatgatcctatggtcatttgtgtgggtaacgaggtaatcgaagtcccctgcacatcgcttcctcgcggggactgctttaacggagtaaaataaactatttcaaaaggagtgggacactcccatcctaaaatgtaatacaaaaccttcagacttgcaagaactatataagaaattggaaccagctgaaaaggagcaattccaagataattgtagaattctttgaagtactctctcagggggagaattattctagccctgatgtactcaaggctccaagcgcctatcctagacaagccactagtactggcttcaccacattcctcactaataaccctttttggtggaaagcaactgaattcaccaggagcaatagatctgatgcggcatcctcacatttgattgatgccacaagtgtttagaatgccaccaacataatctccaatggctcttactttagactcaatgtgtttagcctcaaaggtgacattagggtcttgtggagtctttgatttatgaggcttggtagacatgatttcaaattcaaggtcacctgatgaaaaagcaaatgtgactgggtaaaaataacggtttagccaaaggaatagaagataaagacaaaggttcaggccaggctgcatctcgcaagtaacgacgtttaccctcagttatctcttgtagaaaacacctatagcgacgagcaacttcatcctgattggttttattaaatggtctctaattttcgcatcatttatctcaagtttagattgaggtttctggattttgggtttgaatgggagggctaattccttaggacattctatttttaagaattttggagaataaatttcaaaaccagattgggatatttttacaaaaacaacaatcctaattcctggaagaaatttagtaaaactagaaacttatgaacacgataaacctaaattttctctctgttaaaaccttagaattacccaataaattaaatcaaaattacttaaatcaaatgaagtgaacaatgatgcaataaaatacagaatatgaatactaactcaggataaagaaacatcagaaagaaaaagatgaaccacttactgttcagagataggttttcgtacaaggagtaactctataactgaagttgagatgaatgatttagtgcacccagagaatttctatgattggagattaaatccgaagacactcgcaggaaataggtcaaggataaagagggcatgcaaatttttgagaaattagggatgattttttgcagaagtgcttgaaaattttggaagggccaagatgcaaaatggccctaaatttaacaattaagttaataaatgttcctttttataaaaaattaataaaatgtccattctgttaaaaatttgatgacaaaattataattataactttgaataattaagtgtttggta

SEQ ID NO: 225795 - DNA, 3683 bp, Cannabis indica
aaaaaaggaaaaataaaatgaacctctcattatcttctcagatgaagatacaaaacatgtaaaatacccgcatgttgacctcctcatcgtaacagtctagctcaccaacaaaagggtgaagagattattggtagacaatgggagttcagtcaacatcctctacaaggacacactaaaaaagatgggattagaggatgcaatgttaaaacctttgtatggtgagcttgtgtgggtttacaaatgatagtgtcgccagccaaggtatcatcaaactttcattaactgtaggagagccaccgttatcaatgacaccgatgcaagaatttttagttgttgatcttccatcagcatacaatgtattgatgggttgcccgacactaattggattggaagcagtaagctagatcaagcacttgtccctaaagtttccaacacaggcaggagtagaagtagtctaaggcgaccaattattggctcgagagtgctatcgaatagaacttcagaataggagagccagtcatcaattgatggtaattctaacagaagaaggtgagaggacagaagaagatctggatcatagaatctaagacaagaataaccagctcaaatctattgagaactggaagaagttgttttggattcaattaataatcccacaaaatgtgtatatattgggaaaaatttgaaagaaaaactaaaatagcaattaatagattttttaaggcaaactaggatcagtttgcctggacccactcaattaatagatatttaaaatagttagtaaggtgaactattcaaaatattttaaatttactttaaaaaaaatagtgtatagcagattatcaactgcttctgtataaccaagcagattagaactgctctcataaaatatggcagactgaaagctgctcgcaaaagacatggtagattattaactacttgtctatctcaaagaaaatggctttggaaatgtattcaactcaaagtatcttaagctaaatcgagatataagtgttataattgcgaaattaaatgcaataaataaacatgtttatatcaaaagcaagatgcgaggcattaaaagtaaaaatatataaataagcaaagttggtcatccaacaatgtaaaagtttttacaaaatgtcacaagaggcaaccattgtctcagcctaatggccatttttttaaataaaaaaatatataataatgataaccaagtctacatggttagagacttggatagttcttcttcttcttcttcttccttagtatccacaacttcatctttctttgtctgcttgccataagtcagcatctccgcaacaccactctccaagaagcttaaatccatattgggattggctagccaagctctatagatcaaacgttttgcaactttattgcacctatccttggcattggcctcagtaccttcaagttttttattggcttcgttaagctcctctaaaaccttcttgtgggcctcttggtgatttttggcttctttttgagaattttcaagctcagtcttgagatctctcttctgctccttggcttctttcgtcaaatagattttctccttttggccatcagtccattgctttgcaataacctcacgttgttcaatggatttgcgaagctcggattccaactatttgattttttaaaggcctatttggtgtgccacgtgagacaatagagatgcctagtcagaagaaggataaggaagaacatataatgaaataggaaatgaagaaaggaactaaccgagagactgagattcaagctcctctcaaacagctcctcaaaattcccattgttgataaaattgtaatcacccgattggaaggatttgtaatgatgccaacaggaggtggcatactgcgagcaagcctgcgagctagtgatccttgcatctcgtggcaagggccaggagggctccaaaaagaccatcttgggttccaaacccgagaatttgacctggtgaactgatccttagaccttctcatcagtgccctcagtagttgggattggggagtgaacttgatcattggctggctcgataattaattggttcgaggcaagctttttgttagccgtgattttccttgatctcttcaagggttctgaattttgtcccaacaaagtgtctgatgcaacaatccttttctttcccttttttcccgaggtattaacaagactcttgaagtccatatctgcgaggccaaaagcagttagcactgacaacaaagtaaataagagaaatgtggagaggtaatctcccacttaagaaaattaccataatcaccatctaatgacgaagaggaatgattgtaattactaaactccgtagagccattgtgataatatatatcataaggatttattggaggtctatcccagtttgagtctggatggctcgctctatccaaattagtaccatactgtttagaaattccgaagtaggagctattacaacttagttgaacatgaaatttaagatacaaactgtcaaacctatgagctaggcgatctacgcaattccatgtataaaagttatactggctatccttgaacttaactaacgaagtacgatcaactctaagcacattaggggaccatccacaattattacctcgggatgcttcttcttcagcttcctgaggggatatttttttcaagtagtggatgcgagccacataatccctgtcttcctcgtcagccgggactagaacctgttcccacttggagtattttggattcttaatgtcaaaagtagattgattgctgccaaggagattacaggtctttaggtttgccttgttcagttaaaatcaatttattgcagtccaaacaaaagacccaagagagttctgtgtctcgcttccatttcaggagttgggataggtctcttcgaaatcattgttaatgcaataaaaaaagtaagcaaatatctacagttactaaattaaataatcgaaaccatgttttgagacagaaatacttacgtatgatgcaacatgtggttgtatttattggggcaagaccggacgtctagaagaaatcatctttgaactcagtcttgttggggagcctcacaatgatcttaggatccttcgtgtaggtcccgaggtaataaaaaccaccttctcctcacttccttgtagggtaggcctttactgagagtataaaattttgagtggagttggacactctcaccgtaaaatgtgatataagaccttcaaacacgccagaattctataggaggttggaattaattgaaaaggggaaattttaaggtaattacagaattccttattgtaatcttttaaaggaagtactacttcagcctttatattctctaggctccaagcgcctatactagatggttcgctggtgttacacccttcttctcgtattatcctttgagggggataataactaaattcccctttagcgacagacctaactcgacatcctcgtctgtatttgatgccacaagattttagtacctcgcccacatatgctcctatgtcttgaatttttaagctaatatatttataattttgaaatctaagtcacctggtgaaaaagcaacataactcgaggtaaaaacaaaggtctcgctaaaggaatagaagataaaagtcagggttcatgccaagctatatctcacagaaaac

SEQ ID NO: 225796 - DNA, 5084 bp, Cannabis indica
aaatgggatcccaaagtattttttatgaaatattatataagtttaattaaaaagcaaaaattttaattaatcatgatttccataaacctcgttgattagcaacgagctgcacagtacgtttaaaaatcatgtaatacgcctatgctagttagggtgttacagttatgcttatgcttttcttactatttgtcgactcacatatattgtttgcatgtgtatgtaagggcaaagctaaagctaaatagtagcgagctcaaggtaatgaagattgtacatattcggagagttagacttggagtgttcaatctttaagacagcaggctatatttttgtagtcattaggcgacaacttttgtaagtaagtgttttgtaatgcagttgtcacctataaagatgggatcccagattatgtaaactttatctatttaattaaacatgatttttagtaaaaccattgattgtcaatggattacatagtaaatatctaaatcacaataacatgcctaatctactatggtgttacaattttgtatcacagccgtcaggttgtctttcattgatcttcacaatatgtataattgtcatcagagataagctcaactcatggtttagtaagccctttacgctttagtagtttattttgttagtaagtaatgagaaaagcctattatagagcatgttagtagtcagatagcataataggcacatgttttattttcttaagtaagcgataattaaatgtaaccttgatcgttatcttactaagatagctcattgtttcgcaggtgattctaatagaatagattcgaggcagaacacgagaagccagggtaatttggtcagatgcagtgatggtcagggggtttagtttccccctaatatttgcgatcgacgtagaggcccaagaagcagggcacgcggtcagggtgatgttaacccacaacaagttacatcagtttgctaaaattcaagcgaaaattaatgagcaagatgatgagatttagtgtctgagatagtagagtgctcttacaaagcctactcttgacgtgcaaatggctcccgcgcctattatgcaagtggggccagttttgttgccaaccgagtggaaccactttatgaaaggctccgtaagtaagaacctcaagtttttctaggaggtccagacgttttgaaagtcgagcaatggctaaccattattaataggattttgaattttattggagtcactggcaacgataaagtggcttgtgcaatgttcaaattctaagaagacgcttaagtctgctaggatatggtatccctcaccggggcgtcaccagaattacctgggaagaatttcaagagttgtttaatgtaatgtactacaattaggctctccgtagtgcaaaaagaaaggagtttccacaatttactcaaaaggagaatatgtcagttacaaagtataatacaatttgacagactagctacgttggcctcatgaatagtgaaaattaagtttagtaagaaagagaagtatctggatgggttaaatcccaagattagacacgacgtgatgattacaatggatgatgccaccacttatgctgatatggtggggaaagcactacaagctaaggacaccattaagtgtattcaggaagcccaagggattcatattgctggtggagccattgctcttcctacctttggttatggtaggggtggtagtgactcaaccacaaatcagaagagaaaagtttcatctgcttctggtggctcaactcaaaaaaaaaaaggttatgagggaaccaaggtcgtggtaaccgtcatggtgggtctaagaaccgatacacttacccagaattccctaactataagaagcatcatttgaatgagtgtagaggtcaaggatgtttctagtgtggtgtaactagacactatgaaggagactggccacaattaaagaaggaagaacataagtctgaggtgaaacccgcttcagcaagggtgtttcctcttacacaagctgatgcagaagctatcccttaagttgttataggtcagctctcattcaacaactcttattactctattttgtttgactctgggacaactcattattatgtggcagccaaagtaattgataaattgggtaggccatgtgatttacgataaagggtttggaaccctactgcttggcgcagaattagttatctccaagaggtgggttaggtctataccaattcgaatttaagatagtgagttaagcactaatcttgttgaattgggtttagcaaattttgatattatttttgtaagggagttcttgtccaaatatgctactagtattgattgcaagcgaaagatggtaatcctccaaccagcaggtgaagaactatttgtgtttgtgggattagttcaaggttctcatattctagtaatttctatatagaaagcaagggaactgttgcaagaagggtgcttagggtttctggcagtagtattagatgccactaggcctaaattggctcagcctaaggatatcaaagttgttcaagaattcttggacgtgtttcctgaagaattttcgggcttaccacaacaacagaaaatagactttgtaattgattttgcacatggagtggagcatgtttctatagcaccttatagaatggctcttgcaaaacttaaagaaataaagattcaactttaagggacgcctgattcagggttttctcgacccagtgtgtcaccccaggaagttccagtggtgtttgtcaagaagaaagaaggatcacttcatatgtgtattgactattgagaattatcagttgacaatcaagaataagtaccctttatctaggatcaacgatttgtttgatcaacttcacgaaaagagagtcttttctaagattgatctctgataaggctatcattagttgacaatctaagaggagaacattccaaagattgccttttgtactaggtatggccattatgaattcttggttatgtcttttggactgaccaatgctttggtagctttcatggacatgatgaataaggtattcaaggatttgatatatgtgttgtagtatttattgatgacatccttgtgtaatctcagtcaaaaacagagcatgagtagtatttcatagatggttttacaacgactacaagaacacaagctctatgctaagtttaagaaatgtgaattcttgttatcccaagtgtcattcttagggcatattgtcagtaaggatgggatcatggttgatccaggaaagattgaatctgttagggatttgccaagaccaaagaaagttattaaagtcagaagttttctgggtttagctaattatgatcaacattttgttgagggatttacaatgatttccatgcctttaacagaattaactaagaagaatcaacaatttttatggacaaagatgtgtgaagcaagtttccaataatataaccagcgattgattgcagctctagtactggcatgaccatgagagcaggaaaagtttgtagtttactatgatgcatccagaaaaggtttggggtgtgttctaatgcaagcttacagggtttttgcttatgcctcttgtcaactgaacgagtatgagcagcaatactagactcatgacctagagcttgcataagtcgttttttcattaaaaatatggcgaaactatctatacagagagaagtgtgagaattatgccaatcacaagaaccccatatgtttctttactcataaagatttgaatataaggcgaaggcggtggttagagttcgttaaagattattattgtgaaatccttaatcatcctgggaaggctaacgtagtggcagatgccctaagtaggaagggtctcgggtaggtatccaacatggttatgatttcacctcagtttgtagatgacatggtcaagttagatatttagttagggataggcaaactcagtaacttgacactgtaattagatttcctagacagagttagaactgttcagttagttgatccagagttagttaaagtttgagaacaagctctaactggtcaagctaaggatttcatagtctcaagtaatagaatgctactttataaaacttgagtttgggatttgaatagtgtggaacataaaaaagaaattctatgaagcacataccgatccctattcattacaccctggcactgactgccaaacaaaatgtatctagacttaaaacccttttattggtagcgtagtatcaaaaaggatgtggtaaaatacgtatctcgatgcttaacttattagtagattaaggattaacaccaaagagatgcagggttgttgtagcttttgactcttctaaagtggaaattggaggatgcactatggattttgtgttgtagaattacctagaaccacgggtatgtttgattccatatggctagttgtggatcgttttaccaagtcagcagactttttactggtgaaaataacatacacagtggatcagtatgcaaaattatatgtaacagaaatagtaaggttgcatggggctccaaagtctattgtatcaaatagggatctgaagtttacttccaagttttgggtaagtctctggcgagccatgggtacaaagctgaagttcagtaaagctttccatccccaaatagattgtcattctaagagaacaattcatattttagaaaatttgtgacgagcttgtgtgatggattttgaaggctcatggagtaattattttccattgattgaaatttcatctaacaatagctatcaaagtactatacggatggttcccgatgagatgttgtatggtaggaagtgtagatctctaattcactgggataaaaatggaaaaaggaagtacttggggtccagaatcagttcagcgcaccaatgaggcatttgaaaagatcaaggccaggatgctcgcctctcggagtaggtaaaagagaaatgcagacctaaaatgcaagaatatagagttttagataggagatcatgttctcctacgagtgtctccaatgaaggggattaaacattttggtaaaaagggctagttatgccctagatttacaggacctt

SEQ ID NO: 225797 - DNA, 3215 bp, Cannabis indica
gcaggtactttgctaccattgttcattctcactgtaatttatagtattctatactgaaaattagaatttttgattcacaggcttagtgcatgcaaagccatttatgttgtctctcaaaggagagtgaaatgcttaaattcttatttttcatcatgaccaattcagttgtagagattttatacacataagtttattcatgccattttatctgctgcttaaaattcagctgtataaatatactagtatttgtgacactgaatgtatattttcttggccaaggaaatatgttgctggatcactggaaatctgctgagctatcaaccaaaggtaaccccaaatatgcttgcattttcatcttttgtccattgagacttttgatttgatctcattttaattccatgttgcataaattagtttctctctctcatcaaaatttggtgttttatctctgaaatgtttgggccaatgtaagttccaactatttattaggaataatggtttttgagtaggaattctgaggcaggatgttatcaagactgctgttgtaagcaacatatttgatgttactggagaggtggcggctggtgttgcaagcgtggaagctattgtaagtacttaaacacgaaggattagattttggcagcataaaattagcactcccaaaacttgatctttgtattatttaatgtagttatttccattgagttaagatgattttatgatgcatggtgtaggaaaagtatcttacaccagattggatccagaaattcaagcacaatattcattctgctcctgttatgatggttgatgcaaatctgaatctttcagctctagaattttcttgccaaagtaattttcataaactcttgttctttatccaatttccttttgttctcttcaattaatatattgttaatatggggttcctttcactttctcagtagctgcatcatcaaatactccagtgtggtttgagcctgtatcagttgctaaatctcgaagaattgtgtcggttgccaagtatgtgagtgttgcaccactttcccattatatcaagatcatcatatgctctattttatggattttcttttataacaattgacaagtcttatggtggatttcttcaggtaacttttgtttcgccaaatgaatatgaacttatttccatggctaacgctttaactggtggaagcgagttttctttctttccatttgaaagtgacaacatagaatctttgctccaaaggctaaaacccgcgatacaagtactgctgaaaaatggtatcaaatttgttgttgtcacacttggctcgaaaggaatgttgttatgctctaatggagagccaagatttacgagcgttgatcatgaagggtacaaacaagatgttactagaagaaagttatataagaccatcgcttcagcctgtcctcgtaaacttttctctgactgtgcaaaatcagagactcttctatttgctatccatcttccggctcttcctgcatcagttgtgaggcttaccggggctggtgattgcttggttggtgggactctttcttctatttgtgctggtttggatgtgatacaaagcttggcagtcggcattgcagcttcaaaagctgctgttgaagctgaagctaacgtccccaatgttcttgatttggcctcaattgcaggtatgacaagcatttgtgtcgaactcctttttgcttaatcaaataatgccttttgctcatagagaaattgaaataggatagttagtatctctatgaatgactaaattatgttcttttttatatttcatattaagggttgattgcggcataaatatttaaagttttgagtatataagcagcataaacttaatgactttttttagcggcataagtgttagtaaaaaatgtaatttttttttcatttaaatttattaaaaaaatatttaaaattaattgatactacatatttccattcaaacttatgataatttaaaatgtgggctttataatgaagtatgcactgataaaattggataaaaattatagttttacaaacattagtacttttgtcgttaaaataatcattgagtttatgccgcttataaacttaaaaccttaaatacttatgtcattatttaccctcatattaataaggctggatgtgtgtttatttcgaaaaacatgtagaaacaagataacaacctgtaatcaacgttggtttttctataaactttgcttatgcttatacaacttgtctttttttataaaaatgcagaggatgcaaggttggtttactctgcagccaaagttgtgtgcatggaaacaatggtctgaaatcaattttttttttcatgaatcgaatgagatcgaaacattcagctgtcgaaggacaaactatcattcccctttacttgaaagaaaatgcagtgtacgttttcataattatactcaagtaaattcatgaaaaatgcattatatttgttactgtgattcagttttgagcaatctcatttatcaatgagtcatatcataaatatctcaatgttaatatgcttgaactgaataagaattgaagaaatttttgtcaatttttcaggtttgtttggaaggaaataaaacttttttcatataataaagtgcattagtaattaaatgttaataaacatatggattgctatatttattggcagttgatttttttaaacttttcctttaatttaataatcatacctttttgtctaaatttagaaatagatttagggcgtgtttggaaagccacggtgtaatggaatttgtgtacacaatttgacatgtttgtttgaccatgtaattacattataatagtgtaattggaggtacttgaggagttctaatcacactcaccaatttttatgaccttcatgagaattgagtgtaattactaaaaacttttcattataaacattaactactaaaaaattttatttttccgtgtaattacctaattaatttgctagacaagatattaagaattcatatgtaattactatctcatattcaaacacactttgtattttaaaatataatgtaattactagactgtataattattactctagtaattatagtttctagtaattatataattacttccaaatacacttttagtatatgtatgtatgtatttggaaaattgaccaaaattgagattaatttattgtgtaaatggaaaaaaaaaagaa

SEQ ID NO: 225798 - DNA, 3195 bp, Cannabis indica
ctcatgcttagttattttttttattaaagaagtcttttattgtctttatcttaaatggttttaaacagactagctagtgtgacggttatttaggggtagttacggtgttaccaacacgagtataatgggactgcatgtggtacaacactcagtaactcctggaagtacaataatggccctaccaacactagtatggagtcggtacttcagtgtatatggtacaacggtcgtactttcgttgagaacgtttttaaccatttagtgaatcttgtacttgggctcaggagcgcttcagttcatgccgatattgcattgtatatatacaatttatgcatgtcttactgagtctatgcatgtcttactgagtctgtcgactcatcagttttctaccttgtgtagataagggtaaatccaagctataggagtagtgagttgaggtccggcaaggattgtacatatcgcggcagtgcaacttggagggtttcgttcgtaccgcattttgagttgtcttctgtagctgacttgtggcttgtaaaataattattatgaaatgtatatttatggtatgtgtatttcaatagtggtttttgactcgggatcccaacctatgaaattttataaatataattaaatatgtttaaatttcaaatttgttaatttttaagtacgggcgttacaattttagtatcagagctaccaggttgttcactgaataccgtcaagatatgtacaatcaagccaatgtcgagctcaactcacaagtccgtaagttcttaccttttagtaaactgtttaagttatattgtaattatgtgtgacacatagtttaagccctaaatgcggtcttggaaatatattgaccactgtttaacctacatgccttgtgggtttgcaggctaagtcttagaatatggacgaccagcgaaacgtaagaggacaacacataatggttgagacttgaggtggtcggggtgataggaactcccaaaacccctgtagatgcggcagaggacacgattgtgctaaaaaaggtggccaagagaattcaccccaggctccttttgattagaagtagaggtttgcagagatgcaagcccgaatcactcagcaagaggaagagattcggaggcctagatagcgggatgctcctattgagcctccttcgcaaccaccttctgttgtggttcctgcagtgccagcagaacaacctgtagctggcagccgtatggagcctttctacgagcggttcaagaagcaagcatcttccatatttttgggaggttctgatgttttgaaagcagagcagtggttgacagtgattgggagaatactgaatattatgggagtaaccgaaaatgatagggtggcgtgtgccacgtttcaattccaggaagacgcccttgtgtggtgggagatggtgtccctcactcgggacgttagcagaatgacctaggaagaatttcaggatttgtttaatgccaagtattacaatgaggcaatttgcagtgcaaagcgaaaagagtttgttgagttttttgcagggtgagaaaatgttagtgactgaatatacgaccaagtgtgatcgcttggccaagctggtttccgggatagtgcctacaaatttcagcaaaaaggaaaagtatttggtaggattgaacgctaagatcaggcatgatctagttatctccaacaacgatgctacaacttacgttgagatggttgataaggctctttgagtagaaggagtagtgaaatttctgcaggagacccgagaggtccctagtgttggtgggaccactactctccctatctttggtcttggcaaggagagtggtgattccactattgaacagaagaagagaacttttccaaatacttgaagtttgggtcaaagtaaaaagtttcgtggaaatcagggcaaagggagacgtcagacttactcctaccttgagtatccgccctgcaaaaagcatcaccctggggtgtgtaattggagagcttgttttcagtgtggatgagttggacacctcaagaaaaattgcccccagttgaaaaagtaggaacctaagctggaagccaagtttactccggcacgcgtctttgctatcacccaagctgacgctgcaaccggtccttcggtagttataggccaacttcttatcaacggctacacttatactattttatttgattttggagctacacactcttatgttgcatcaaggaaacttagtcagttgggtatgcctaatgatgtctttgaaatggggtttggaaccctgctatataacgggagttgataatctctagaaaatggattagatcggtactaatcagaatgaaaggcaaagaactaagtgctgacctagtggagttacctttggctgagttgatatcatgctcggaatggattttctgtccaaatattctgctagcattgactgcaaacataaaatggtaatttttcaactggagaacgaggaaccatttgtttatgttggatcagttcaaggttctcgtgtcccaagaatttcagctttgaaggctagggatttactacgcagtggatgtgaaggatttctagcagttgtgattgattttggtaggcccgtgatactcggacccgaggaggtcaaagtggttaaggaattcctggatgtgtttcttgagaaattaccagggttaccaccaaagcaagatatagatttcattattgacttgatacctaaggcagaatctgttttcaaaagcaccctatcatatggctccagcagaatttaaggagcaaaagatacaactttaaggaatgctggatctagagttcacccaacctagtgtatcaccctggggagctccagttctgtttgtgaaaaaaaatatgggactcttcgaatgcattgactatcgagagctaaacaagttaaccattaaaaacaagtaccctttacctagtattgatgatttatttaatcaacttcagggtaagacagttttttccaagatcgacttacggtctggctatcatcaactgagaattcgggaagaagacattctaaagacagtctttcgaactaggtacagtcattatgagttcttagttatgttttttgggttaacgaatgctccaacaacctttatggatctcatgaatagagtattaaaaaatttcctagataactttgtaattgtatttat

SEQ ID NO: 225799 - DNA, 2374 bp, Cannabis indica
gtttttaaactgtaaagccaaacaacatcttggtgtctacccttttctcaggtgtgatagtgtaattaagtattgagtctcatttaatttaatgtaataataacttataaagtatgtcactaactaattgtaaggcgttacatttaaaaaatattagacactactaatactcaatatcaatgctcattttatgtgtccttcgtcttcattgtttgaatgtaaagaaagagaaatgaaagaaatgaatgagtggaaaagtgaaagaagctctgcattgaaaataaggccaaacacaatatataggccaagagtttgttacaactgaaaaaataagaaaacaaagaaagacagttggcataccaactgtaataacagaaagagaaataacagactaactaacttaaggagagagagagttaatctgaattgtctctaacatcccccctcaagttacactcatttgacttgagtgttaacttgtctcttagatacacaaactgagagctatgcagcggtttagttaagatatcaacaatttgatatggagagtcaacatagcgaacttccatcttgttttccagaactctgtttcgaacaaagtggacatcaatttctatatgcttcgtttgagcatgataaactgggtttgaagccaatgatcctgctcccaagttgtttcactacaatataggaattgatgacagaggtataaatagttcagtgaggatagattgtagccagatcaattcggatgtggccaaagcaagggcacgatagttaaattcagtgctggatcgagcaacaacactttgtttctcggaacaccaactgattagattattgcccaggaacatacaatagcccgaagttgatttttgatcatcactacaacctgcccaattaacatccgtatagccctgcagatccaagtttgatgatgctgtgaaagtcaaaccaactgtggaagtaccagctaagtagcgaagaattcttttacaagcaccctaatgatcagtggaaggagcttgcaagtattggcttagcttattgacagcaaaagctatgtccggtcgagtcatgagtaagtattgagaggccccaataacacttcgatactgttttggatctgcaagaggggatcccgaggactgagttaatttggcagtggcacacataggagttgattgtggtttagcatccaccatatttgttttggctaataaatcatgaatgtacttagttttagtcaaatatattgctttagtgtcacggagaacttcaaaaccaaggaagtagtgcacagttacaagcatttttaaagcaaacttgctgtgaagagcagtgatgatgctttgaatttggtctggacattctcctgttgtgaggatgtcatccacataaacaagtaaaatgagcagcttgttgagtttttcagagaaaaataggcttgtattagctgtagagttggtaaatccccattgaactagggtgaattttagagtatcaaaccaggcacggggggcttgttttaatccgtaaattactttgttgagcttgcatacatgatggggaaattcagggtctatgaagccttgaggttggtgcatgaacacttcttcttttaattctccatttaggaacgcattgttcacatctaactgttgaatatcccatccattcgttgcagcaagggagaatataatcctgatagtgcatggctttattacagggctgaaagtttcaagaaaatccagaccaactgtttcttgaaatccccttgcaacaagacgagctttgagcttgttaaccgacccatctacattatattttattctaaacaaccatttattagtgataattttcatgtcattagtgggaggaaccaagatccaagttttcttatttttaagagcttgtaattcttgattcatggcttggttccattttctatcaacaagagcctgttttacacttgtttgttctaaaggattatggatgtgagttaggtaggattttggtttgaatattcctgccttagaccgtgtaaccatggagtgattgttgatattgggggcatttggttgagcagggaaggactgtgtggaggatgtggattcttggggcaggggatatggaagagaagaatcagtagaagaagtgtgactggaactcgactgagtagagatactgttattgggggaaggagtgagttggggagactgaggtatttgatccgaggcattagaatcttgtaaagattcataactgatgtgattggttctgtggttaagattggtaggatcattaatgtagttgtagttgtcctcccaaacatggtcattgtttggacaattacaacaccgctcattatact

SEQ ID NO: 225800 - DNA, 1656 bp, Cannabis indica
ttttaaaagaggtcagttatcaaatggggcccatcttgatataaaataaagttgtccatttgtaatgattgggacccattctcgggatctggcccaccacgggtcttgttcggcgacaataaagattccttttaggaatttggaccgttagaccatttacacgtgttaatcatccaagggtcagtaattttagtagcaattattgctaaaccactgagaggacctatgtaagcccactaaaactgggtgaggcccactaattttgtgtttgataacgactcggcctgccctcaaatgtgggtctctgtactctccctctctaacttattgtactggacttctttttctcaaaattacagaaacacccttttacctttttctttgaaagtgaaagccattacagaaacatccttttacctcttttctcttttttcatttttctttcacttttcaaaaaagaaaagaaaataataataataaattcacttcacgtttatgtctttattacacttttttctttgctccatctttttttcctaagaaagaataaaaagaaaaacaatgcaaaattgctcctaggttccccaaatttaaaaatttacaggaaatataatgtagtttctttcgaaaatttataatttcaattacttccatctataattaatgtaaaatttatatatttttctaaataactattattataattcaaaaaaaaaaaaaatcagagggcaaatttatataagggtataggctatggttgaaggaaaaaaatcacatttattcagaattttatttaaaattttgtataagattttacatataccctaagtatctaccatacatctatcaaaaataaaaaagtgtataacttttttgtaaaaaaataataatactagatgtaattttcactacatttttatagactataaataaacttacagaaaaaagtatatgtataatttgtgacgtaaatatttaaatttaattttttttaaataaattcttaaatttttacggtaataatacttaaaagttatatttttagaacttctcatcattgtgaagttattatctacgtgtcattttttattagtatatttaaattaatttttagataaaaataaaaattaaatgatctaaaaaaaaatcagggactatatagctattaacttgactcataatagccaaatacctacaaaagttctaaaaaaatattatttaaatattattacttttcaaaataaaacttaaatatatatctgtaattgtaattgaaattagatttaaatattcataccacaaattactctttataatatcatttttatataatgactttgtgtgagggactcgggtcatgtctcaattatggaagaccattatcacttgattaagcttatgagcatatatattacttctatgtattctatatatatattaccatttttgttaatagaataataatccactttaatgttcaaagattatatttctattcctatcttatgattttatgttatgttacaatttaactttattttttagtagtggagcatctcggaataaaaacatagacaattcatttagagatgaatttccactaaacaaataactttatattaaagaaaagccaatattgaaaccactcaagaaaac

SEQ ID NO: 225801 - DNA, 2088 bp, Cannabis indica
ataacaaagactcgtggactaaggctcattaacgccccaaccacgtaaaaatccttctctcactttcttaaaagctcaataatcttataatattttattagttgccgaaaatctcggtcaacacttgctatgccaccaaaggtgaaagtttttgtttggcgtatgttccattcgacgttaccagtagcaatacaacttatctcccagaaagttcaggtacctattcgctgttcacgatgcagagaggaacctgtaactcctgagcatgctcttttttcttgctctgggttgatttcagtgtggcagtaggtgggggtgtggtcggtgctttgtcgaggtgtacatggatcaatgcttgatattctcatttttttttacaagctatctcgtgaggatttcgcactactgatgacaactctctggttgctttggtatgatcaaaactcagtgttatttggtcacaagcaatctaaattagatgttactccagaattggccaataatcacctagtggagtttaaggaatacgataggccaaaccttcagttggggttgggccttgcaaacttagctttaagccgacctaatcgatggattccatcgtcgcccgagtctttgctctagtgactgatgttttgatggtaccagagaggggttttgtcagtttgggggggtgtggtttgggtggcgtggtcatctagcgtgttaagtgatttctctgttaatatggcggagttgcttgccattcaattgggtttgtctcttgggcatcaacatggcttctgtatctctattattaatagtgattctacaatagcaattagttggattaataatcttcacatgaatttagtgttcaatctattttattaaatgtctattctttattagctactgttggtggtggttcttgtagcgctatttcgcgtttggcaaatggtgttgcccacacactgacaacctctattactagtttggagattatatttggaaggatgcttgtccacaatttttgagttcttctataacagcggatttattttgatgaattatatctttttctcaaaaaaaatataatttttaagtagtgtaaatggtactattttgaattaataatatattctcagcattatctatctggaattaaaaaatcaattataaaccttctaaaaaaaagtaataataatattcaaggttataaatatgaaaagaaaataaaatgagaacagcaacaacaagtaagctatgattaagggccatgcttatttaaaggtggctcatcgttttggttatcaaggtgttgtctcatgataatgctatttaatcatgtaagaaggacatggatcctccgctaggagtgatgaattatgatatttttcaatcactataaaaaagaacttttgtcgatcacattttgcaccgaaaaaagtcaactaaatgtgacggtaaacttttaccagcaagtaattctaccgataaagattgtcggtgttttccgatcgaggaagtacattttgtgagcaaaataatagtcttcgctgacattgtaattttcaccgacatgcatagttgctagtgaaaagtgggctatcgacattaattcatcggttgagtcccattaaaaacattttttcggcaatagaatctgtcggtaaaactttcccatttatacgtaggaatgtatttttgaagcagttggagtcgtcgaaaaaagcattcccgaataaatcctcattcgcggaaggtattgtcagcacatcgaactatgctgacaatacatttttaattttttaaaaaaattaatttatatatttttttcggtgcaagaaaatacgtcgacgaaagatttttataattttttttgtgaaattaaatgaaatataattttaatttaaatttaaattaaatttttataaataataattcaaaataacatactaatataatccttagcatatattataactaaaccaaattcaagtaaaagttatagaaatataaaaaaataatttttaatttttttttaagaaaatactaatatttacactaaaaatactaaatagtcaaactacaaatcaacaacatcat

SEQ ID NO: 225802 - DNA, 4289 bp, Cannabis indica
aaatattgaagaagagaagatgatgtatatataaagagagagaagatcaaaggtttaaaaagcacatcatttgaaaagcccaatactttgccagacaaggttgcttggtaaaggctcctataatcaaggcaaaagttgaaaagtccttatccgtatagatgtctgaacagggaccatgggggtaaatgttatcccaaattttgtccacttgaggtggcatgtctgttgggattttatgccctaaataaaatctatttcgatataatctgatttgctatcaatggaagattagaagttgtttatcgagttttttggcaactaaatattttttagagcttaagaaagtaataacagaataaatagcaagataaaaaataaaagagttttatgtggttaaggaattaactatccttaatctccattttattaggctcattggccgtcaattgtttatacaaatagatatacaatggacaagaactcctttccctcgtgttcctcttgaagaagaggaagcttagtgggaatattctagagttggctgtagggttatacaaaatgtgttttcttaggatgatgaagaatgagtcttctctcctcccaaaaaaaaggtccactaaaaaaaggtcctctaaaaaatggtcttcctcctgttctgctttttagggggtatttataggccaacttctttggatgtgctaccttagatggatcaccattggggcgaaatctgacttttggattggtaggtggaatttttcccatatggcatttaagggcatcagattgtacaggttgggcctcatacgcgtgtcatctcaaggcttctcctttttgactttcccttatccctagttgttggatcatttggtcaggtacacaaggacaccatgctctgtacgatagcgttttatgggagacaacctctgacgttgtacctaaaaaagcctggtcaattggtttgtagcccgacacgtgtaggtagagcctccgtgggttaagggcgtagcctagtttaacgtgtctcaaaatgccttggtccctctgggaaaatccatactcttcacgggagtagatggctttggttcctggaatggggggagactttggctcacagataccatccgtgttgctagcagtcagggaactccttaccactaaaactcttcctaggaagttggtgcctttatcttctcggagcatcaattgaggaaattggttagctaatgactccttagctttttttgattaaaatccacgtgtcatgattccaaaaatgcataacatttatcccccaagcttcaggggcgtaccatagtccaggagcttgcagtatcttctcttgagtggtttcgagcacgtgggatttatgacaagctctttattacattatgtcatcagctgccaattgaagtatcactattcaaaaggtttaatttcttctattttctagtcaaggttttaaatgttgacttttgagttttgcacgcatgctgggcgcgtgttttgtgggatgccaaaaaatggtggtcattggatttgagtagactttccatttgctgagaaatcctcacgatgcatgcaatgatggaggccaaccgttgggaggcaatacaccttcttagcttcccattcattcaatcttcagacgcctcttgggcgaacgagtcgaatcatttgcttcttacgaaaggcacctcttcttggtacccattaaatacttttttcaaccattgcacattgtacattttttttacccgtcgtaccagagttctctttattatgttctgccccctgttcaaatatttggttctttcattttgacccatttcgacatgtggccttgctaacgaagaggactacccaggaggccaacacgctggtgatagaacttgagcaagtcaaggcggacaatcatgacttgtgcaatgccaaacgaaaccattctggccaagctcactgaggccaagcttcagattgaaggcttaaagaaggagaaccagttgctggaggctaattacgctcaacagactcgcctcatatggggtatgaaggccattcatgaccttcaccaggagacagtgaagcagctgtctggagcagattcctctaacccatctagtggcgcccaatcttgacttgcaacgagccttttgaattgttgttatttgttgttttttatatatccccctcttgctacacttggaagatgtacattggggaaagaagatcccctagtacacctaaagtactttgagatccaaactgttctccaacaagtatttgtaggtgtgcgatgcaaaatctttccaaaaactctagctaaactagcccaacaatagtatttcaagctagccccaggaagactaactcttggaaagaattctcccgagaattctatattcagttctctgcttcaagataaatacctatccaactggaggatcttgtctaaataaacaaagacaagatgaacctttagaggactacattcaacggttcgtgactgaggccaccaaggtcaaaggtttgacagaagaaggctcatatatggccataattggaggcatcctatcattgagtgacttttggaaagatatcaggagaatctaaatgaacaacatggaagggcttcataaagttggaagatgttgtccagcaagcccagacaagagggtaggtcaatgacagaccaacatagggcttcatagctccccaaataatgcccgacatgccaaccaacatagacggtctctattgattctccaataatgagaattgtggatgcaagcgcaacaacgatggctctgaccaacataatgacaaaagaggaaaattcaacgattcaattatgccatgaagcccaagggaagaggggatgggtgcatgcttcactctcctaccaaaactcctaaagaaaatcgtgcccagacatcctagcagggcaagtccgcaataggcagtctgaaggctggcctccatctcaaaaggctgccctccatctttgaaggctggcctccatctcttgctaggcgcaccgacaggtgccaaaaactctgcctaaacctccagtggcaggacacttaggggtcatcgttggcaaacttcatattacaagcaaaaccaacaaagctagggagctctatgcacgaacactctatcataagcccgaaagcgacatcctggcaagaaaagaataagactctaatcaatcgaagcttagagaacccaggatctctttcttaaaaagagattgttgaccttgaaaagtaatcaacgacagtggggtcgtgtaaatcggatgcttgccacatgtgtgcacaaataagaatgaaaagcaatagataataggatttgttgtagaggtttggcccccttgtgatagcaggtaatgacctactccccttttagttgtattacactgatagaattactatccagatcgctataggtgggatctgcttagtacccttaggattacaacgtatgaatcaatgcctagaaaaactcaagtgttaggtagcctagggtgttggaaagcctaagataggtgtgtgggagagaataaggaagagagagagagtttattagacacttagagtttgaaatcaggtgtctagctgagaggcaacttaggaaacttaggtttttagtcatagtttaaggcctttatataggaagcctaaaaccctaggtttacaattcaaatcccttggaaattgtatagttagttagatatttataaaagaccaaaacgcccttgattctatatattattcagccattttgttgggcttttggggtcccaatttgtagcccatctttattgtccacgtgcagagctgtccagcaaagccagcagagcattccttagctggctaggccccatgtggtggccaggctggccagccctggtgctgtctctgagctagctggcctttgatttctttttgagtgctgaggtctttgtttgctagggtgctgaattggccttccttttagtgacttgtactgctatgtggcattggttctgtccacgtaagcatgccacataatgaggacaaaaattgggataacatttaccccccaagtccctgtgcgaacatctgtatggatagggactttaccaactatcttgatgttgtcgggactgttgttaccttagctaaataaaaagtgatgtgtttgttgaagcactttgtcttaactgtctgatctcgttgtagtaaagaaataactgctttagttgcctttatgctgggttggtgaagtaagtgagaaaaaggggg

SEQ ID NO: 225803 - DNA, 1933 bp, Cannabis indica
gagagagagagagaaagagatggattttgttgttttgatgggtttcaagattaagagagaggaagttttcaaaacggtatctttctattatagcataccacctttgggtcactttagtctgcttttgccctttatttatttttatttttcttagttttatagtttgtttatgtaattaagcctattcctcattcactaatcactattcactaataactaatctcactaatcactatagtagtagtagagtcctactatactatactgctattgcgattgctattgctggactcaattcttaattattatttcttgcacagtcttaattattattgatatattgtacaaattggtggtccctaatctaataataatccttcttaattaattaaattaaattaaatttatataaatataactcttttatcgttatagtgtattatatattcataataataagcactgaaatgacttcggataagattttctcaccaactacataatatattgaattaacataacagagactacaatgactaattcacacaatcccaattcttaattaattataataataatcttccatcaattaaatatgcaaaacaaatcttgaccgttccatatatatatatatatatttgatttttttattgtaaaatataaaataataataataataataaataaaaaagctcttggatcagagtggggaaagtgagtctgagaaaatggaggaagagtggtctaagttgttaaagaaaaaaaaaaaaaaaaaaaaagttaattgatttattattgttgggcttcgtccaactttacggttgttaacagaggagttacacgtgtcaaggattgggcaccgtcatttgaccgtaagtggcacgtgggaaagaaagggcaagttccgttttcccacgcctatgtgttgctgattctagttcaacgtcatctctcggccgttactaccatacccctaaattttagggctactatcatcttcctcctcctcctcctcacgttactattttattttattttatttattttttaaataataatagtaataataataatattaaaaggtgaagcacaacaacaacctctctaagctataataataagcctacttttggcggggtttctattatttttgttaattaataatcaattttgttactttattgtttcgtgatttgtggaggtgatcactgggctttaattaacttttctttcatatcttttgttttatatgaggattaccgtagaattaccagtaacacaaaaaaaaaaaaaataagaaaattaccaaaagatattattgtgcctaatagcatcttcagtgtcatactattattgtgtaattaagtatcgattatcatataacttaaggatagttttagagaatattactaaccgattatagggcactacttatatattgaacactattgacactcaataataatatgttgatattaaacttataattttttgtatttttatttaagagtagtggtaaattgttttaaattttttgaataatttttaaaaaatagtttaaataatttattttatacgtttataaaataataataatttttttgaacagtttaaaaaattaagatttaaataatttattttatacacatataaaataataataaaacattactaatgaaactgactatttgtaccttattttcaacacattaatattctttttttaaaatttttttttacaagatattgtaagagaaatgctaaaagggcgtgctattagtgcgtatagcactctcgtgtcgtatcgctattctatataatttaatatataatttaatatgatagcttttataaaatatgcttgtaatcaatcataaaacactactcctaagcgatgctaagtactaatagtgctcaacaattctcatacctt

SEQ ID NO: 225804 - DNA, 3126 bp, Cannabis indica
gtactctgataactattgttatatgaaaactcaatcagaggaaggtatttgttccaagaactttcaaagtccaatatacacgcccgtagcatatccttaagtatttgaatagtcctctcagactgaccattgatctgaggatgaaaggttgctgaactttaatttagtacccattgctcgttgtagactctctcagaacttgaatgtaaactttggatctcgatctgaaacaatcgactttagagcaccataaagccgaactatctccttgacatgtgaatcagcgtactaatccactgtatgcgtagtccgcactagtaaaaagtgagttgactttgtatatcaatccacaattacccagatggaatcataggaccctactgttcttggtaatccaaccacaaagtccatggttatttcctcccatttccactcaggaatcttcagaggctgaagtaatcatgctggtctctgatgctctgccttaacttgctaacaagttagacattttgacacgtatttcactatatcactcttcatacctggccaccagtacatgactttcacatcttgatacatcttagttgtcctcggatgtaatgagtatgacatggtatgagacttgtctagaatctcctatccgatactatcattagctggtacacaaatcctacctttatactgcaataacccatatgatgagattgagaaatcctttgctgacccaacttcaaacttctttttatactcttgtaattttggatcactttgttggtttgtcttgattctctccaacaaatcagactgtaacgtaatattggccaattttccaactacaaattcaatccttgctctggtcatatcctcagccaattctggtgcgatcttcttctattcataaattttccctggactctttcgactagagcatccgctaccacatttgctttttctggatggtagaggatctcccagtcatagtccttaatcaattccaaccatcgtcactgcctcatattcaaatccttctgagtgaaaaagtatttgaggcttttgtggtctgtgtagattttgtacttctcgccatacaaataatgacgccaaactttcaaagcgaaaaccactgctgctaattcaatagcatggatgggatacctctgttcatactccttaagttgcctagacttacgtcgtggaaggccaaagctcagttgttggacattactattcctatcaaggaggaagttgtgatttaggatgagggatctgcgattggtgtgccggttggtggtgtgacccctgtggaggaggatggtgtccctcctccacatgaggcatgagaggcgttgcttggaactctagacggttggggcatacctctacagtttagaattaaaagccctgattcggttgtggtctcttgactttatcttcattagcgaactgaaagtggatgccacctttttggtacgttctcttaagaacttacattttttattctaatattattggtatcgtggaaagcgggttttatttttgaaatcatttgtatttctaaaaactagatttttggtattatgtactcttgaccctgagcattatccttggttattgtcttgtgtttacgggccccctacttccatgagaagaagaaattctagtcaaacattatagaagttggtcatgatttcggcgggccctagttgatcctaggagatgtgaattttgttgtgagtagctttgagtgtgtcaggtcaaaggggaaagaccgatttctccctttcattactgagctaattaagtgccatgctttgattgacattcccattaaaggggacaacttaacgtgggataaccatatggatggcccagatcatattaaatcagcctttgataaagcagtggtcaatgaggagtggttacacatttttcctaaagttgtgatccaatcgctccatacttgcaattcagaccacaaacccctgaatattcgtacagaggaccctgaggctaagtctaatcgaccgtttcagtttgaggcttggtggactagggaccctcggagctcactgatggttgaccatgcctggaattcattgtctaatgcttgggcccttgctatagtctttaagaaggttggggctactcgactggcgttgaacaagtggaatagagagtaattttgcaagctggatacttgtatctgttgggattttatgccctaaataaaactcatttcaatataatctgatttgttatcaatagaagattagaagtcatttatgtttacatgtagttttcatgtttatggtttaatgtgtacaaaatctattgaatccagaacatataactattcacaattacagtgatgtcaacacagtggaaggtaattgtgattatatgcttcaaaagataatgtcccttgattcatcagagcactggatttacactgatgtgatagtcaggaataaagtatacttacaccttggataagtgttatgttccttccagaatattggcaaagtatgctagtttcagatgtatggagtatacattagatcaatatcggtcaatatcggtcccagtccaatgtagtgaagaaaattatagtggttcagtcagagtttggtcaggagcatccggggatttggaatctctattattgcagtacaacaggtaagacagtagttagcacgtagagttttgcacggtggcgcttacattggaaatgatatatgtgagtaaacagtaaccgggattagggttattaccctaacatgagcggtttaatagcctagggttattaccttagtgatataagttgtattaatgctatgtcatgctaagtaaatgagtatactgagatttaagggttatacgttcaaggcataatcaggttggactcggtaactagaaccgagaagaaccattctaaggccttattgtatttagacgtgtgagcgcaacacgtaggtctacgccacgtagacataaataggcatgtgagcgtaacatgcaggtctgtgtcatacaggcatatgagaatggcattactatttatatattatgataaacatgttattgttattttatactgttttgctgggcttggctcacgggtgctct

SEQ ID NO: 225805 - DNA, 2672 bp, Cannabis indica
catgttttgtttcttatggaaacaaaactcggttctaatttggttactcggtttcgtaatagtcttcattttgctaatggtttagaggccccaagaattggattaagtggtagtttaatgctattatggaaagataatgtgattgtcaagctctcacatttcggtcacaccttttttgattgttttatggctttcgaagatggtccatcctttcactttacggctttttatggcgcccctgctatacatgaaataatagcttcttggaccctcttggagagactggctgataatttttctaaccaaccgtggctggtaattggtgacttcaatgagattctgtccaatattgataaagaaggtggtccacagcaaaatgaacgtttaatgaatgatttccgtgcttgtcttgaccattgtaacttgaatgacacaccatatgatggtgattctttcacctggataaaaaattgtactgctgccacaaccttaaaagaacgcctcgactggtgtttcattaataatctttgggacaatgtgtttggactcccacaggtttcccatttggactacttccactctgaccacagagctattgctgctgtgattgcaacacaaaacgacccagtgcagcagtccaaaaggaggagtcgtttccattttgaaaagctatggttagctgatgatgagagtagagaaatcatctctcactgctggttagatcaatcttctcataatccgattgaaaatgtgctcaataatcttgaagcttgtgccactaacttacaaaaatggcacattgggaagtatgaccgaatgaagaaaaagattgctgagactcaaacccatgttactgaactcaacaacaccttggttcgatcaaacaacatcatggaagaactcaaaacttccgaatcaattcttgatgatttattagaataagaggagatttattggcaacaacgatcccgtgtggaatggatgaattcgggagaccgtaacacaaaattctttcatgcaaaagcttctactcgacaatctaacaacagaataaaatttctcatcaatgatgttggtcacacagtgcactcacgttctgatttggtcactgtaattgaagaatatttctagaacatttttcaagcttcccctacgaatagtacaacaatgtcctctgttcttgaaaccattcctgaaatggtcacggctgatatgaaccatgatctaacaaagacttttactatagctaaggttgatgaagcgctaaaaagtatgagtctggataaaagccccggaattgacggtatgcctgcgatgttctatcaacaacattgggatttagtaggggatttagtttctaaggttgtgctgggtgttctcaatgacggtgctgacccaactccattgaaccgtaccattatcaccttgattccaaaaattaaaaagccacagaaaatgaaagattatcaaccgatcagcctttgtaatgtcatttcaaagctcattaccaaggttcttgttgcaagatttaaggttgttctcccacatgtcattttagaaactcaaagtgccttcttgcctaaccgtctcatcaccgacaatatattagtggctttcgaacttgtccatgccattaagaatagaaccacaggaaggaaagggattttctctcttaagttggacatgagtaaggcctttgatcgagttgaatggcactttattcaagaagttatgagaaaaatgggctttgcagaacaatggatcagccttattatgacttgtctctcaacaaatactttctcttttaccgtcaatggagaagtttcaggatccttgacactaacttggggcttgcgccaaggctgtcctttgtctccacatttgttcctcatctgttctgaaggcctctcgagattgttacaatttgaagaaaaagagggacggttgactggtttcaagctcactcgaaatgcatcaccgatttctcacttgcttttcgctgatgatagtctcctattctataatgccaatgaaagttcatgtcttgccataaagaaagtcttagacatgtatcaccgagcctcagggcaacttctaaatcatgataagtcggtaatgtctttctctctaaataccaccttggcatcacaggtctttttccacagaaatctctcaatgcccatttgtgaatgccatgaaaaatatttgggtcttccatcttacactggccgagacaaacaacatttttttagtgagattaaagagaagatttggcgccttatgcacaattggaacgagaagatcttttcagctggggggcgtgaagtacttcttaaagtagtggtttaggctattccaacttatattatgagctgctttcgacttccaatctatgttggtaaccaactagaatctatgatggcaaatttttggtgggggtcgaatgagaatggatcgaaaatacattggagagcttggaatttactgtgtaaatctaaaatagatggaatgggttttcgatcttttgaacaatttaatcaagcattgttggcgaagcaagcatggaggttgttggaaaaaccagattcacttcttagaaatttactcaaaagtcgttactttcctcacaatgatttcttacatgctcctcatggtcacagcccctctttaac

SEQ ID NO: 225806 - DNA, 2162 bp, Cannabis indica
tatatatatatatattctagtttctcactttctttctctaattctatttcagtagcacaccttgagattttttttactcagctcaaaaggttaggattccatttataggatttggacaatgagagttgatgtcataactgtcttaacagaatgttagttatgacaattttgacatgttcgagctgttttttagcaaagttcaaagaatgagggaaaatcaaatctgaggccaaacataacaggctacaataacctcattttgtttacctctaagactaattgaagaggattgtaaatttttaattccttggagttttttatgttgcctcatcaaagtttcatttgagaaacatatccgacttatatgagttaagaaacaaaaactaaaaaaaaaaatcaattgagatttacaagtaataatccaatacgaataacaattgaacttttcaacaacatagacatggcgatgagaccatcccctttgaataatcttcatgagatgtttgccttcgaatcatctccaaaaatagcgaaacccaatccaactcacaatcgcaaagacggacatacattttttattggtcgcataatttaaattgcttatttttttttattaagagtgcaaaagatcttctatttctcctttgcaaaaacaattgcctttaaattgtattaggtccataaattatagttagaaaaaaattccttctgttattttctccattgttgtaaatgattctatggacttgtttggtaccccgtataagggtcgtattgtattaaacaataaataatactatgtttggataaaacaatgtatcatattaactattacgactaaaatttttaatacaatgtatgttgtattatttaatacataacaaatggtttgtattagcttgtattattatatttacaaaagattcgaggtcaacaccaatctcacacctgaactctaacccgtacccgaacccaaacccaggacccagactcagacccggaccctgaacccagactctgaactcggacccagacccgaactagacttgggacccaaacctgaacccgagacttggacccgaactcaaacccagacccgggacctagacccgaacccaagaactagacccaaacctagacctggacttgaacccagacccaaatccgaacttgagacccggaactcggacccggacccaagactcgggacccagacctagatccagacctaggcccgaactcgagacttggacctagacccagacccagacccagacccaaacccggatctcggacctggaccccaaaccctagacctagacttagacccggacccaaacttggacctagacccgcaacttggacccaagacccacgacctgggacctagacccgggactcggacccgaacccgaacccccgacctaggcccgaacacagatgcagacccagacccggatccaaacacgaacttggacctagaccgggacccgaacccagacccgacctgtagttggtattttacacaatctattaatacaagtcaataccaaacatagtactgtattaaataatactaatacaatataatataatacaatccaacacaatacaatacggcataccaaacgagctcaatgtctaaatttttgttgaaaaacttgaagaattttaaataatagcttatgaaataattaaaaacttaattatttttaaaaatttgagattaattatgcataatctatatctattctatataaataaattttgttttaacgttgttatttcttattctgttaatttaaaacataagcatttaacctacattaactctaaaaaaaaattaaattttaaaatattcaatataaataaaaaatacttaaaatctttaactttcaaaaaaattaacatttgaaaataaataaaaaaaaataacaaacaatagcataatttatggacctcacattaagtctaaaaaaatcaaaattttaaaatattactagtgaagtgaagtaccacatgcttcacacgtgttagtatatgaattatacattatgttaaattatatttatggtgatgtttagttgttatttaataaaatagaatagaatggaaacgaaaaaaattctcattctatttttttaattggttgcattttaaaa

SEQ ID NO: 225807 - DNA, 2842 bp, Cannabis indica
aaagataaaaaaaaagatctaaaacttttatgttttgactttgtccaaaatatgaacaaaacatagtcgaatttaggcttaaaatttcagctttattctctttcaaaattttctctattttatagattactgttttccaaaatttgtctaatttatacatcccaagtgtagaaacctgaaataaaagaaaacaagcgtaattctattccaaaaataataataaagaagaaaaacaactataaaatgtgacccgaaacttaggctaaaaatagcctaacaaagtgctggaaccagacttgtcaacatcagaattgctactggcaccattcattagacatctctgtctttcctcctaaaccactgctgcataggccttattaacactaggcaaaggatctctcataagaatttgagatctcacattgctgtaagaattgttcaagccaaccagaaactgaagaagttgatcttcttcttgatattcatgaataatcttcatagcaccacaactacaaacatgttgtggtctatattctctaatcttatcccaaagagatttgaggcgtgtgaagtaagtcgtgacagtattagatccttgtgtcaagttctccatagtcttcttggcctcaaaaatccttggagtatttctttcattgaatcgatcatgcaactcttctcaaatttcagcagcattgtcatggtacatgatgctgtctgcaatttcatctgatatcgcatgaataatccaggagataactgtgttattacatctacaccaagcatcatactcctcttgatcttcattaggttgtggtagctttccatttacaaacttgatcttgtttcaagcaaccaatgcaatcatcattgatctcctccatgtgctgtaattctcacttcctgtgagaatctttggaactaggacaactccaccattgtcactgttcgaaaggaagtaaggatttgagagatcattttcatttgtcaattttgaattctcaccaaggacagaaaattgatttgagtcactatcatctcgagtacttcgagtttaaactcttcctccttgcgccctgaacaaccaaacagaatgaaggaagaagaagaagaagaagaagaaaaagaagaagaagaagaagaagaagaagataatcaatcaataccacactttaatggtggctctgataccatttcagcttgaacaccattagagaaaacacagagaaaaatagagagaagaagagaaagaagtaatgacaacaaaaggaattttattcattctaattaaaacaatacaagtagaagcttttatacaacaactagagttagttacaatcgtaactaacacaactaacaacaattacaactcattgacagctcatactaactaactaacaaaacctaactaactaaccaacttgcatctttgatagttcagcgggattatcgacataccatagtttccatcttcatcaaaaatttaatggttggaatctacacaagttatgatcccaaagcccaaatatattaagaaagaacacctcccaactctctaaaatataaatctattgtatgtatgtatcaaaattttctttaacagagtgaccccaaagtccaaaaactgtatatctgtgtttatatttataaaatgaattgttgaaagaaaaacaactttatcctctcacaaagacgacgaccattttctcaagcagatactagatataaacttaaattgggatttttttttcttaatttttttttaacataatcttaattaaaattgaaagaagaaatgacgaaaagtaaaagatgaacaaacgtcaaaaaaaaagtgaaagaatgtgtgacttaagtgagagaagttttttattttaggggagtgaaagaattgagttaggattttaagagtttaatttatattatattcaaagttaacatattataaaaagaatattctattaattaataggatattctgttaaagttattaaaaaccttctttaaaccaagaattatcgttaaatagacacctttaatatataaagataaagataaagaaaacaaatgcacccaagtgccattaacttactagacattactatgccttaatagcaatgctgattcacaaacaataatgaaaaacagactcataatcataagggcttgtcaaggttctactcggtcaaacaggcaatgaagagcttttattattagttgaatagttaaaaccttttttcccataattagcgcacattccaaacttacattatgccattctccttttctttatttctatatatctgtctgtctcacactgataacactctacgtgccacgtgtacacaaaatcaatgtacaataaaaaaaacacacgaattattatatttatttggtagtgaagtaacggcgccacgtacaataaacaagggtaatttggttacttcctcgtcactagagcaacttgaaaagacaatattatccttgtcttttgtatttgaaattacgatgttgtacaatatttactacgtggtgtgattccattaagcaaggaggagttgagttgtttctcaacaaattcaaatctgcctacttaactgctaccaccggaaaactccatatttaccaaaaaagcaattaagaaaaagaaaatagaattaataactactaattaattaactaattaaaattttaaaaaatattaaagagcgaatggccaaggagacaagagttggatatttgccatttttctgtctctgtgtatggatctgagattgtgaataccgatttcaggctttttttaagctatagtcaatcaacatagaacaacaacgccgccatagta

SEQ ID NO: 225808 - DNA, 3753 bp, Cannabis indica
ggaggccctgttggcaagataaatccgtcgtgtggtcttcgtcaaggtgttcccctttcgccctacttatttatctgggctgtcgaaattttgtcaaggcttctagaagacgccctagataagaaagctattagtagtatcaggtttagtaggaggggccctgttatatcccatatcttcttcgctgacgatctcattctagttggcaaagcctccttagcggaagccaaaggttattgggattgtcttgagaagtttttgctcttggtcgggacagaaggttaataaaatgaagacttcaatattcttcagcaagaatacccctgctagcatgaaacaagggatcaaatatctgttgggtataggatcgccggagggcaaggtcaattatctggggcttcctttattcagatcgagaaaaaagatgcagattttaattttattctagataacctgacggcgaaactgcatggttagaaagctaagactctgtctaaagcagggagggcgacattgatctagtcagtgggattatctcttcccttgtatgctatgcaaaccacaaagctctccaatcgccttgctgctaagattgacggtttggttcgcgatttctggtggggttccgagaagggtaatcacggacttcacctcagagcttggtacaaactttgcctccccaagtcattaggaggtttgggctttcagaaatccaaagaaatgaaccaagctttcctggctaaatgggggtggaaccttctgacaggaaaccaatccttatgttgtcggattctggaagcaaaatatcttaaaggtaagtcatttcttgattgcaaccctaaagcagcggactcatggttctagaagaatgtggcaaaatcaagatctattatcagcaaaggtgcttgtaagcgagttgtggatggcaagaatattgacctatggcatgatccgtggattgcacatataaagggcttccttccccacccaagaggacccttgttgaatggggagtcaaaggtggcagagcttcttctggacactggtgatggaatatccaaaaacttaacaagttgtttgataatgagactatctcggctatcctgaaagggggcaacccgttgggtgatggagaggatagatggttctggactttagaacgtaatggtaacttctcctgcaaattggcccttagagccctggtggaggaaagatcaactccttgcgaggttgccccttctatgtggaacaaactttggaacagtaaaattcccgagaggctcaaggttctttggtggtgtatcctttctaaggctattcctgttcgttcagcaatcggcagaaggtttcccatagaagatgacagctgccccatgtgtggtgcggaggtcgaaacagttgagcacctgtttttgtcttgtaactttgcttttcacttatggtggtcaactccctggggtattttccccatctgtgataccggtattcgaatgtgggactgggtgaaattcttatgggacctgggcagtaaaggcgtcaatgctgatgaggccttcctttttgcttcgttaattattgacacgatctggagatcacaaaatgacaaggtacataacaactatactgctaacatctttaattgcgttgacactattcggtttttttttgcagatcatcatgctcatttactcccttgccccaattcgcgctcgtcggatctttggcgtcccccacccccccaggattggttgaagctcaattgtgatgtcagagtgggattggatagtatgtgtgcagcggtggtggcaagggatcacgttggcaaggtgatctgggtagccacgtctaagctggattttgcggatgctctctgtggggaagcgatggcttgttgtttggccatggaggaagctaaagctcgtggtgttaaatttatcattgtcgagagtgattcaagggtagcaatcaacgccctcaatgggaaggagtcccgttgggagcttgagaactacacctcattttgtaaaagaaactctcatttttttatcggttgtagtttttagcatgttagtagacaatgtaattttgtagcccataatgtggccaagtggactttttctcttcagaggtttggttccgtgccattatcctctatgcccgatatcttattctgtaacgaccgcgaggtctaactaattttatgttatatatcagcacgcttttcttcttcttcttctttaaaaaaaaagatgattatgatacttggttgttaatggcttttttatatgttgtggctttgatattgttcgagtatgctactcgattgttaatggctcaacataaaaaccaattaattagaaacaagagtaaagtgaccaaagagaaaatcattaattcaaaaaaatatcaaaaaattaaactaattcttgtgtatcacgagtttcataattgataataaataattagacttaattgttgccactcctaaaaaaatgagtgtaaatctaaatctaaatctaaatcttactacctaaacttgcaatagtccaattttgaagtgctatataactacccaaacacctactcaattagcatgggttatttgaatagaaaatgacaatttaaatgagttaattcttatttgatgttgttcaattgttgttcgattacgctacttcactgctaatggcgtttatataaaattaatacataaaaaaatatatatatatagtcaattaggtcgtattgcacctcgtcgacctccatttctgagtattgaagctcaactaattgcgagtaagttatatctgactccaacttgaatattttattttcagcgccattaaaaatctaatcttttacctcgcactcctgaatatcattgtacatcaaatagtttgaccctatcaatttaaaacaaaataaaataaataccacaacaaaacatttacaaaatgtataaatcaaagacacatcatcaaaaatatatcgagttccatcaaacaagtatcacgaagcagttaaacaaaccacgtaacttcctatgtatcgaacatgcatcgtgtaacaatcaaataagtactataactgatctatatcgagcaaatatcgaaaactaaaatgaaatatcacccctaacctctgaaaaatactaattatcgagtatgcatcaaatgtatcaaattttatgtgaaaaaaatgagaaaactctagaaaacaaagatatgatgctctaaccaactaattgataaaatacacaactaaatgtatatttaatgtacaaaacaacaatatactttgaacaaaattaacattaacaataaatttaacataaaattacatactcatttcttttccaccaaaaaacaacataaaaataaattttgaaaattttgacattctcttcttatcttgtgataaggctcttcctcgatatatatatatgtttatctttcacaaataatagctctgaaaattagtagtgtaatgactatattttttggagaataaagaagagagaaaatatttggagtgaagagtgaaagagaaaagagaaaaaggaaaagtaataaggcaaaatgggatattttgggtttacacaaaagtgtacatacatagtgcaaaaaggtttcttttattttttttaatgtaaaattatgctgaaatttttcatatagtatgccttagaattgatttttttttgcttttttttgtcagagaattaaaagaaatttgtaaaaaaaaaaaattaat

SEQ ID NO: 225809 - DNA, 4270 bp, Cannabis indica
tgttaaatcaacatacttgcaaatagatctaagatcctggataaatataataccaacaccaacgacaaacaccaccatcacaacataccaccacagtcaccaccacttgaaaaatatagcacacatcatcaactaccaccatcaccccacttcaaccctaaaattagggaaaaaaacccaaaatcaccgcaaccaccatcaccaccaccacctaaaatcacaatctaatattttctcttcaccacaagagatcaacactaccaccaccaaaaacatataagaaatcaaaaacatgagtctttataatcaaaaatactcttaacttctccaaaattttcttttacataaaaaaatccaatttctccccaaacttatataatgaatacccatatgaaaagtttcaaaatacaaaaaaataaaataaaaaaggactgagacaaactttgcgaataggagtgcaagtaacaagactactatattactctgttagtactctgttagttagtgtatatctattattatttactctgttaagtggctgttaaatacatatacttgtttgtatatgtttggcttagatggtcaatgttttacatcagtgcagatccctggtctttcggttctcttgatttaaggagttctgttacatgttacctctttttgcctatttaaaggcttttctccctgtaattagtattcattcaattcaataaaatccctttaatgtttttctttttcttccgcaataggtaccagagcaaggaagctatacttcctttcgatcctgattcttttaccttcttcctcgccgtgcaatctgctcttctccggcgataatccatgtccgcagttgaagaattcatttcttcaatcgacacccttcttttacaagtcttctctctgagttcttgagaagcatctcttgcttcttttctatcttgccatgtcgaacaatcatggaacagacagtgataacgaagctactgtccaaaccaacaatggtaacaatcaaactcgagcaccaggtatggaactaaatactcaaataaacagacctagaaatcctattgaagatccctccgatccctattttttacaccatggagacaaccctggaaacattctggtatcccaattgctcactggacaggacaattacattgcttggtgtcgagcaatagaattggccatttcagtgaagaacaaattggggttcttgaatggttccatacccaaaccccctgaaaccgatcaaatcctctacaatgcttggattcggaacaacaatatcgtgatttcttggataataaactcggtttctaaggagatttcctctagcattctctaagacgagtcagcagccgctatatggaatgatctaagagttaggtttcagcaaaggaatggtgctcatatatacaatctcaagaaaattttgatgaatctcaaacaagaaacccaatcagtcagcatgtatttcacaaagctcaaaacagtgtgggaacaattgtccaacttcatacctaattgcacttgtaatggctgtacatgtggaggagtcaaaaaattgcaagaacaccataatatggaatatatcatgtcttttcttatgggattatctgatctctattcacaagtgagaggtaatattcttgttatggatcctttgcctgaaattaatagggttttccatttagtgtcacaggaatagaaccaaagaggaggccaaaatgtcactaccgatcccaattccaacatggcttttgcctttcaaggagaaagaaaccatgggaaatccgaagctaccaagaaccaaggacagaaacgtggtaggcctttttgcactcattgcaatatgcacgggcacaccattgaaaagtgctacaagattcacgggtatcctcctggatacaacaaatcggagaaatcaaagggtgctgctgccaatcaatttcagacttcaaaggagcctggtttggatgctaatgacaacaacactttgctgcctcaactaacaccaaatcagtaccaacaacttctgaatctcttagcttctcaatctgtcaatccacctgctaccgattcaaatcccacctcaggtagttcaggtattgtgttagtaaattatgattttttgcctaaagaaaaatcttggatagtggattcgggtgccactagacatatttgttctgatttaaagctttttcaaagtgttcatactgtccatgctactaaattgattctccctaacaataatcatatcttggttcacaaatgtgggaatatacgcatcagaaaggatttggtcttacaggatgtattatatgttccttcctttcaatataatattgtctctgttagctgtttaactcaagacaataactatgatctaaaatttcttgctaatgagttttacatacaggaaatacacaccaagaagaagattggcaaaggtgaatcggctaatggtctctatcttttggacaccactaccgttcctatcaatgccttcacttccgctgaaatttggcatagaagattgggtcatttgtcaaataaatgtcttgatttgcttagtgattctttacactgtaaaataaaagatttacatgctattgaaccttgttacatttgtcctctagcaaagcaaagaaagcttccttttccaaataataaaagctttacttctcattgttttgatcttatacattgtgatatatggggaccttatcatgttacttcccactctaatcacaaatatttccttactttagtagatgatcattcaagatttacttggatttatcttcttaaacaaaaatcggatgttcttcttattatacctgaatttatttcttatgtgcaaactcaatataattgtgttttcaaacgtttcagatccgacaacgcacctgaacttactttcaaagatttgttttctaaacatggcattctacatgatttctcatgcattgaaactcctgaacaaaatgccgtcgctgaaagaaaacatcaacacctcctaaatgttgcaagagctttactttttcaatctagagtgcctatacaatattggacagagtgtcttcttactgctgtttttttgatcaaccgcactcctacaccaaatctcaagaacaaaacgccttatgaaattttatttggtaaacaacccgaatatgatgacttaagatgctttggttgccttgcttttgcatcaaccattacttctcatcgaacaaagttcgagcctcgggcaagaacatgcgttgggatatccaaggggagttaaagggtatagattatatgatataaattcaaaacaaatttttatatctcgaaatgttgtttttcatgaacatgtttttccttttcataaacttaatcctattagtaataatgttgacccttttttacctctcattctaccaaatgaacatattactaatactcatattgataactatcctattcctcttcccagttcggtttctactaacactactctgcaagatattgcagaaaacacaccatcggtttctactgacactattctgcaggatattgcagaaaacacaccagaaaatattgcccagaataatgtagaacctgcacttccacccgatccatctcctacacctgatcccatgcctcgaaggactactagagtgtcacggccacctagttatctccaggattttgagtgttacaacctactggaagataacacttccacttcttatcctatctcaaaatatgtctcttattccaaactttccaaagcttataaaatgtttgttcttgcagttacagccgagttcgaacctcagagttacaagcaggccattcagttcaaaaaatggctccaagctatggacaatgaacttctagcactcatcaccaataaaacttggtccgtggttcctctcccacctaacaagcgcgctataggatgtcgatgggtctacaaaattaagtacaacagtgatggaagtgtcgaaagattaaaagctcgtcttgttgctcaaggctacactcaacaagaaggcttggatttctttgacaccttttcacccgtggccaagatggttactttcaaactcctccttgccatagttacgattcaacaatggtccactttacaacttgatatcaacaacgcattcctcaatggtgatttggatgaagaagtatacatgcaaataccccaaggtctccaacttccaccttctatctcgggtgacaaccttgtgtgtaaacttcataaatc

SEQ ID NO: 225810 - DNA, 2227 bp, Cannabis indica
agaaaagatgagaattttctgtgttttattccaataggtgatctcctatttatacacatacaagagtcaaatattaagaaactaagagaaagggaaactaagaaaaagggaatgttgattaccttaatggtaataaataaaagatttggacatccacataattaatactatttataacacatataattttttctatatatacatttatgtatatgacattggaataaaagtgaatgatatttgaaaataaaacgtatggaataaaaaatatatgaagagcattatacttctactcatatatgcaatttaactttttctttttttgaatgaaaaaattcttccactgaaatatatataatttttaatgattatttaataataaataatttttttttataaaaatatcaaaatttagtaatgtagttttttgtacacaaccaaacaaggtaaacctattcccataaagtcaaactttgtaccaaacggccccctagtgtcctatgttgtctcattgggactaagtctaggtatccccccttgagaagttagcttactgcttggtattagcctcgagaaaactaaggccacactttcaagctcattcagtaaaggtcttaactgactaaccactaagacatgttctgatgaaacaagaaccgttaggatgtctacttaagtgggcagtagagctagatcagtttgagatcacctatcaatctcacaaggcaatcgaaggacaggcattagcaattttattactgaacccactggcctcgaggaagacaaccccatggtctgtgtgaactaggtgcacacgcctaaaactacaacttatgaggacattggtccttcttagaaactttatgtggatggatgctccaatgagcacgactctggtgcaggacttttcttggtaactctagaaggatttcaaacccactgtgcactacggtttgagttcacatcaacaaacaacaaagaggagtatgaggcactcctagtaggacttcggttagcactagcaatcaaaattgagtgacttgagatttacaatgatttgaagctagttgttaatcaaattctcggcgaataccaaccccaggatcatagatgataacatacttgagcaaggctaaagatctaatagctcaacttaaacactactccatccaacaagtgccacttgaacagaatgcgaacgcagattccctagctaaactagctagtacaacaaatactgatactctaactgtagtttccgttgaatacctcaccaaatgaagcatcaatgaagacttatagcctatccttatgatcgacaacactccatcatggatgaccccaattgcagaatacttagaataaggtattctcccaatagaccagaatacagctaagaaactaatgagaaaagcagcacacttcatcatcgtggatagagtaatgtacagaagaggctactcaatgccacttctaaggtttgtcatgaaagaaggagccaagctcgtcatggtcaaagtacatgagggtttttgtggcaattatgctaggggcaaagcctctcaaagaaggaaatggtatttttggctaacaatgattatagactcaatggactatgttagaaagtgtgaaaagtgctagagttctcaaaaatacctagagttaccccaaacaaactcaaaagatgcaaactccctatccattcgctgtttggggaatcgatctcatagttttactacgtaagggaaaaggtggagtttcatatgctgtagtgggggtagattacttcaccaaatatgctgaagcagagcccttagccactatcacatcaaataaagttcttaatttcatgatcaagaatatcatttgtcgcttcagaatcccacaaaagatagtgttagaaaatggaatgcagtttgacaacgatctctttactaacttttgtggcaaacaccaaatcattaatagatttacggtggtcgcttacccacaagtaaatggacaagtggaagtggttaaccaaacatttacggatacattaaagaaactcctggagcaagccaaagggaactagcctaaagaaaaacctgaagtgttatggtcttgccgcactacggataaaatagcaacaggccacactcctttcgctctaacctatgggtacgaagccatgatacgcgtatgcttcattaacatcctaatatgaatttctaaaataatgaaataa

SEQ ID NO: 225811 - DNA, 2689 bp, Cannabis indica
aaaaaatgataaaaaaatctcacttgtatgcgtttatttatcccaccctgctggatgggataaataatcccagacatatgagattagctggattagttatccagacttctaacatgcccaaacactggattgaacaaattagcctgtctaatctaatccagtcatgtgtaccaaacgggcccttaaagtcttaacaaatcaaccactaagacaagttttatcaaaacctgatgcttcaggaagattgataaagtggtcaattgaattgggacaatttgacgtaacctacaacccaagaatcttaattaaaaggcaagctttgactgactttctaattgaagggataaattctgaagaagacccagatgttgaacgcaaaataaagacatggaaattatatgtaaatggggcttcaaatgagaatggctcggggcaggagttataatgttgttgcttgacaacttcaaattccacgacgcgttaagattctagtttgatacctcaaacaatgaggcatagtatgaggccttgttgataggtttgagaatagctgaggcactaaaggtcaaaaatcttacatgctttagtgactcacaactgactgtaaatcaagtcttgggagaacaccaagaaaaaggattgaaaatggcaaaatgtttagagaaggttcggaagaacttgaaaaagtttgattattttaaaattgaaaaattccatgagaacaaaatgctaatgcagatgcattatcaaagctagcatcctaatatgatcttgacaagttatatttggtaccggttaaagtcttgagtgacccaagcatatgtgaagaggaagaaattgagatgatagatacttcaccaacatggatgacacctattgtcaagtatctagtcaatggagaacttcttccagacaaaaccgaggcacgcaaattgtactcaataccttgctatacaatatttaaggacgaattatataggaggggttattccatgcctctcttacgatgtgtgttaccagcaaaggccaatgaaataatcaaagaaatccatgaaggcttctgtgtggaccatgcaggttggcaaagtctatccaagaagatcattcgtcaaggatattactggccaacaatcaacaaagatagatatgaatttgttaagagatgggacaaataccaaaggtttccacatatacctcgcgtaccaccaataaagtggagaatgatgaccttgccatacccatttgtaatatgggggattgatctaatcggggcattacccacagggcaaggaggagcaaaatacgcggtggtggcagtcgacttcttcacaaaatggacaaaggtcaaacctctagtttccataacttgaagaaagttcttgactttgttatcaagaatatcatttgcaggtttggagtcccaatcaaaatagtataagataacggaactcagtttgatggtgaattgttcactgaattatgtgagaggaataaaattattaaaattttctcgtcagtatatagacctcaagaaaatggacaagtagaagttgttaataaaactttaaaagatactattaagaagaagttagacgctgctaaaggaagatgggtagacaaactaccaccggtgctttgggcccacagaacgacagagaaaacagcgacgggacacactccactttcattggcgttcggctcaaaagtaatgttacaagtagaagttaacattccaacccatagatgcaaatttcataatcaagaggaaaaccaagaactttttaatttgtccttggatcttcttgaagaaagacggaaatttcataagaaattatttgtttttaacaaatgttaattttctaaaaaaaatgactaagtttgaaaacaaagtagcaaagtagaggagataaattttattttgattccaaattgttctatcatcttattcaatataagattgtcccactgcctctattgtcttgacacagtcgatgaggataataccaatagtgttcttagacagaaagtcacggtaccttatcgtagtgggagggtttcaaggaactcaccatgttatgacttggaagatacttgtgacaaaatcctttgtttgtttaaacacgaaattgattgtcagaataaggaactaagaagcaaagccaagagaactatggttaaaaccattcatatggagtaaccaaaagttttctattacaaggacaagaaaggaattaataaaacttcttgatcctagtgttcaaggtttaagattatctaaacatgtggcttatggtaaacctggtaatttacttacttaagtgcaagcaacttactttagtaagttgctagagcatttttctaatggctatctatagaaatggctatctatagaagcttttcgacttctagacttagattttatctaaggaaagttttatctattccagaaaagataaaatacatgaaggaattccttaggaacaacaatgagagctctcagatttgctttagcatgcattagaccagacacctgctgttgagtgggagtaatgagttagtattagattaatccaagaaaggaacattagaagacaaccaaatgaaacttaagatcaagaagaggaattatctgttagttgacaagggtggtattttaatactcttagactacaccaaatcaggtttctag

SEQ ID NO: 225812 - DNA, 2624 bp, Cannabis indica
tgtgtgtagcctttggctactaggccagctttgcatctttcaatagattcatgtgggttatatttgattctataaacccatttgttgctaataatgtgttgtccaagaggtagtgagacaactatccaagtattattggattctagtgcatcaatttctgcgtccatggcttggttccatattttttctttgcatgcttgagcataagaagtttgttcaagtagctgatatgtagcaagtactgctgccctgaaagcaggagatagtttatgatatgaaaagtaatttgtaagaggataaagggaactgcttgtgtgtttggtgttattgcagctgaagcctttgaaatgagcaggtgtagagatgcttctgcctgattttgtggagacttttggagccactagtttttcctggacatgtggcatgttatgtgctagtgtattgagttgattagtaggaaaaaactgatcaatggatgcatttggagtgttgttttggagaggatagatatcctcatagaatatgacatctcttaactaaaatatattatttgtttgtatgtcaaggagtgtataggctttcatgtggtcagggtagcctacgaaaacacaagattttgctcgaggagcaaatttatggttagtgtgaacatgggaaacataggctaagcatccaaagtttctgagatggttataattgggtggttttttgtgtagcagttcattggaagtattgtcttttagtagaacagatggtgttttattgatgagatagacatcagttttaaccatgtaattccaatatgatagagatatattggattggaaagcaagtgctcttgctacattgagtatgtgctggtgttttctttcaacaacaacattttgttgaggtcttgtcacacaagagttttgatgtgtggttccttgttttgcatagaagctagtgagatttaactcttttacattgtctgtcctaacagatttaatattctgtttgtagtgaacattaacaaaggtgaaaaaattgcaaattattataggggcatctgatttagcctgaagtagatatatccatgtgtaccttgaatggtcatccacaacggtgagaaagtatttgtatccttctgtagaaggaatggggtatggcccccagatatcgagatgtaagagatcaaataattctggtgaaaagttgctattggacacaaaaggtaatttcttttatttagaaaaatggcaagttggacagttatgtacattagatgcatcaaaaggaaattgcagcctttattcaatttgtttgtaatcaatacagaatggtggtcaaggcgtgtgtgccattggttttaattgtgtatattacaagagactgcaatgtatgcttggtaatgagaaggttcttgatccagatagtaaagcttgccaattcttctagctgtcccaatcgtcaatgtctgagaatggtcctaaatgtaacaggtgttagacgtaaaatacacattgtatatattgtcatcaatttaatgaggtgatagaaagcaaatttaattggaatttaggtacaaataggacattatgaattgtgattgcagaatttatatgacagtgccaatgagttctatttgaacagtgttaccattagggagtgtgacagatttgtgtgtggttgatttagtgatgtgagaaaaacatctaatgttccagcaaacatggtgagtagcaccactatctataactcaagaaattggaggttgagaattgttaataccagagaaattattaattgtaaggccttttgatgttgaagcatcagttgttggttgtagctgctaactgagcatagaaatcagttgttgacattgagctgctgtgagttgagaagtggatgagtctccttgtggaagagaaatatgatgagtctgaggtgtagtggggttggtggaactagtttctgatttcttgctattattagtggaggtgtcatttgatcttagttttccatagccaggtgaaaagccgtgtagaaaataacacttgtcattgtaatggccatgtttttggcagtgagtgcagtgaggtcttggtcttttatttttagaattttgattggcagcatggttgggattaggtaccgaaagattggtgttggtggcagcagtaatgggagggattaatcgattgctaagtgttctttgtctttcttggcgaataaccatagcaaagaatttgttaaagggtagacaggggtcgattaacgatatttgtttgcgggtatcatgataagtttcattctatcctttgaggaattgtaaactttatcatggttgatgtgatcttgagtttgagctgcagctgcacaagtacagttaattcttggacgaagctgttttatttcgtcccacataactatcaattttatgaaataggcactcactgaatcatcaccttgatagagataggtcaaggcttcatttagctcaaagattcttttggccattaccttgattgaacctattgctaagaacaatccacatctcggcaacaatgtcgagatacattagactgctattaatctcaggtgaaatagagcgaaggatccaagacattgttggaatttatttt

SEQ ID NO: 225813 - DNA, 2269 bp, Cannabis indica
tgaaaagatttaggctacaagggaaggcgtgagtaaaagctttccaaatgaaatgttttatctttggaggtattgtggtcgtccaaactattttccaccatctttggaaagatgtagggttggatgttatgggttttttggaggtcgctttggacttggcaaggtggtaggctgaatttactgagaaaataccagaaggctgctgaccttaaatgaagcagtcttttactgaatggtcaatgggaactttaagtatttcaacaactagatcagaattgaagtattggttgagcttgttggtatcacaacatccgtcctcctcaatgaagtaagagaccttttctggcaaattagaggaaattacgatggaatagggtttgtgcgtagatgggatccaatttggacttgcagtctgaatagagttaccatcaccaatttccaagtgagacctttcagtagcagctctcttccaaaaaggagacttctctaagtgaaggagggattgtgaccttttggtgcttggagaaatttattgtgtttgaaatacttggctttgagcagttgagagaggagtggttgaggatcagtgaagattctccaggcctggtttgcaaggagtgcttgattatggtaattgacaaatctgaaacctatgccaccaatgaatttaaaatcacaaagcttggactaggatttccaatgaactttgctgtggttatttttggaaccccaccagaagttggcaataaggctttcaatttttttgcaagtggacatggggattttaaatcaggacatagcatgggatgggatagcctagaccacagctttaataagggtttctttgccatcccttgaaaaaaaattccattccagttattcattttggcagacacgtttcggaccaagtaatggaaattgttgaattttccactatactggggaacccccaagtacctgctagcaaagttcacattgccaagatctaagtgagagaaaaagagatctttctctctaagagtagtgttgggagagaaaaggatggctaattttgtgaaattcaccaattgaccagtggcccgatggtacatgttgaggatgtccataatgacaaaatagaccctgctattaatcttggtgaagaggagattgtcatcgacaaagagaatgtgggatatcgcatgagcatccctgtagataggtatttcagagtaatccttggaggtttctttaagacgaatagcagcagagaggccttcaactatcagtaggaaaaggtaaggggatagaggatccccttatctgatgcccctagtggagtgaagatgttggtcaaagagacatttaccatgagtttaaaagacatagaggaaatacaattaacaacactggtgacaaaacggggggaacccaaaatgggaaggcatagtctcaatgaatttccattcaacatgatcgatagctttctccttatcaagttttaaagtagcacagccaatttcccactgttttctagtgcaaatgtcattaacaatctaattttctatgaagatgttatcgaagatcaatcggccagtgagaaaagcgctttagttaggacagatggtggaattaagaacttttttaaacctattagcaaggattttggctaccactttgtagagagtagaacagagacttataggtctaaagtctcaaaccttcataacattcttctttttaggagtgagaacaataacagtttcattaatgagagtgatctcggtttcaccattgaggacaggaaaagtagctttacataaattagagtccaatacttgctaatgcttttggtaaaaatgggcgtttaaaccgtcaaaacctagagccttttctccaaacaaatgaaacaaggcatccttcacttccgcagggtcaaaaggggcctcaaggagggcaatttgattttcaaagagctaaaattgacaccccagaaagaatatgggagatcgcctcccaatctacaccttgagaagtgaagagattggaatagaattccatgaaatttttcataatggaagtttggtcagtgacagtagaaccatcatcaagagtgagagttctaatgagattattgcattttctagcagtagctttatgatagaagaacttagtattcttgtcacctattttgagccaatttttctctagagcgttgtttccaaaacacttcctgcttgtacaagagagagtccatggtagcttgaagggttttaacctgctagatagt

SEQ ID NO: 225814 - DNA, 2974 bp, Cannabis indica
tggctatccatgagggataaaacacctcgcaaataaagtcgttgaccaacaacttatccacttcctgtttgagtgccccttgtctctcgaaatccaagggtcttctgtctctttgctgggtagtttggatcaacatttaaatggtggtagataatattaggatcaatccctatcatatctccatggttccaggcgaactgatccgggtttgcccttaaaaacttattagctgctatttcaattgttcatccaggttcttcccaatgtaaacacactttgtgggatttcttgggtctagaataacttcttccaattcttcaattggtttcaacaagtttctttcatcttgaatccgaggatcaagatcttcatccttcttcttgccttcctctatcaaggctgccattagcttgtgaccagctttcatgtgttgcaactctatgtgataacattcgcgaaccagcatccaatcacctcgcactactcccacacccactagtgtctgaaactttaaggataagtgcttgatcgaactaactgcccctagtccgattaatgctggacgacccagcagtatattgtaagccgatggcaggtcgacaactaaaaattcttgcataatcgtggtggacaaaggtgtttcgcccaagttcaatgcgagcttgattattccttgactagcgacactgtcgccagtaaatctgcaaagatttaccatgcaaggtctcaatttaactttttcgagccccatctttttcaatgtttccttgtaaaagatgtttactgaactcccattgtctaccaacacccttttcatcctcttattcgcaagctagatggtgaaatccaatgggtcgatgtgaggacttcacgttcttttcatcttcttttgaaaatataatttgaggctctttagtttttactttcttggaaggttctggagcaaatgcagactgctcgttcttcacttccttctgtacctcttttgggtgttattgctctcccctgcaatatgcggccctcccaagataaccaggatatcctctccttcaacaggaggagattgtaatccttggtttcatgggttgttggagtgattgggctagttatgtccattaccctgtctcttcacatattgcttgaagtggcttcgtgcgatgagactcttgatttcatttttgaattgacaacattcgtctattgtgtgcccaaagtctttgtggtacttacagtatctggttggatctcttttatgcctcacgtgcctcatgggcttaagtttactaaatgcaacattttgctcatacgtgggataaatattttccagagtttcattaagcttggcataattggtgtaaacttgcacgtacttgtcatgcttcttttgtttcttcttgtctttagatgacccctaacactcgtatttcctctttgagccagagacccctgggttatcagctttagccgagatagtacttgttgaaatagtgctgggtttgcttcccgagctagtttttaataagttcatctcttttcgagcttcttcctttcaaacaaacacctgagccttctcgttgaactcgatgatgtttttcactagacgaccctttgtgtcatcccacagttcacctctggcggtggaaagatcagttgtgatccctgcctgaagggcaataagctgggtactatcatccaaatttcttactcttgcagcagtgctaaaacgacttaagtacgccttaagcgtctcgccaggctgttgctttatgttggtgagtgaggacgcttcgagtcgcctgtcccttgcggcctggaactactttttaaggtccttagatagctgttcccaagaagtgatggagtgatgagtaaatttgttgaaccagctgcttgctgctccaactagggaggtgggaaacaaaatacaacgtagattatttgtaacattgctagctcgcattatagtattataaattattcaaatgcgagaccggatcagcggtcccatcacatgacgagacgtggtggtttttaaatccctggggtaaaggagtattcattatctggatggtatggctcgagttcttcatttgagtcatatctagattgttttccttgctccccgactttatacctcctgaacttatcctccaactcatctatttgcaactggattggatccccttgctttggaccgagttgttggcaaagatcaggccttttctcgttcaagcgttctcacagatctggttggttataattgatggcggacctctttctactcacagactgtgtcctgcttgtggaccttgtcctgctcatggaccttgtccttgagttacttgtagtcttactcgtgcttgtgctttctcgatcattattgcgacgagtactttctgctccttacgttgatcgattgtgggttcttgtgcaccccaaggtaacactcgccttttcatgccccgttcttctcccttgggtgtggtttgccgtatttacccgactggggtttgtatgagccccttccctatgggtttgggaagaacattggcggttcctcgctggtgacctacgtgttccaggttgtgtcccatgatttccctcgttcccacgaggaatttgctgttccttggcttctagtcgcctcctattctcatttctatgagatggtttcggttgatcatttggttattcatttttcagggggaacctcagcttccccaggttgctcgttttcagggggaaccttagcttccccaggtttttcttcctgagcgttctaagggttctcttgagctgtctcctgtctcctggttcgtgagtcgcgaggtctacctcatggtcttctcaatccagggtcaggttgatttatggtattatttgttggattttatgccctaaataaaactcatttcaatataatcagatttacttattaataatgattagaaataacatttaatgttgcatggtt

SEQ ID NO: 225815 - DNA, 3202 bp, Cannabis indica
ccaaacatcaaattatcctttggttggcgattttggaacgttaacaaataaaatataaactattttcattttaaaatctatatgaatcaggtatgtctaatacgtggatgttacactgaatcaattgaacatatattttttgaatgtctttatagcaagagatgtctccaatttatcaaagattagatgggatgggacactaaggtaactaacctgaatttgttgttgatatggttgaagcaaaactggcattctcctttcaagaagcatatatttactctagtattggcaacgatagtttatcatgtttggaggtgccaaaacttggctttttgggaagcgaaagtttccattttaaattctaccatatatagaatacaacatgatgttaagaatagaatgtgtataatctggcctaaaaaaatgaaaagaaaggatatagtttggcgggagtctttataaaagatttatagtttttgtattgtttttattatttcatgcctttaattggtgctgatagattgtatgtgtgtttgttttggtgaaatatagtcttactgttgatttaggaaaaacgaaaaaaaaccacataaaagtaagagacaaataaaattaaaacaatataaaaataaaatataaataacaaaaaatcaacaacaaaataacaagagtacaatataaaaataacatgcacatcgaaagatcgtacttctgtaaataaaatatttaaaattttgtacaaccgtatttttataattcttttgttattttcgtgtatttctgaaattatcccttattatttatggaggtgtactaattacaaattcatattacaatatttttaaatctctgagtttaaaaatacgtgtcaaaatatttttttttctaatttttatttctatagtagtattcgttatagttagtacattatttctgtaaagttttaaatttttttaaataatttaccatgttaaaaatagatttgaagttttttgaacacaacgaaaataaaaatataagaccattgattttttatccatatcaaaattcccatactttcactcttggtaaccatttatcttttatactattttttctaaaagaaaaccatatttttataaactttgccaataaaaaaaattcttatataaacatatgagctttatatatatatagattattttttaatgggtattacctatgaatagttactaaaaaaatttaactgtaaatattaattttaaaaatattaaaccatcaaattttgatctaataacaaataataaaagagaaatttaaatttctatgctcaatttaactacttaattaaaaaaatataaaaaaatatctctttttatactatatcaaaaatatgtttatataaaaatatttaagtgaaaactcaacttttatttatttatttgctaaaaccttttttttattatttttttttcaacctatgggacaatctcagcccatattatgtaaaagtgagagatttttctaattagataaaaaattaaggtggcgtttggtaacacttttttaatcagttttctatttttaaaagtggaaaagtgaaaatatttttcaaaaacatgttctataaaactgtttttacttttcaattttataattagaaatcaatttttttttaaaaaaaaaaaaaaatcactttcaatatttttttaaacagtttttttttaatcaatcttttggattacaaccagacccggacccgaatcccctcctcacgaccttggcgctgaacccggcttctgacccgaacccaaatccaaccccgaatcttgacccgacttaataaaatcaaaaaataaaaatgaaaataaactttacagaacacacttttgttttctgtttttaaaattgaaaaacaaaagtggttagagaacgcatttttgttttttaaaaataaattttttaaaaacaaaaattttactttcattttgtgattaaaaaattaaaaagcaaaagtgttaccaaacggcacctaagcataaaaactcaattttttataattttacccattcatgggtaatacccattaagaatatccataaatatatatatatatatatatatttaattttaacgataactgagggagaaactatgaaaaaattatactttttcttattatttgtttattattggagttaaagtactcaataattggaaagttgtaacacaaagtattagaaaagatagtagtggtacaataaaatttgattaacaaagctattattgttaccaagttttttttttatataaaacttcgtgaaaaaaaataaaaattgaaactcactaattactcaactagtaattgaaacaatattgaagcttttaaaaactcaaccagctaaagtcttgtcaagatatataatttgttaaacttaaaagataatatgcatgttggaacttttacatgtgaaattgttaaaaattaagaaaagtgtaaagtttgattaaagtggccttatggaaatattagtcccacatgtaaaaggaagatgttgttagaggtgtatattctctctaaattaaggatgtactaactaatatggttgaagaataattatacactatctcttctataacttagagcaagcaacatttaaaaaagcagctaaacaaaacaaaacatgactcgtataaagctccattgaaattagacctaatcttcacatcatataaaactgtatgagtttatttatttatttatttctataaataaactgtgttttagaggattaatagtgctttttcttacaaatatcttagttaaatgattaagtaagggtgtgtttgctaaccgtttattaattaattttttatttttttaattaaaaaaatgaaaatatttcttaaaaatatgttctataaaactgttttcatcattttttaattaaaaattattaaaaatttaaaaacaaaaatttacttttaaaattttttaaactagtttttttaatcaatattttggatttcgaccccaatcttgaccatgggacccagactacggcctcaaccccagtctcggatccggaccacggccctagcactaggcccgaataaaatcaaatatataaaaataaaaataaaaattatagaacacacttttgttatatgtttttcaaattaaaaaataaaagtggttataaaaacacaaattttactttca

SEQ ID NO: 225816 - DNA, 5666 bp, Cannabis indica
tgtcaacttgggtgttgggtgctaaaaaatctacagtaaaaaagccatacttccctcaatattgatttaattgacatgattcaacttgcatttagaagctatttcaaaaactgatcaagtcgtgtatcgcacccatatcactatttgttaacctagaaacttaacctggtgatgtggacatcaatgtttgactcgtagcatgaaggatgacatcattaagtttagtagacccgagtcatagcattcaacttgggaggggaccctagccctacgcccagattgactctaggatctccaagatcgaagttacactatcttttagtattttttaccatgatgacgtgaagcaacctaatacaaggtccaagagctaaaattacacaaacctgaaacccgaaagccaacatgggcacctagggtttccaatcagcgcccagtttgacatcctcaactagagttttagttttcgggactgtcctagtgacaagtggctaaaataggacataactagacataccacatacatatttgaggcattagaataaaattcgaatcaacttgaggttgacaatctatctatctaggcaccttccaagtgtctgatcaaagatttgacttttgtattgaatctagcttcatcaaaactgggaaataggtccttccaaaggaaaaataacaaattctgggcataaataatagggccaagcgcccaggttgacaattttctaacctaggccacaaaaaatggagtttttcaggaattctttcgagcatcatttctatcttcataaaatattaagaatcaactatttttggggactcaacaaaacattcaaaggggcagaagaggaacctagtgcccaggttgacactgggagctgggccctgcgcccatgtttacattttgtcaacttgggttgtttccaattcagttcaacaaaaagttctcaaagaaatttcagtgtcataaaaaataacaaagattcaagtaaacttaaggagaaaaccacaaactcgagtccttggaaacagggctagtgcccatgttaacaatcaacctaggacactgcatcaattactcaaactctaaatcgaatgcgatcattgaattcatcatggtaaaaaatgggcaagaagaccctcttcaagtttagatgccttggaagtatcaaaaatagaatatcaaaagctcagtttaaaggcctcaaagcctagctcaacaaatggcctagttcgttgggttctgcttatccgaatcttatgccgtttcgattgcccgtcaagtttttcacaagtgcaatgatccattaagttagatcaatcaaatttgcaccttcaaatttggctctcggtaatgaagagttttgtgtcttccatttcaataaaatagcaacatctccgaaaattggtgaccaactttgccagaacctataaaaggactaagggtgtcaaaccatcactaaggaatatcaaaggacttcccttggatgtctctacacttgaaagcatctaggttgatgtcaaatgtcaacctgggcgctagaatgtgaatgtaggcactggatgtcaacctgggcattggatgtcaacttgggtgttgggacttgaactaccttcattaaaacaaccataactcgctcaattttttatctcattgatgcgatacaaattgcttttgaagatatttaagcactatcaactcatttctcaaactccagtcaaaattttgaagtcatcatcatcaaaattcaccccaagagagttacgaaaataagctctgggtaaatcatagggaacccggtgggcatcaaaaattagccatcaccacgagaagctaatttttaccattagatcatcatcaatgatggaaaacactttatttgtttgttttctggtatttttatgggcttccttcacctataaaggagagctcccttagctgatttttcacatttagaaaactacccataaggttagagcttctctctctagaattcaaagcttcagatacttaaacacttgctgtaattatcatctcgtgagaaatagaaacttgaggtagatgtagcttcattactatcgcgatataggggtgaactactataaattgatgtgtctctcattaattacttaacaaacatttcaatctcaccaatctagcgagcgggggtggcttagaggtctagtatagattgttgagtcaacattttgatgctttcattgagattcacagctcaagaaagtcattaatcaagatggcttcaaaaatttgtacaagggttgacagaaaaactccaacagttggccaaacaactaggggcacgccagttgatagaattggagctaagattatttctgcaccccaggcgctaggaggaggcctcggaactagctcttcaacgcgtcctccaaggccaccaccactagctcccgagactggcaccaatgaatagatcccacctagggagccgcacatggagatagaagacccttaggagaccaatcctcaagtagctcacaataagcaacatgaatggtttcaacagtagtatgtggaaaactagaagaacatcgaaagccaacgcattgagaaagaacagcagagaggtaacctatcttattggattagagaagcttatcgctcgaatttcaaaaatacttcccatagaggtatttttgagttggtgagagagacaacccgacgaccagatggtcacgtgggaactagtgtctaaggcaaaaccctgaatgcttagaacatcactactacacttggtaacctaataggccctaggcagacaccaggagtggagacctcccagagagaaagtaccttcaattaagaggcatattggacttatgctcgagggtggcaaccaatggaccaggccttgagaccctacaaggggaaagggacctgctattcaacctaaaagaagtagtaggagacactactttgaaatcaaaagctacaaaatctggcaagtaaggaccaatgagccacttcatactcgaaagtacttttgagataaaagatgggagttgtgactttacttcgccagtggccccaatggccaacattatgattacttccctctagtatatggagaggaattaaacttgagcgaccaattcaattctctttgcacttgtgatcctactgaagactactttgagggaagtagtcactacaatagtctggttgaacaatctcatagtaggtaatcccgagatgatcttaagttcattctgggggcttttccagagtctccttcatgacctcgtggtcaagagacaactatacgacccaggtcaaccggagtacaagaatgacctagaagacaaagagaaacctacgtgatcacttaaacaataaaagaaaagtggatgtgggaacttctatagaagaccctatccgagtaatagaagatccatctaggatgcagaccaccattcacagggtcaatcggctagagtttggaaccttagcttctttagtgaaggggatcacgacacctaagttttctaaattcgagctcaatagagatgatgctcaccactctccgaatgaatcaaagctcttcccattcctccaaaattcaagaaccctttttggcatcaatacacaaggaaaaaagatccactatctcacatccactagtttgaagtgcagaccgatctacaaggtgtgaaagatgacgtcaggtgtagaattttccatgctacactaacaggcctagcacaatggtggtaccttaagctatcccttggatagatcgactcatggaaagatctagtggatgtttttggtaaccagtttgctccttcccgaaaatgccaaatcgagcccaaagatctgttgggtgttaagcaatagaaaaatgagcccgacaaggactacatacaacggttcttagaggtagctactaaagaccaaaaactcttaccgaggacgcaagggttgtggcactcataattgggatcaaggagatgagtcctctattgtccaactttcgtcttaaaggcggtgtacaccatgaatgacttcttagatagagtagatggcttcatcaaaacttaaaaaagttgtccacccgagctaagggctcaaagggtgggaagaagaagttgccagacactgaagcccctactattgaggcacaaggcaatgggaaaaaatggaggttcgaaaggagtaaagagagccaaaaaatggtggcaagcaaggtaactcccccaaaggaaagaagcctaaaactagggagaagcccttaagagattatgagcctcacttcaccacctactcaattctcttagctctaagagatgagatatatacacacacttagtcaacagtgtcgtattgcaaacctcttcgtttcaaagagtcagagaaaagggacatgaataaattttatcattaccacaacacttatagtcatgatacaaatgagagtaatagttgttggacgagatataatttctcatcaaatagaaacatgttgctctttagcggtatgtacgacctaaagctctagctagggggaatgctccactccagcctgcacctattaccagtaggttagagattgtgattggaggcgctcccttatctaggaattcaaggaaggccttagaaaggtatgcaagagcaatttgacatgaaccaagagccaaagtcctagaggtagcagtatgtcctccaaagtctcaatgttacagatgtgaaccaatcacctttagagaatttaactcttatcatgttagccaccctcacaacaatcctttagtttttgaggtcaaaatagctaatatgatggtgtttagggtaatgatcaatgatgaagcatcatcaaacatcctattcaagcaagccctgctcatgatgggcttaactttagaagacttggaaccatgcgaacaactaacgtatggttttagcggagctgacattcctccatgtagcaagatcaagctggaacttatagtcagcactgccccaaggcagacacccatcacggccacatttatagaggtgcatgtgaagtctccgttaaacgtgatgcttggaaggcctacccattatgacctttgagtcatctcctcagaataccacttgtccgtcaagttcctaacaacgagtggtatcgaatgtctcgaaaatcaaggaactgcctgcgagtgttacaacgcatcgttgtcactcgccaagaagacctcatctgctgctatgacttcagaggggatgaacaagacctcttttactgttataataccaaggggatgagtgttggaacttgttttaccaagatctagattaacatgtatgtttgattatattcaataatctcatatcctaatcatgaatgtcctaacacaatgaattaacacacatataaagttctagaaaatgttacattagtggtagaagaatattaaggctccttccattcagatctataacccttgttcctttctaccgtagagtattaacaagatctgaacctagatcttctcaggtaatggaattcttcacaatcctccacactatgattgagtattggcttgatatgtctgggcaaggtactcttcactatagggtactttgaaatttagaagagagaatagagagagaattcaaaatcaatagagaggctctttttcag

SEQ ID NO: 225817 - DNA, 4215 bp, Cannabis indica
aattttcattacaaatataatattcagtattattgtaactagggctgaacatcgcgtgggttgatcgagttttaggtctgcgggtttcgagttcgcaaattttgggtcaaaaaataggctcggacccagacccgagataaggtcgggttggcgagttggcaggtcacaggttggcgggtcacgggttaactgggttgacttgatctggtcaactcttaaaaaaaatcaaattttatatggtcaaatggttatttcttttggtatatttatttattaaattaaacatatataatataacaccttattctttggattaaaagaaaaaaagaagaattaatttaaatcttaaattaaaatacaaaaattaatccaaccaacaaacaacatgttcatcaaacttcatgttcatgaatcatgatagtaaaagtaaaaactaaaatatttcaaagtccatagtccataaaaatccaaagttcgtagtctatatagtccatagttcaccgggttgatgggcgagttcgggtccaacccgaaactcggtgaccatgaaaacctaacctgcgaacccgcccagtggagtaccgagttggacccgactcgcctaaacaatttttttattttattttgtgggttgaccgggtcgggtccgagtgggttaaacgggtccgggtcaaactcactcaaaatgttcagacctaattgtaacactctactaatttagatacgctacagtgatttattttaattacaatgtactcatttcctaattaaagggtttattgaaaaacatgattaattaaaaaaattcgtaacttaaataaacttataataaataaatataaaattatacaattctgggatcccatttttgttttacaattaattttcaaaatgttacatataacattgtcgcctactgactatcaaaatatgagcccaactgtcccaaaaatctgaacactccaggtctaacagcctcaataagtacaatcttcatctagttctagactcactgctgctcaacatttgccttgaccttacctacgcatgtaaacatatctatgagtcgacagactcaataagaaaaatataaaatatataatcatataatttgtatcataactcaagcacccatacacctagttacaagtttgacgagcgtccaacgcgtataatgagtctcgaatgttcttgatgataacacgtcctctgtaccacatgcactaagtatctttctaatacaagtgttggtatagtttgttcatactataagtacacttgatcatttataccacatgcaatctgtactctttaagtaccagtgttggtaacgctatgtcataccccttaatattatactgtaccacacactccgtacctcaaccttactagtgttggtagtatataattcatataatctaacatgtatatcatatgcacatatgtatatttttatactaatcttacctcgtttacaaattcaggtgtgttggtcaacctaagtagaaatatttcccgttgaacggaggccctatctcacatttacacaaaataggtaagtgttactgtaaacacttttgaggacttaaattcaaaactagaagttttcctatcgataaatagcgtagaaataccctatatattgaaaagaaaatgaaaattggggttgcaaaaatcactccgaccggtgaaccattttttgggattctacctgggaaagtagtccccgtttctagaaaaacggtagactgtttttctgtaaaaatcccaaaaacctaatttcaagctcaattttatcccaactcaaatgtaactctctagaacacctaattacaacatgtagaacataattcaagcatacctagcaactaaaactcaaagaatggaaaaacagcactgtttgagccaagtttgagttcatgaactcaaacttgctcaactctcaaatcaaccatcaaaaactaacccaataagctgtaaatagttccaaattaccccagaaagcaatccataaacaccctaggtttgatcagattctatttctaaaaaatttcatgttcaagctaacaccctttcttccgaaaacaaagagaaagatggtctagggcttacctctggcttctctatccaatttctccttcaaactttgttgaaaaccttgagaaattgttgagtttcaggtctggttctataggtgtcaagagagaaagagagtctttaggatagagagagtcaaatttctaattaataaaaatgagataatttcattttcccttttgctttattccctcaataatttagctaggataattactaaataaaacaactaattcccacttaaaggataatagcaatattagagcaaatttaccattttccccttacttacaccttaagtaatctaaaggcttaggagtaaaatggtaaaaaactacaaccccacctaaacctgttattctaaatatatatcaataatacttgccccgctaaataaaagattctataccaaacccatgtgactctattgaacaaatcgtcgcatttctaccgatactgagcttaaaacacaaaatgtcaaatttcatccttatcatatttaatacatgtagagtttaataaaatctttgaaattgagaaattataactcaaatgtctatttcttgaaaataggacccacatcatatgatataattaattaattagtgctaactgtccacttattcatattctaattatgcggtcatcaaaattatcccctgtttaaaaggattttgttctcaaaatcttacctgaataactctatatactaagtcctcatgtcggactctaattctcaggtggcttcctccaccttactattcctccaaagtactttgaccaacgttatggtcttattttgaagaactttatccttcctatcaaagatttgaactggttgttcttcataggataagactgaatgtaactctagggcttcataacgtaagacacgagtcggatcagatacgtacttcctcatcatcgatacatgaaaaatattgtgtaaactgataaagtaggtggtaaggctagccaatatgctacatgttcgaccttctcgagtattttaaatggccctaagaaccttaggctcagcttgcccttccttctggagtgcctaacacccttcattggtgaaactcgtaggaaaacatgttctcctacctgaaactctatgtatttgtgcttaggatcagtgtaacttttctgcctgctttgtgaagcaagcatccgtgccttaatcttttctattgcctcattggcccgctgaactaactctggaccaaaatactttcttttctcggtttcatcccagtgcattggggaatgacacttcctaccataaagcatctcatagggagccatccttattgtactttgatagctgttgttgtaggaaaattctatcaaagaaaaatatttactccacaaaccctcaaagtccatcacacaggctcataacatgtcttacagtatctgaatcgtcctctcggactggccatctatctgaggctggaatgttgtagtgaattttaacttcgtgccaatggccctttggagactttcccaaaacttagaggtaaacttcggatctctatctaaaataatggattttggagcttcgtggagacaaactatctccttcatatataactccacatattgatccaacataaatgttatctttaccgatagaaagtgtgctgattttgtgaaataatccaatataacccagactgaattatacattctcgtggtcctaggcaaaccaaccacgaaatccatagtaacgtcctcccatttccattaagtgtcaaaggttgtataataaccctaaaggtttttaatgctcaactttgatttgttaacataccgtaccaccaataataaggttccaaatcccgatacatcttggtggtaccagggtgcaaagagtatggtgttgtgtgagcttcatccataatctcttttctaagctcaaagttgttcagaacacacaactgagtcttgtaaagtaacatcccactatttgagactgagaagtctttagcttgaccaactaacacttcctcccgaaacttgattaactcagaaccttcctgttgcatacatctgattctttctaataaatcgggctgaagagtcaaattattaagttttccaaccataaactca

SEQ ID NO: 225818 - DNA, 3242 bp, Cannabis indica
ggctgcagcttccaccatcctctagataaaaggcctttaggatttttcatttactgctgcataatattggtgagagagccaacttccatgtccagatcgcatacggcaatgaactacttgtagaaggctgactgtaaatctttctagctatggatcgatctgggagctaggtgcttccactagtctttggcagacttggtcaatgtcagggagaaacacaagcacttggcatcatctctcacacgtgccactttaatcatattgtcgtattttgccaagtgggtttgcaaatttgtcattccttcatataattcgatgtgtggcattttgaagttttctgggagcggggtctccatgatcctcctaacgcaaggttctgagtcctcatcttcagaatctaagaaggccccacttttctttctgatgagcttggttagagcagctatctgctcctctaacctctttgcgtcactatctcgaagatcacgtcctcgcattttgtttttcaggtcaccttcatgttgcatcgctttttcacctttgtaattttcatacttggtgtccaatcattgacaaggtctatggtggactagctatctctagagtgcaccttagtcatccctccgtcctggctgatagaatcactaaggcagtttttccatcccattgggcctaggcacctttttaccctgccctcttggcgcagttttgcctctgggagtagaaggttgtctaggctagaaagcattggtggccttttgtgtcgtagagggctggccgaccagattagcacacttctgacgatgtttaggagcagcctcttgtccgggttctcctaccttacctttccctttatcccaatggggattcgaggttctggcttcagttttctcaggagcacactcttcagccacaaattcaaccgaggttcctttatcagaatctgctaggtctccaatttgcttcgtaggtaaccatcatcttctccatttttccagtcagttttttcttatttagccaactttacatgagtagtcaataactctttggacactcaaagtaggtttaggtcatggtcataataataacaatccttgtaatacccatctttcacatactcctcgctgtcatcctcctctttcctaccttcagggcttggttcatcgtcgatgccatcgcgcaagtcatcaacattttctgctcagtttacaacattaacaatatcttcttctcttgcaccgtctcattggaaatcgggagcaaggcggtccatttcctccataatagtatcttcaaaagctttctagcctaatttttttctgagtgaacaccatttttgaggtggtacgacggctacaaggctttattaaactctcaatgaaagcaccaaaatatttactgagattttcataaactaaataaatagaggttcagaaatatataaaacaataaaaaagtaggcaagagatttttacatggttcgggcgttaatattccctagtccatgagttagttgtattgccccttaggaaagtattttgataatacagtatgtctttacagtataaaccctagccccgcactcctttgtttctcttgaaaaagaagaaagcttttagtaattttcgtagaggttcagctagtagagattttgttcatcctttgtacataaaaattagtggtatttattggtttaagtgtggataagggtattccctttacctacctaaggttttgtacaacattccattgcaagggcaggaaaataccatttcaaatctgactgttcggccttgaagaatcttcttgatcatgtggtgtgcagggatggtgagtagtaccatctggatcagggacacgtgtcgcccaaaggtttctcctttataaattatcctggaaacgagccgtaaggaaaaaaagtctgtcgagaggtacgtacgcacactaccttggcctagcacgtgggacaagatctgattttgtgtcaaaaaaggcgtaactgtctgtaggtcgatttccatgtaaatctgaggtggccatttgcattcgcgtaagagtcaccatctacattcgcgtaggagtcaccaccagcaatcagttcaaatagtccttatccgtatgtcaagtagtcaaactgttgttctatgacttcttggagtttagggacaagtatgacccttctccgtggcaaagacactaagtgggccataactctttttgtcaagctttcattaggcgctttttcaaattaatgggacatctgtacgaggaattgtgatggtcatcattcttaatccaagaggttatcaaatctttgtctctagatgtgccccatgtctccttaaaaacacacatgacacctacgggtacaaagccatgatactcgtagagctcacaccttcatcatcccatcgtagacttacatatgaccagtaaaccaatcatcggttattggctaaatccctagattgaattgaattgatcagagaaggatttgagcttagaaaggcgacatatgagtaaagggtcacaaaacactacatctccaaggttcaagataggaagtttaagcctggatacatggtgttacaaccgatattgctggatacaaaagacgcaacagtaggagtactggggcctaattgggaaggactatatgtcaaaattgaagcacttaaaccccaaacttacaagttggcacgctatgactacaacttgaatctagtgctggtacgaaggtattagaatggggcaaatctacggtagtattactaataaaagttgttgtcctcaaaacaactcacttcacaatgagattcaccttactacgtgtaagtgaatcgatctccacttaacttgtaggatgcaacagagttgtccctaggttaagaggtccatcgctaaggtatgactcctatgctaaaagtcgaataggcattagcatagtgagcatcacttcagctaagcttgaatgaagaagaaattctacagctactacatcaaagtgtattcttttttctttcaacttagttcgcagtaatgtaattgtacttaatttaattagaaaaagcataagtaaagtttttattggtacttcatttaagttaatcatttataggtcacagacctaacgacgctctctaagcgctgagtaaagcttgtgagttggtctttagataacttcggttgtttctgaagtgagttaaacactggtactaggaatcctcagataagtggagagt

SEQ ID NO: 225819 - DNA, 4059 bp, Cannabis indica
taaggattgatgaatttataaaccaaataaacaaataaatgatcacatgaaccaaataacacattaaataagtaatgaaaataaatttttttctttattgataattgaatagaaaagattacattgaaatagagttttatttagggcacaaagcctaataatattaataggtcaacttaaggacttctcaatctcgaataatagaatgttactttacaaggctcaggtttgtgttctgagcagtgatgagatcagaaaggaaatacttgttgaggctcatactacaccttattcattgcatatgggactcaccaaaatgtatcaggacttaaaaccctatttttggtggtgtggaatgaagaaaggcgtagtttaatacgtatcaaagtgcctaacttgtcaatagatcaaagcaaatcatcagaaatcggcagggttattacaaccattaacacttcctgagtggagtgagaagatattactatgaaacttttggttggtttacctagaaccatgggaatgtattagtatgggtcacaatggaccgtttgagaaagtcatcacactttttgccaatgaaaagaacttataccgtggattagtatgtgaagctatatgcaaaagagatagtgcattttcatggggctccgaaatccatcgtttcaaacagagatcaaaaatttacatcaaaattcgggtgagtcttgggaaagctatgggtacgaaccccttagactgatggaaagtttcagaggacaatacggatattaaaagatttactgtgagcctgtattatggactttgagggttcatggagcaaatacttgcctttgatagagttttcctacaccaatagctatcagactacaatagggatatctccctatgaaaagttgtacagtaggaaatattgttcctgattcactgagatgagactggggaaagaaagtagttgggtcttgagttagttcagtggaccaatgaagtaatagggaagattaaggcttggatgcttgctttacaaaaaaggcaaaaaagttatttagatccttagtagagagatattgaattttaggtaggagaccatattttcctacaaatttcaccaatgataggtttaaggcgctttggaaagaaggaaaagttgagccctaggttcatagggctattcgagatacttgagaaggtcgggcaggtagcgtatcggctaaccttaccaccagcgttatcagcggtacataatgtatttcatatttcaatgctgaggcaatatgtgtcaaacccgagtcatgtctttagttacacagccctagaactacaatcagatctatcatttgagtagcagccaattcaaatcctcgataggaaaaaagtttctttggaacaagaccatagctttggtcaaagtactttagaggaatagcgaggtggaggaagccacctaggaattagagtccagcaggaggactcaatatctagagttattcaggttagatttcgatgacaaaatccttttaacgggagataactgtaatgactgcatgattagattatggatattagtaaaggtaattagcattaattattgatattttatgattatacatgattttatatttattgtgggttccattttcataaatgggcattagagttgtaatttctcaattctggaaattttattaaactctaagcatattatatgtatcatatgcaaaatttatagtttttataatttttgctcggtgacgttggaaaatacaacgggtggtcgtttagtcacatgggttagcttagaaactttttatttagcagggtattcatatgttgatatttcgtaaatcaaagttaggtggggatatagtttttgaccattttaccatttaagcttttaagtgagggcatttggatattttaattaggggtttaggtggctcatttattagttgacagctggccactaagtgttacttcagcctaatctagttattgattaattatattaatcaattagaagaaaaaaagaaagaaaactaaaatttttcttctcttccctcacctttttcgaacccagcagaaccaacagcagcttggaattttttttgagtgatattgaggagttctaactaaaatcaagtagagtaatccaaggtaagagccctagaacttacttccttaagttttgttgattttcttttagttttgaacatgcaattgtaaaatttgttgtttttagaattagggtttgttcttgattgctttttgctgtttagtcaagttgttttaagctggattcttatggttttgaatgattaatcttgtgttgagcaaatttgagttcaagaactcaaacttagtccattaatggtggattgtgtatttttttttttttgtaatacttcgttttaccacttggaaatagttcattatgttgttattaggtattttggagcttaaattcatgtttgggttggttttaggacaaattggaggttctttatttttctgcagtgaaaaacggcagaccatttctacaaaaatggactaccatttttattgggaaagactcggaaaaatggcttgccattttcacaaaacagtctactattttccaggcagtttctccatttagttgattttctcatgcttcctcgatatttaggatttttccatgctaattatcgataggaaaatttttacttttgtgtttagatccccgaaaaggtttagaaagttgtttacccattttacgtgattgtgacatggggcctccgttcagtgcgtgattttccattcaggttatattttatatgctaccaacactagtacggtatatgtatatgtgtatgtattttatatgcattctattatatgattcatatgctaccaacactagtacggtagaggtattatgtgcatgtgctacagcttatgatgtttaatagtataatccaatgttaccaacattagtatagttgggtacgtagtacatgtggtacaacacttagtggtacttggagtacagttcaaccctaccaacactattacagtagcagtacatagagcatgtggtacagaggtcatacctttattgagaacgttcttaatcatctattaagccttgtggataggtgtatgggtgcctaaatacaagtcagtagtatattatatgttatatgttcttcttactgagtgtcgactcatagttattacttgcatgtgtaggttaaggaaaggctaaagatgagcagcaatgagtccagagctcagggatgattgtacatgtttggacgaaacaacctgcagagtttgatctcgggacgacttgggcttctttttgtattcaatgtgcaacatgtttataaagttcattttggttgtataaatatgttaaaaaatgggatcctgattcttttataaaagtttatatataattataaatataacagtataatgttttcaaatgtttaaatttatcatgattttcgatacaacattttgattagcaaaggtttggaccgtagcgtgcctaatcattaggacgttacagagatagtgtaagataatgaataaatcctataagttgacagtatgaagaaggattgtctagcaatctccttgttgatcatctaactttgtgtgaggatccattggtgctttggctagtttgttgccagtgtaactcgtatgtttgagaaatgtcgggtatattttcattgtgaaagaaatagactgtctttggcatgttctatttcaaagaacgatccattcatcatggctagcccaataatagagattttttacatttgtaatctggttaatgctaaatgatttattgttttaatcgacaccagaaagaaaattcttagaaaatgtgttaaactcattgtgttaacataacaaacagtgaacgtagttattatataaatatataagtagataaatatatataaatttgagacagaaacaaaagcataaagagcttataaagctttcatagctcagttggttagagcacccgtttagtaagcgggaggtcttgagttcaactctcaatga

SEQ ID NO: 225820 - DNA, 1927 bp, Cannabis indica
aaaaaataaacattgggattatgccacttacaaacttgaaactttgggaacttatgccactatttatcctaatataaattatatatacatgttaaccatctttattacatcacattgcctaatcaagcaagttgatgctttagtctgataatcttgtattgcattgcctaatcaggcaagcatgtgccatagcatggcaccatatatcgcacaattgcatcacctaatcaggtgagccatgccaaaaacttgcacccacatatcatataattgcaccacctaatcaggtgagcccatgccataacgtggcaccaatatattgcattgcctaatcagacttgcctatacctacgcccggtacttatcatatgtcactgatgctcgtatctacacgtcgatagggcgataccctttaatggttttgttctatgccataagctagcaatttccatatcactggcgttgtatctacacgttgccaggaggaaaccctacaatgctttcattctatgccataacctggaaattttcatatcactgacgctgtatctacacatcgtcaggaggaaaccctaccacaatttcattctatgacataacatagaaattttcatatcactgacgcctatgtctacacgtcgcgaggagtatcacatcatctaatcaagtaagcctgtacttacgctcggtactcatatgtcactgacactcgtacctacgcccagtacgccgctaggagtatcacatcacctaatcaggtgagcctgtacctacgctcggtactcatatgtcactgacgcccatacctatgcctggtacgtcgccaagagtatcgcatcacctaattaggtgagcttgtatatcacattcatattatcattacattaccattgcttaaccaatcaatcattttactatataacaatgttaactatatctcaatctcaatattaatcaattcataacactattacttgtattacaacataatgtattatgcagtgcaatatacttttcttacctcaagtttcgattcaggtatgttggccgaccaacttggagtacaatcgatgatcccgggccctatgtcataacaataataaactaataagtatttatctcaaaacattgcttaaaagttgcaaaagacaacctaaggtttcctaccaaatctcgtagtttaaatacactaaaataaaatttatattttggctctaaaatatataccatatgatagggcttgtcgcaagcttcaaaatggtatatagaacatccaaaacagacacccgagtaaaaagttatgataaaaatacgattctagatctcactagaatttccagaaatggcaggttatttttgggtacgaaaatctcaaatttcgcactcaccgaaacaacctcgaaacctatccaaatcattccaaacttcatagtacacatatataccatatatacaacaatccttacataacaaaaattaaaatcgagcccttaaacgaaaaactccattaaagctcgaacctaagctttaaaaagttccaaactcgatttctaactcaaaatcatctcaaactcaacaagtaaacaacgaaactagtcccatgactacccgagaacaattctataaggtcagaaccttcataaatattcaaattcaaaaaactcctttacaaatctaattatttttagcttaaagcgtaattaagccataccttaagctttctcgctttaagaatttactatcctgctactaccggagcttagatcgctaggttttggactaaaaatcaaagaaaatagatataggagggagaggctttagtcgaaaagagaagatgaggattcgttcatttgtttactgatataacttgttatacccgaaattcggctggaggacacgtgtcaagataaagagaatgtgaatcggt

SEQ ID NO: 225821 - DNA, 3101 bp, Cannabis indica
aaaagctagtaaaaggtatatggagaatttatctagaaaactggggttctcaaatattgtaagtgtaggtgcggttggtatggcagggggctcatgtttgatgtggaacaaaaatttgaatttggtagtaaattattgtgctgaaggcttcttcgatactactgtatgggatttccaaaatcagattcattggaaattttatgcggtatatggtactccttattcgaatgtaaaggaagttttttggaaaagtatggaaatggaattcttgaattgccattatccatggatgttgattggggacttgaattgcttttatagtcaagaggaaaaggtgggaggctgtagagtctcggatgtggataccaaatggctaaaaagctttatggatactacgggtggaattgatctacaattcataggtaacaagtatacatggcagaacaaccgtttttcgggtggactaatcagagaaaggcttgatagagctttatgctctccggaatggctactggaatatccttctgctggtattagaaatttacctattgctatttcagaccacgctcccatcattttcgactcccatctgtttgctgcaaaggggttcatcccgtttcggttctttgaagcatggtcttgggaaaattcttgcaagaaggaaattgttaaagcctggtcctctcgtggagattgtgccactgtggcgttcattcagaatatcaataattctaagaaggccttactagcctggaaaaagacctacaaaggagtccatgaaggaaaaattaaagatttggaaagaagactagaatggatccagcaacaacctcggccagatgacttcagaaacgaagaagtgagtatccaatcgcaattgacagccgcttggacaaagctcgaaagtatgtggagacaaagatcgagggagacttggttagcattgggagatcgtaacaccagatatttccatgctgctacggttataaggaaaagaaggaacaatatttgggctttgaaagataaaaatggcaaagtatggaaggacagaagacatataacagatgttataaatgcatatttcctggatctcttcacttcgtcggatccgtgtatagaagaggactttgatgagctttttgtaaagaagatcgatgataacacaaatgcaacctttgttaagactcctacggagattgagatcaaggaggttgtatttgaactttaaaggctccgggaccagacggtttttcaggatgtttcttcagaaaatactgggatgtagttggatcaaatttggttgagacggttaaagaattcttcatcagcggcattctgaatccgaaactcaacaacactttcatttgtctcattccaaaagtggattttccgttgagtatggatcagtttagaccaataagtctctgcaacttctcatacaaggttattgcgaagatcttatctaatagactgaggcctctcatgaacgatttggtatcccctctccaatcggccttcattccgggcaggtggattggagaatcctctattcttacccaggagattatccataagattcgtcataaacaggggattggaggtcttatggcggtgaagctggatatgcacaaggcatacgataaaatggaatggtgtttcctagagagagtcttgggtgcaatcggctttgatactaaatgcagacagctcctgatggcttgtgtcaccagcgtatcttattctgttcttttgaatggaagccccatcaaaaagataactccgcagagaggattacgtcaaggagatcctatctctccttttctgtttctcctatgccaggaaaccctctcaaaactcatagggcgtgcggaagatagaggtgtaattcatggcattaaaattgcacactcagcccccccccccccgtctcccacttgatgtttgctgatgatactatcctttttgcccgagcaaatgaaaaatgaagcaaaggcactccttgagtgcttatcaacttatgagaaatggtcggggcaatcatgtagcaaggctaagtcgagtattctcttctcaaagaatttgtgcagcagaagacaagacagcatattgggagttatgaacattgttcaagtgaatggaggggagcgacacctgggaaaccccttcatcttcaaaaggaggaaaaaagaggactatttgcgtctcaaagaaagcttactgaagagattagaagggtggaagatgaaacttctttcgtatgctgggcgtctaactctaatcaaatcggtgacatcggcaatgccaatttatgcaatgtccacttcaaagcttccactgtccacttgccgggacttagactcgttgatgaggaagttttggtggctggggaacatggaaaagaatagatttatggcgttcaaagcttgggacaaaatttgtcaaccaaagtgttcgggtggtttgggtctaagaaaatgtgaagaaatgaacaaggccctcttgtccaagcttgcttggagccttgcaactgctgaagacaaaccgtgggtctcttgtctactccaaaaatactgtagatatgagaatttctggtgtgttaaacataaagtgactcctatcaatggaaatgtatattggattctagagcagtgatcctcaaaggctctgtctctgtagcagcttcaggttccaccattaatttttggaaccaaccttggattccttggttggaataccctgaatttgtgactttgatgaatacaattagaggcagaggatacaccatccagactatcgaagatgtgtctcaaggtaatgaatggaatgctgaactgatatttcaaatatttggtaatgagttaggaaatcgtattgttaagatccctcgaatcccagcaccttttaaggatcaggccttttggaagcaaaactcagggggaaagttttctgtgaaagccgcttatcttaccgataataaggtaaggtttgattcagaggatcagatatggaaatggatatgggagccaggtattaatccaaaaatatctatcttcctctggagaattctaagcgaggcacttcctactaagtctcggctaatt

SEQ ID NO: 225822 - DNA, 5190 bp, Cannabis indica
aatccaaaaaaaaattacatcatgttatagtaaaatatttatcctggtgtatttttattgttctccaaatttctaatagtgaatttgttcatattaaatcataaatagacatgtagatagagttacatacgtgttaaacactgttctgatttttaatgtttcacaacagttgcattacagttgcataaacattttgctaacaggtattttgtctgattgaaaccttcatctgatgcaaccttcggccaaccacacagcaaccacccagaaactttcttttgattgaaaccttcgtctgatgcaaccttcggctaaccacctagcaaccactctgcaaccatcgtttgattgaaaccttcgtctgatgcaaccattacgcaaccacgcagcaaccaccctgcaaccatcgtctgattgaaacttttgtctgatgtaaccactgcgtaaccacgcagcaaccaccctgcaactatcgcctgattgtgtaagtgattatagtgtaagtgatattttggtaattaaaatcacataaaaagtataaatgtacttgtctttaccttaaggaagtatttttgtaaataaagtgtcaatttatattttttatgtaataattcctttttattttgtattgtttgtgagcataaataccaacaaataaacgaatagacaacaacccaatttaaatatggaaatcaattacacatcaatgctaaaaaaaacttaaaacaactaaagatcacctttataataattaattgtattaaaaaaaaaaaaaaaacctaacatcaaactcataatacaccgataaaaaataaaacagcaacaaaatgtgtcaaaaataaactaaaaatatacgcaagaacaactgtatataaatccaaaatcatcacagtaaaaaaggacaacaactcaactttacactactacaaaaatagacattttcgacgttttttaacagtcgtttaaagtattcccgtcagtttctataaccgtcgcctatacgaccgtcgtaaaacggacagaataggaaacaatgtaaaaccgttgctaatgtgggttttccgacggtttaaaatcgtcgcctaaaaatgggtataggcgacagtttataaccgtgtcctatactataggcgacggttaaatagggcacggttataaaccgtcgcctataaacagttataggcaacggttttaaaccgtgccttatagactggttacgttttttattaatttttttagcgacggtttttttcattcattacatttgaaaaataggggaaaaacagattttctgtaattttttctctgcattaatttttaaaatttgtacaaatctgtatagttttcacaattatttaaactaacgctataattatctaaatatatttaaaattctgtatagtcacaataattaaactaacgctcatatcattcaaaaatatataattaagttaacgctaattataataatttaaatatatttacaaatctatatagtaacgataaatcgagatatatacacactgactaacacggaaactgttgtcgctccgcttccactttcacttaataaatccaccgatcacgcataatatttatctcatcattagtgtacggagtggagaacctatcatgtcggatcaactgtacttgcattggatcttctacgatcatgaaacttttaatgaatttcatgatgtagtatccacattgtttgtcgtcggattgttgaggacagataggagtcatccattagataggtcgatcaggccgtcctatcatttggttatatatggtgaacgatctacacaaaaagtaaatttaattagcatatacatatttatatataaagaataagtttacatattgggacgtttgatatagaacttgcgtgtatatgataaagttcagatcatccgctatgtcgtcgttgcctggatccaagtatgccaccgtctgcgtacttggttggatgagtacaagcatccagtgaaacatgtccctgcattgacaaatatgtgtaaaattgttagcatatacaaaataataaattttatgaagagttataaatactgaaattatttattttaaatctacatataccaattattatatggggcaataagctatttgtctgaaatagtcatcctagtcattcgagtgactagtgctttacaacgattactatcagcccttgcatcagtgacaatcgcacccggattcagaaattcatatacttgattcagtctaccaatgtccaacaatctttctttcatgtatctgataaaaaatcataattaataatcgttgttgtcaaaagaacattatcaagtttattattaagagttagaaatcataatttcaccaaactcctattggttgggctcccaagtattgtatggtgcacaattcctaaatgtcactcttagcaagcgaaatagagtcatatgtgacccccaaatagctcattattaacttgaaattggattatagatgacttgggccaccttctgaggaagtttcaaaaggcaatgatggaggaagtttggaatggttggacataacgaccatgaacttttgccttactcggcctctcaaggtattttagaggctgtgttggaggaccgagtaaatctaaaggcttttgtgcttctcttcacgggttggttctgaaatttctcatgggtggttgtgtctatatatatcaaaaaacaataaagttagcaatttcaataatgaataaacacaataagttaagtaaataaattgaaacataccaaacattttccaagaggtgtaagatagtctttcggccatactatataatattttacaacttgacctattgtcgtcaatgaatcgtcggctatggaacatgggagtagtagtgcattctccacattggcttcttcgataaatacccgacgataatctttgtataggtattcatccatgttaatggaaaactttccatattttaaatatttttccttgacaatgtggcccgaagcaactttacgtcggctatactatacctaacggttttgaaccgtcgggtataagcccatatattttttttcctaaaaaatgtcgcctaattttttaggcacagttataaaccgtcgggaatactaatttttctcaacagttttaaataattgcttaatttttttaacgacggtccccgaaaaaaattatttttgggaccatcgcgaattcattattttgtagtagtgttaatatgcaaataaattagacataataaattgagtcaacaacctaataaatacaaaaataatttaataagataaaaacacatataaaatattatttatacaccataaaaactaaacatatataattttaatatttgttaaacaactagatgacaattttaaatcaactaactaataatttaataacaacaaaaatatattcacaatgatacatttcaaaaaaaaattacaaatcattaatataaactcattatattttacctagcaaaaaaagctcattaaattagaaaggaaaataaatagtttgagaaaaatcatgatgatgagttaaattcaaaatgacacacggttcaaaatatacctaaacttatttaaaatatataaataaacttgaaattaacctaaaatacacatttaaaaactaaatatttatctaaaattatataaaaatatattattataaattaaagaacgtaacaacaatacaaatatgtttacatttttacatgcaaataactaacaaacaactaaacatacattcttttttttattaaacaactaataaactaataactccaaaactaaaatttaaaatatatacaatataaataatataaaaacaacacaacatcaacctaggcattgtgtcattccaatataaaacaaccaacaaacaactcaaaaacgacatgtatcaatctcattttgcgccaacctagaataaattacaaaccaacaaaaatttaacatatcatcaatcctacactatataaattcaaaaactaaattacaagtacaacaaaaaataataccacatcagcatctaaatgcaggattgttagaggcgttaatataactaagaaactaccacattaacaatatcacacaccaaccagtcaaacatatatcacaaacctaaactaatttgtaatgtatactaattatcttaaaaaatgtgaaatattcatttgttgtattaagagacttaaagtgaagcaagtacatgataatgagtatgaaattattatagtcattataatttaattaaaagaagaattattatcttgaaataaaatataaaaaaaaaatcataataagtcataaaaaataaagagagaaagaaaaaaataaaaaaagaaaaaaaaattaaaaaccaaacataaataaaaatattaaaaaaaatgctaaatttattattaaaaatcccaaaattaatcttgcatgcatgttgatattttaaattacactttttagaaaaggtactcaaattggataaagtaatcgatttttattacttagtaagataattttggaactacttgaacactaaaactgtaaaataaatatttaaagatgataataaatctatattcattgcatggcaaaatatatatatatatacttgcttaatcatatagtatatataattagcacaatgttttgctatatacagcattcgaaatgctttatgaaagagaagaagaagaaagaaaaggtacagcgccacaatgttactcaaataatttatttgcttttattgccttaatcaagcttaatattataagaaatacctaaactgagatagaaaaaacgatgccaaattacacaaaagagaggcaaaagataagaacatacaaacaaatgaccaacatatgactaaatgtggtgataggaactgccacctcttctctctctatatatatagctatattagctagcagagagtatatagtatttcatattcttcacatgttcttctgatatctttcccatcgtcaaaagtgttttaaactattacaattatccatacatatatgcaaaaaataataattataaaagatacaaagaagatgctctatctcttgtccttctcctctaaactttattaaacattttcattcaaaatctcttgtcgtttttctgatataaagataaagtaaaatacacatatata

SEQ ID NO: 225823 - DNA, 1964 bp, Cannabis indica
aattaaccaaaccaacaacaaaatatatcaaaatatatatgaccccatttgtcagcttgttaagtctctctctaatctctcagaagtgggtggcgtgtcaatatagagataataataatcacttcaaaaaaataaataaaaatgtagtctttaaattaaaaatccaaactttatactattaataataatatttttgattaagatagtcatgatcaactattgtaatgatcaacctcctctattaattcctcctgactccgctaactcggtggatcctcctcggccgctacctccaccaccgcccgagcctgatgttccaaaccctaccggggcaccgatacaagtgtagtttgattgatcagaggatggataggttaggttaggatgacaatattgtgatggagagttggtgtttgaggtgagtacatggccaacatagtaatcatgtggtggtggtggaaagtgtgatgatgagtatgggattggacggttggatgatgatggtgttgatgagttgttgtatagagtataaggggattgagaaggttgtggcggttgtggtggcggtggtggtggtggaaaatttgatgatgacgaaccggaaaacattcttgttggaaatctcattgggagtggtgacgtgtctgctaccactcccatgttggttgttggatgatggtaacctgctccggccggtgtcattggatgacaacagctttaaaaattattaaaaaaaaaaaggaaattgtcaacaaatatatattttgtatgatcaaactctttgttttttttttattaattgatatcatatatgttttgtgattaattactcttaaattattatacgcaattttttacacaagataatatgtaaaagttaaaattatatctgagtttcaatcatatatattaaaaataatgtagtctatttaaaattatatatgactaaattatagtatttaaatataaattgtcatttaatttaatttatgtcacaataagtattgtgaaccaaaaacatatttaatcacaataaattataatttttatttcacacataatataatagtgtaaaaggataattttcttatatcatcacttcaaatatttatatttatatttaaataattttgtagggaattgtaagtgaagaaaaggtggattctttcaacataccaatttatttgatgagtccccaagaatttgaaaaatcagtgaatgaaaatggaagtttttcaatagagagattagatgttttacctcatgtgaaagtaataaatggagttggtcttaattcacatcaaattacattttgtatgagatctactcttggagaactaattaaacaacactttggagaagaaatcattgacaaactctttgatttgtatcttcaaaaagtggaagagattcatccaacttctattattgaatcactcaaaactttgaacttcttagctgttcttaaacgcaataactaactcgataaattaagattacttatgttgaaattttctttcgaaatcatgcatgttgttcgtaacctgttgatgtcaaaaaattgttcgataaagaatttctattcttttcttaaaaatataagagttataaatctatgtttgaaagattgtatttggctcagtttaattaataaaaatttatttcttgattaaaaaaataatttgtgtaattggaatgaatttggtacaatgtttgtcttcacttttcatttcccatcgaaagccacttttgattgttatgtattgatgtttgttaagggtcgtatgagcctttaatttttcttcaatttttttagtttgttaattaacaactgaaaattagagtttttgtcaaatgtcaataatatatacgaaaataataaaactagtatacacttgcagctactgcagaaatcagtttgtcagtgacagaacagaacagacagaatataaaaataatttgtc

SEQ ID NO: 225824 - DNA, 1413 bp, Cannabis indica
aaaatattaatttcttaatttattttaaactttaaaattataattgtgcatttttcaccattaattaatggcgtcctatgattagttacaatcaaggccagttttaagagtaggctgggtaggcacgcacctagggccaccacccaactgaggccccgaaaaaataaatcattttattttttaatataaaaaatttaataatactaatataatatcagagtataactttagtgtggtgcaaccgaattgcttgagttggttaaacaccttgccactaagccaactcaagcaacgaattgccaccacaccaaaactaacattatgtatgcacaaatttatttatgaagggtcctataattctattattgtcatggacccctattttctctcgcacaaacctattataatataggaaactctaaaatatattttattaacttatataaaactcgatatgtacttaattgcacttatagtaatatgataccgggtaggtgtaaagcaccagtagtcccttttagcatttctcatggtaaaagctatggttgtacataaacttttataaactgctcaaactgaataactcgcccaaactaaatcgagataacccgatagaaaatacaaactgaaaaactcgacgaaaatataacctgcacaatctttatattgggtgggttgaaaataataccaatccacccaatcaacttgaactaacccgaccaacctgattaaaagatttttttatatatatttatatgtctttattatatataattatatatcatataatttatatgactatttaaaaatataaagttaaaactatatattttttttattgtagttgatttgaattttaaattcaatctatatatatttgtcttattattaaaattaactaaaatgttgtaaaaataaaaaattatatattagtagttagtttggacgggttaactcgatcaaaccgaccaattttattgaacgggttattatttttttcttaattgagcgagttacacttacatttttgtaatctgatcttcatattggattaaataaaacgtacataaaccgaccaaactgaaaaacgtacacagcgaaactatcattatccaattattttttactgtttatctttctcctgtggtgctggcgtggacaattaagccgttgcatggttgcacgttgactgttgactgaggcatctgtaaaagataggaagttggtcaaggagtgccacgtgtcgtaatggtgggccacttctcatagccacgtgggtaccatgcgaccactataagaccaacttcagtaaaaaatgcaaacttaattgagaaaaaaaaaacttaagtttaagttttctaattacaaatagtttaattaataaatatatttaaattatattttatttaataa

SEQ ID NO: 225825 - DNA, 2826 bp, Cannabis indica
gtagtagtaggccaatccttcttatccagcagataactatcttcctcgcttgcttcactctcctcaaccaaagagaattcggcaaaacgattaaggcagttattataaatttgctgagaatcccaagaaaattatcgcaacacattcgtaaaagactcgatcgagcgatagctgaccctcaatggtgtgtttgtttccccaaggctaaggtatctcatctacctatatatggttctgaccatgctcctctgctgctcatggcttggggtgatcgagaaagactagcctacccgtttcggttcctagaagtttggacatcaagtggagaatgtggagaaactatttcgaaggcttggtctactcaggtactagggagccagggatctatcctctgtaaaaaactacagaaaacaaagaaggagttaaaagcttggactgtggcaaggtttggtaatgtcgatcttaaactaaaagacttgaagcaccaactttcgacaatccaattgacctagccatcacaggataatctcgagactgaagcgggcattcaactggatattttaaagatggaagcttatcaggaaagaatttggaaacagaagtcgagagaagtctggctcaaagtgggagaccgtaactcgaaatttttccacgcttcgacaattataagaagaaggcagaacagaatcagtggcattgaggaaaaaccaggagtttggttgagacatagagttgagattggaaattatttccagtcaaattttcaaaatcttttcacttcaactgacccgttaatcagtgatgaattggaatccctatttactgataaagtggagaactatgagaatgatcaattgtgcaaagtccctgtgatagaggagataagaactgctgtcttcaaaatgcacccgcttaaatcgcctggccctgatggtttcctaggtgttttcttccgaaaatactggggaatagttggatcgcaggtctgcaaaatggtccaagaatttttcactcatggtatccttccaaatacttgcaatcacacctttatttgcctaatccctaaggaggctcaagcaaagaccttcgacaaattttgccctatcagtctgtgtaactttggttacaaaatcatctctcgaatccttacggacagactgaagagcatcattgatcgtctagtctcgcctttccaagctgccttcattcctggaagatggattgccgaatgttctgtgctcgcccaagaagtccttcatgctgttaaaaataaaaaaggaaagactagaatcatggcaatcaaaactgacatgagcaaagcctatgagaggctggaatggaatttcttatcgagagtgctcaaagcaaacggatttagctccaaggctatccttcttatcatgaattgtgttacttccgtcaactactctatccttcttaatggagctccacttgctcccttcaatcctaactgaagcctgagacagggagaccccctatcccccttcctcttcatcatgtgcagtgaagtcctatcaaagctaattcttaaagctgagagagaaaatttggttcgtggtatcaaggtctcgcgcaaagccccttccattactcaccttttttatgcagatgatgcaattttcttcacacaagccacggaagacaatgctaataccttactgaaaatctttgaaaaatatgaagcttgatcaggacagcgtattaatagagagaaaagtggagttgtcttctctccaaatactcacaatagtaagaaaatggctatcctacaactcctccaaatgcagacgctaaaagctaaggagtagtacctggaaaacccgtttttcttcacgggtcgaagaaagatgacttccagttccttaagcagaaaatcatgaatagaattgacggttggaaggcaaaatgcctctctcaagcaggcagaactacactggttagtgcagttcttcaaagtattccaacctacttcatgtcaacaactatgattcctctgtccacctgtgaggaattggataggatggtgtcaaagttctggtggatcagggcaaatcagaaaaagaacaaatattgtgctctaaaatcctagggtgatctttgtcaaccaaaaaactgtggtggtctgggtttcagaaaattccatgccattaactttgctcttattgcaaaactattttggatggtgcttcagaagaaagataagttgtggatcaacactctgtgtgctaaatactgcagtactttcgatgcttggacagtggagaagcatgattccgactcccgggtctggaaggatatccttagcactagaagtctttgcactaaggggcaggggtcatcatagcagatggagacgtagacatttggacaaagccttggatcccatggaaatcaatccaagacataagtgaaggcttccactacaacagggtacatgccttcaacaaagtttcagacttgttcattgaaggcacaaggacttggaatgtgcccctaatacaatcctgtttcgaagcttaggcaatcatcaacatcaagcctattcaagaggggagtgatctactcttctggaacccagctaaagaaggaagattttctgtcaagagtgcccattggctccaccaacggcaaagatttaacaaccaaaacaatgtgtggaaacatttatggaagaaaaagattcatccgagattaaccatgatgatatggaaaatcctgggggattgtcttccaacttttggaaagatgcatttcctaaacaacccggatagactttgcctcttttgcaatagtgagattgaagat

SEQ ID NO: 225826 - DNA, 2913 bp, Cannabis indica
aatttgaatttaaaataggaatataagatgaagaattacatggaatattgaagagcaattgtctaggactggtaattggctaggcatagggatgataatatgatctctaaatctttcagcgacattcttccttgaataaacacaggttcaaggttgttacaatctttaatcaaccgtagcatttcttcatgtaacaaaccgatttcaaatttaacaattataggattaatctccttaatatcagtgtcaaaagtcttaggtaaaggttcaaccgtctcccaaaaatttgattccactaaattctccccttgaataaaattttgtgaaaaataagggatatttttcacaaacaacacatccatagttatataattacgtttagtaataggattaaatcatttatatccttttttattagaggataccccaaaaaatatatatttttcaactctaggatctaacttagacctagaccttttaggaatgtggacataagcagtacaaccaaatttttttaaaggtaaatcagagtgaatcctagaatttgaaaagaattttttgaaactttgcaatggagtaatatatttcaaaattttcgtaggcatcctatttatcaaaaaagatgcagtaagagtagcatcaccccataaatatttaggaatttgcatataaaacttcatagtacgagctgtttctaacaaatgtctattttttcgttcagctacaccattctgttcaggtgtatgtggacaagtagactgatacaaaatacctttttctgtcaaatttttttcaagaattttattaaagtatttagttccattatcaattcgtaagatgctaatttttgtttgaactaagtttcaaccattttgtaaaaagctgaaaaaatttgctccacttcatttttttctttcatcaaataaaccaagcaaagacgagtatggtcgtctataaaagttacaactattttttttctagaaatagtggtgactttagatggtccccaaacatcactatgaaaaagattaaaaggtttggaagaataataaataattttagtataagatttacgttggcttttggccaataaacaactttcacattgaaaagacaaaggattaaactttttaaacaaagtgggaagctaatgttttaaataagaaaaactaggatgacctagcctataatgccaaattattatttgatcataaactatagaagaattgatgctactaagcccttgatcaattttattcttaaaaatattatcttcaaaataatggagaccatttatcatcctagcattgtcaattgtcttccccaaactctggtcttgaaaaggataataagattcatggaagattacacaacaattagaattccttgataatttactcacagacagaagattgcattaggaacatgaagaacaaatttgagatctgttctttcagataatcttataagaccttttcctacaataggtgagaaattaccatctacaatcctaacttttttatcacccaaacaaggtatatatgagtcaaacaaattagaagaatttttcatatgattagaagctccagaatcaactacccaaggagcataatttggaaagaaacaatttaaagcatttatttctttacctgattgggcaacagaaacattaggaataacagaagaggacgaagtggatttcagcaatgcatgaagttaagccatctgctccttagtgaaaggactagcctcgaattcatttgtagtagggttgtgactatttctttccgccttgctattccaatttgctggttttccatggattctccagcaggtttctcaagtatggcaaggtttattacagaaatcacaccaaacacggagtttctcatcaggttttggcagatgtggagtgtccttactgtagcctcctccaacaacaaaggttgatccttcaatagtagtgccaacaaccctttttctgagcataacactcctcctactctcctctcttctaaccttaaaaaaacttcgccaatagaaggtaagggccgccttccaataattctccccctcacctcatcaaactcaatagtgaaaccaaccaagaatttataaatctggggtttcttaattgttttcttatggtgtttgccatcttccacaaatttctattcataggtatcgaagagatccaagtctttccatattcgcttcagcgaattaaaatacttcgtaacgctatcctcgccttgctttatttctccaagtttaagagtcaattcgaatactttagagtggttttcgagatcagaatacatcttgataacattatcccatagttcctttgctataggatagcacaaataattcgagctgatatcctatcctcctccatggaattaacaagccatgccataaccatagaattttcagcatcccaagtgtcgtaagttggatctgcctctgttggagccttcttctcaccatttaaataccccatctttcctcgacctctcatatacatcttaactgattgataccatctcaaaaaattgtcaccattcagcgaataatggtgatttggacagagtgggattcaacagtggtagatttggctggaacaatagtggtctcagagggattgatttttatggtggctgactccctgctttcagacatggtggaatgggattagagaaagggaagttgggcttagggtttagggttgtgtatttgctctgataccaagtcaacaaagaggttaatttctgtatattatttctcagaaaaatgtatgtatttaacatgtacaagaatcccttaaaggaaaaaaaatcaaataataataacagaataaaactcttaactataccctaaaaatatgcaacaataaattacaataactacaca

SEQ ID NO: 225827 - DNA, 5650 bp, Cannabis indica
tctaaaatttaaagtcaaagacttaaatttataccaaacgtacaatgagttttattctagcttggaccaccactactaatctaactctaaggtgaaattgcctatagtaaacatatacaagtagaagattctaagatcgaggattatatcatttcgggatagaatgtcgggaatatagtcatttgtgccattcaatttctcaagagaaagtagaatgacattatatacaaatgatttataaaccattcatccaatgatatattattgaagctaattcaaaatcaataagataagaggaaaaataaaggataatttcgattaaaaataagaatccaatgaggtcccgatttgcgagagtcgaagttatacttatttttataaatttcttcattgtttcatattgtaaatactagtctaaggtgtcatctattgatgaacatctagatgttgcatttataaatatttatctatcgagatctaacactattgtgtttgtctaataaatgacaatccaagaaaataataaaaaaaattatcaaaaatagattttgtcgttgttgtagctctctctcaagctggtagccatggccaatacacgggcaaaatctcaacctaagatcatgccttcaggcaagaagaagaagtgtgggcctacatcgacagatgaagtaaagaaaactaagtccatggatgaaattcttggagttgaatatctggagttcacggacgaagaagaagaagatccgaaactcaaggatgtattcggggcgccattatcaccgaactcttcgctcagatttatttagcaacaagaggagattaaggaggaatttgcaatgttcttagaggcaaactagaaatgttcatcagagattgctcacggattcaaagctgtgcctccagttcttcagtttggtagcataattaggaatctggagccatcgttcacagccaagaacagagtgaagatcactgaagaagatatacaggaggaagttgatttctagagctcatcaattgtctgttatgtgcttggagccaacccaccactaccagtaattgaaggctttgtgcggagattatggaaggaaaaagtggacaaagtaggtatgatttcgtatggtattttccttattcgattctatagcattgaagatagaaacctgattcttaatggaggatatactttttttaataagaggcatgtaatcatgaaagcatgggatcctaatgtgaattttaagaaagaggatattagaactgtcccgatttggattcaattagaagatttagaactcaaatattgggggcagtcgactttattcaaaatagtagggcagattgggaagcctctaatggttgatgagttccctaagagaggaataagctgagttatccttaggttctcatagaagtgtcaatgctccaacaattcccgggtttaattgaatttgaaaatgaacatgggttgaatgtatcagtaatagtcaattatgaatggaagcctatcacttgtgctcattgcaaagggatggggcacacggctgaggtttgtaggaagaaggagggtcaaaaacaagaatgggtggttaagcatgataatagaaaacaagtggaaaagaagactactccggaggaattccaacaagttgtgaaaggatggaaacccaagaatactaaaaaaccagctgcaaccaagatctcaaattgttttatggtgctggaaagtgaagttacagaccctttgttgggtcctgaaattgggcagcagagagatggagtaggaaatggagaaacacagggaggggggagatcctcctctttccaatggatagaataataagttggaacgtccgaggacttaacaaccagcagaaacagaacacagttacgcattttattgcttcccaaaaggttggtttggtaggtttgctcaagacgagagttaaagctcccaagttgggtgctttgtatataaacatgtttgagggatggtgcttcacataaaatattgcttggcattcaggtggaagaataatagttgcgtggaatccgcttagttttgttgttaacattattaagtactcttctcaactcattcacttgtgtgttacagccgtaggtaataaaaaaagcttttatgtgacctttgtgtatgggcagaataaagaagaaggaaggaaagagtaatgggaagaattgcagtagttaaagacccaagaacgatggctggttttaggggatttcaatgatatacttgagaaggaagaaagaataggggagagagtggagttcagaggttcggaattccaacagtgtgtcacaaactgtcagattcaagatgttaaatacagcggctgctttttacacttggtgtaataaacaataaggggttgatcgaatttgttcgaagatagacagagtaatggctaatgaatcatggttggatacttttctcaatgaggaagtaattttcttaaatgaaggatcctttgaccattctccagccattctaaatgtatacccgaaccttgttactggaaagaagccatttaagtactttaacatgtggaaaacacatccaaagtatcatataatggtgggaagtacatggagacagcaggtggaaggcacaaggatgtatcaagtggtgacaaaattgaagcgtctcaagaatgttttcaaggagattaacaaagatggtttcttggatatccaaaatgctaatcatttagctcggaaatagctagatgatagtaaaacaaaactacaccaagatcctcttaattatgagctacaggctattgaattggaagcgagaaggaaattttcagaggtgaataaagcctactgctcattcttacagcagaaagctaaagtgatttggctaaatgaaggagatgcaaacactagactttttcaccagtctttaagcaaaggagaagccaaaaccgtgtcttctccattgagaacaaagagggtgaaagagtagataatcctgaggatgtaaccaaagcattcatctccttttatgaacatttgttgggctctaaaatggggaacaggaagctggtgaagcagcaggttgtgaaacaaggtccaatgcttaccacggcccacattcaattacttgaaaaagaatataagacagaggaagtcaaggcagcagcgtttagtattccgagtataaaggctcctggactggatggttatggtagtgctttttatcaggagaattgggagctgataggggaagatatagctaaagcagttttgtctttcctccactctggagcaatactgaaggagatcaattctactgtgctcacacttataccaaaagtgaaatgcccaaacactgtaagtgattaccgacccatagcttgttgcaatgttatttataagattgcgactaagatgatatgtacaagattgaaaggaatcctccctgagatagtttcatataatcaagggggatttattgaaggtcaatatatctcccataatataatgatatgccaagatttaatcaggcattatggaagaaaaaaccccaaaccttgttgcatgattaaactagacttacaaaaggcatatgacacaatggaatggggatttttagaggaaatgttggtggctttgaattttcctgttaaattcattaaacttgtaatgaattgtgtaaccacacctaggttctccttactatttaatggatctcttcaaggattctttgaacccaaaagggggcttaggcaaggagacccgatgtcccctctattatttgtctttggaatggagtattttagcaggatcatgcaaaaggtgggggagaaagaggagtttggctatcatgacaggtgcaaaggcattaaactaaatcatctgagttttgcggatgatgttttaatgttctgcaatggtgacttcaatagtatatatctcatgatgcaaggcctaaagaccttctcacttacttcagggctatttcctaacatacagaaaactgttgtgtattgttgtggtatgcatgaagaagaaattcatagggtgttaaatatgtctgggttcagtagacagagcataccttttagataccttgggtacccatttgtgcaaagagaatctcagcagaagaatgtaatgggcttgtgcagaaaatggtagcaaagattaaagtatggagttccagaaatatttctttttcggggagagcagttctcatcaatcatgtgttgctcacgattcacacatattggtgtccacttctcattcttcccaaaagagtcatagctgaaattggaaaaatttgtaggaattttctatggaaccaaggagtggcagatagagctggaaatgtagcttgggattccttatgtaagtccaagtcattagatggattgggtttcaaaaacacagccacatggaatgaagcagccctagcatgcttggtcaattgctacaaaaaaaaaaagataatctatggattaaatgggtacacagtgtttacatcaagcaaggagattggtgggagtacaaagctcccccgactagcagcttgtattggagaaaaatcgtagaagcaaaggatagagtgaaaagcatcaagagccaaagagatttcacagctgagaaatactcaattgcagggggttacaacatgctgcaaccggtttcagagaagaagaagtggagtaagcttgtgtggtgcagaacaaatgttcctaaacacagtttcattctgtggttagcaattcaggacagattaaagaccaaggatcggctgtacaggcacaacgtcattgaaaatgcaacttgtatactctatctgcaagctgatgaaacagctgaacacctgttcttttcgtgttccttttcacaggtattgatagatcagatgaaggcatggctctcctggaacatcaatgcaacatctcttttggagatttcaaagaaaatagagaaggggaggcactcaaaaaccagaaagcaggtgttgagtgcaacagttgcagcgctggtgtattccttatggattacccgaaatgaaattatgtggaatggaaaccatcaatcgcactctactctgatgcaacagatcaaaaaaaatggtaaagaatagagtgtgtagatattgtccaaaaaaatctacagcaaaggataagaattggatagaaaacttgtaaaaagaagttttgtgtaattttaggaacacacggctgcatattgtacagtagtatacatggaggccttttaggtgctcttaggatgtatttgattgtttttggagtaatgaaatttctgatttatcaaaaaaaaaaaaatgacaatccattagggatttgtcccaataaaaacaataaggcaagttagaccaacaatgaagattcgaaatttaaactacaattaataacagaaaataacatggttcaatataaattcacacacaatttagaaattattaagcatttagcaagtaggaatgacaagcgaaaatactaaaacatacaatcctaaataatttccaaggtctccaacaaactgatatctgtaacaccctaactagcataggcgtattatgtgatttttaaacgtactgtgcagcttgttgctaatcaacgagatttatggaaatcgtgattaattaaaa

SEQ ID NO: 225828 - DNA, 1476 bp, Cannabis indica
ttgttttggtaagaagttccattgaaactatctgggccaggtgacttgtcactagccaattgaaacactgcatgcttgatctcagcggccgtgaaaggggtctctaggcattagcgatttgtatcattaagtctctcagagataccgtaaagagaaaagtccatgtgcatctcagtgggttgttggctggtgaagagttgagcaaagtgttgttcaattgttgtcagaatgcttggagtatcagtgacagttgagccatcttggcgtgtaagggaacgaatcttgtttttggctcgtcaggaagaagcaaattggtgaaagtagcgcgtgttcttgtcaccaaagccaagtaacacgggagcgttgttgccaatattcatcctctttaaagagaagtctatcaagatccccttgaagctgacgacattggagaagcagagtgttggaaggttaggggttgttttgagcatactagagctgagactggatgtttttgatttggcgaggaaggggaggtcctagcgtttgtttccacttggagagattagaagcacaattctgaagctttgtaataagagtagatatgggatcttggtcatgacatatattggtggaaatccatgcctgactaatgcaattctcaaagtcagttttggtgagccatctgttgtcgaaatggaatcgttggtgggaggcagaggagctggcttcagtttttctaagagaaatgattaaggttcgatggtcagagccaaaaaaatcaccgtggagaaggtgagcattgggaaaggatgatgtccacggggggttcgagatcccccagtctaatcgttcttggatacaggtggggtgtgagtgtttattagtctaggtgtaagggttcccattgccatggatgggatggagtgtgtaagtgtctaagaaagttcggaaaaaaggcgacggacttttattaatggagcctccaagtttgtctgcatgggagagaaaagcattaaagtcgtccattaagagccaagggttgttatatacagtgtcactaagacgatggagaagttgccacgtaatggggcgattattatgttgaggggctccataaaaatcagtgaaagtgaaagggcaatgattaggaaaccagatataacagtgaaactgatttatattatatgaaagtaaagttacatcaacatcctgagtccataacaaaaggagaccgccactaaggccgagccgagggacttcaagtccattaccaaaagaaagcttagttctaaatttatttatagcaccaacatggagtctagtctccataatatacaaaatggttggtttatattgcttaactaaaagggagagccgacggaatactcgtttactccctaatccacgagcattccaacttatgatgctcatggctcctggtgggtgcactgagcttcacccgcttcattggggtagctttcatctaaggacttg

SEQ ID NO: 225829 - DNA, 2241 bp, Cannabis indica
ggtccaatctgtaacttttgcaaaatacagggtccaaaatggtatttacccttgttttattgcacttgatgagaagtttagagcttggactgtgcttttagtttttaaaattatgttttaaaaagtgagaatgaaaaacaattttttgtcaatttaaaaatttaatggtatttggtataaagttttaaaaattatttttaaattgttttcttactaaaaaaatcaatattttaacaccatattatgacatgaatccatccaagtccgggttaaggtttaattccgagtttaggatccgagtatgtgaacaaaaaatgtaaaatataatatattaaaaaaaattatttttgaaaattaaaaagtttttttttaaaaaactgttttaaaaaaaaattaacaagcgattacctaatagtttttaaaaactgttttctgctttagttttggcacttagttcttttagttaaattttagtttgattttcatttccaagatataagctttgttccatctccttattgttaaaacggtcttaaatgattattatcttgtaaactttttatatgtgtataataatattatattaatacatatatgaaaaaaaaaaaaaactaattttcattaatcaaccaacgaaaactaacagcacttacaaccagccacacaaaaagaaccacttaacaattaattacattttgtaataagaaaaatttctcataatcattcttcctataatataagtaccactatacaatctatactttaacatgctttttatattcctaaaaataaggaagctgagcaggagcaactctcataaatacacctattcttgttgttccacaaactgtgaacaactgaagcaagaatatatagcatttacaattgtagttctaggacctgaacgatctgtattaatccacctttgccattgtaaaaaaaacctgtggccaagctgagaaatgagaatccaacctagctaaacaccaactctaccactttcacagacaatcaatcaaaaaacaaatgagcatgactttgattcagcaagccacacacaggacaagaaggtccctggttagtaactgagtattgaccatcagccacaagatgaaaatgtgcttcggtaagcttaatcgacaccaaaccatttttgataagcaacctgattatactgttgtagagaatggaagctttaaacttgccattcttgctggcatattgaatgttcctcttatcaaaatttgtcgtaaatgacacaattttctctaataagttttgataatacattattataataggctaattagtatttttaccctctaaactttaacatgtaccaaatcatgtcccctaaatttttttgaccgttaaaaattcctcttgaactattgagattgttagatttaaggacttttgtctaatttcattcaattttactatttcagtgattgtttatgtactaaatcatgctctccagactttgatatctactaaatcatactcctctaacattgatatgtactaaatcatgctccctgattcatgttagaattttttttactaaaattagacaaaaatctttaaattcagcaatctcaatagttcaggaggcatttttaagaaccttaaaagttcaggaacatgacttggtacttgtcaaagttcggggaaaaaaatcataattagcgttataatatttttaaaaaaagcaatataggcacttattaacttttgtagctgttatttttataaccaaacatattttttaggcccaacaacaatgtattctcattcaaacaatcatttccaattctcgaagtaactcttcagcaagccaaattctcttcttcttattcagcatgtgtaatttctcaaagttactctcgatatattttgctcttcgtatcatgacattttcagacatatatgggtatagccatatatggatatatatatatgatttccgtttttggtgttctctcaatcatagtatatattagcatttagttgaattagtatcatttcattctagatgatcactcttataccatatcacctccagccactgaagatatagcttgcaaagatttggaaagtggagacgaacttaaaacttcttcaatagtctaaatgaaggtgatagcattgcgttctttaggttgttatttttttttcgtttagcgttgattgcatttaagatttagagattttacatatatataaatgttagggtttaca

SEQ ID NO: 225830 - DNA, 1494 bp, Cannabis indica
tacactaacacgcctatgctagttagggtgttacaatcactcttctacggttcacctataaaagctttgccttgctatgtgagaaatcgctcttctaaaagatagaagacatgctttctgcctacaacctacctagtcgatttgttcaaaggataatggaagtgtaagatctactaactatttcatatgtatgaatgggagggtgcaaggttccttcaaaagtaaaaaaggcttgagacaaggtgatccgttaacacctcttctctttgtcttaatcatgaaatatctcacaagaagacttcaaatggcagtctcgagtactaattacaggttccatcctttatgtaaacaactttgtctaattaaccttgggtttacaaatgatttaattctgtttaattcctttaaatgatgcatgtgatagcaattgtttgccacatttttatataaaaagggcatgttcccttccatacaagattcagcagccagccagaataaaatacatataaaatgttcttaatttaaacgaatgcttacaccataatcaaaacaaccaaaagaaatcaacaaaagaaaaaacaagatgtatatataaccatgtacacctagatgcaaatcttgtcttatttgaagcttaaagatcaccacactttatgattttatttaacaaattgtgtattgtgggtaaacttgctattattatatacttttagttcttatttttagatgagattgaggacgaccttgcgtaaaattggtaataaagtattaaataatgaaaataagattctcatgattttcatttcttatttcatcaaatgtaatcattttcaaggaaaaataaaaggcaaaaaaatcaacaatttcatattttctttgaccaattttattattctcaaccaaacatataacttcattgagcatgaggtttaatttttttattttattttaacacaaagcaagaaatgcaggatcctagaaattcaacacacgatcaatggctcaaaaagattaagttaggagaagtactctatattcattgccacgtatttaagattttcttttaattattatttattattgaaaatctaaattattataaatattgtatcacaactattccaaattaattaggattataaatagtcgagtagtacttatttaagtaagcactcataggcttatacacatataaaacatcactacaaaaaattttacttttagttaaaacaaaatttgtgactaaaaataaaaaaattatgacgaattgtaaattgttatttctatattgtgactaaaatgtctgtggctaaaagtattagtcacaaaaattataatatgttgtgattaaatgtatttttattcacaaaaattacaatttgttgtgattaaatatatttttataatacatcttgtgactaaaacttaattagttacaacttatagctaaatagtatattttagtcacaagtaattttttttgttgtgattaaa

SEQ ID NO: 225831 - DNA, 3767 bp, Cannabis indica
aatcacgtaatacgcctatgttagttagggtgttacagtctgtgtctgagtctgggaccgggatcggatcccggtttgggtctgggtttaggtcaaggttcgagttcgggtctcgggtgcgggtctaggtcttggtccgggtcagggtctcgttcagaatctatgtttcgagtttcgatcctagtctgggaccaggcctcggttcaagtttaagttcatatctagaaccctatctaggtccgagtttaagttttggatagggtcccaagtttaggtatgggtccgagttttggtctgggtctcattgttggtctgcgtacacgacgtgtcagggcccaacttcaagtcacggtttgggtctggggctaggcccgagttcagttctaggtttgggtcaacttcctagtcacggtcctagtctggtcctgagtcttggttttagtccaggtcgcggtacaggttcaggtctaggtctcgatccctatctttgtctgggtttaggttcgagcccttgtcagggtctggatcctggtctgtgttgcgattctcaagatcctgtgagcatttaggaccaggttaggtacaggtcccgctcctggtcctagtccaagttcaagtcttaggtctcaggtcccagtcctagtgaaggtctccgtcctggttttgaagtgagtttgagttatggtttgggttttgttatggtcttaggtctgggtcctagtcacaattccagttctgattctcggtccgggttttgttccgggtctgggactgggtccaagttggagtcagggtaccgagtcttagttcgagtttggttacgggtttttcggatctcggtctggatccaagtctgagtcaaggtccacgttcgggtcttggttgtgggtctctagttcgtgtctgggtctgcgtttgcgtctgggtctaggtcccgtgtttcaatcctggtctaggtctggtcggtatttgggtccgtgtatgagttcgtgtccatgtctacgtctaaattccaatttaggtcaggggcttggtctgggtctgggcttgactcccgagttcgtgttcaggttctggctcaagtctctgtccgagtcttggtctgggactgggtcgtagcccgagttttgggactaggttcgatctagttctgggtccgagtcaaggtccaggtcacggtctgggtcctgttccatggtcctgatcaccttcttgttcaagtttcggtttcgggtcctaggtttgggcctgggtctaggtccttatccagcttcgggtccttgtccgagtccctaatcaagacatcgactatgggtcttgtccaagctccggttctctgatcacaggataagatctgcatcccaagtcagggtcttggtttgggtctaggtctaagacagagactggggtccagtctgggtttcgatcccagttttgggtcccgaatcatgttcaatgttctggtctaaatttaggtctttgttcgggtctcgagtcctggttcgggtttggatttagattttggacccaatcccagagtggctctttgaccgagtttgggtcttggtcgggttacagttttggctctatgttcatgtcttggtcatggtttattcttcggtcctaatctgcttctagtttcgactccagtttcaagttacggggtacgggttttggtcgagtttggatccgactctgggttcgggtcatgatttgagtttgaggcaaggttcagttccgggtttcgatctgaggtaggcctcgaggctgggtctaggtcaaggtcttggtcccagtcccgttcaaagatcttggtcccgttctaattcatgtttcggtttttgttcccgagtgtgggtcagggtcttggtatgtgtccgggtcttagtttgagttcgagtttgggttcgggttctagtctatgtccttgatatagacattgagtagtggtcgggtccaagcatcgatccgggatcccaggtcccgacgtgggtcctatgtccaggtttgggtctagggttgggtcctcgatcccgatcaaagttctaagacaaatttctggtcctagttcaggggcccaattcccaggtctgtgtcccccatctatgttcaggtcctaggtcccgttccgggtccaaattcgtgttcgggttcggtccgagtttaggtcgtggttttggttagggtccgagttcgcatcccaatcctagtcttggtttgcgctttgggtcccaagtctgagtttggtcttgagtcttgggttcggccccggtgtccaggttcgggtcgagtgctgtgttccgatttgggtctgggtttgggtttaggtctgattcctagtctgagtctaggtttgagtctgggtctaggttcggatcctggtctgggtctgggtttaggtctaggttcgagttcgggtcccaggtgcggttccaggtctgggtctaggtcagggtctcgttacagatctagcttccgagtttcgatcctggtctgggtccatgttttggtccgggtgtcagtctttgtcagggtacatgacgtgtcaaggcctgactttaggtcacggtttgggtttgggcctaggtctgagtttggttctaggtttgggtccacgtcctagtcacggtcctagtcttgttcgatggtcctggtcttacggtttttgtttaggctctattttcgggtcctaggtttgcgtcaggggccgggtttgggtcctggtctgagtcccaaatcaagttcgggaccgagagtggggtgcggttctaggtcccggccccaattttgtgtcccgagtctggttccatgtttgggtctgagtttgggtccaggttcggcattgagtgtaggtttgggttgggatcttggtacgggtttcggttcgggtctaggtctgggtcctagttcggttacggttccaagtctaggtccaggtctgattacggttccaagtccaagtccaagtcctggttccgaacctgtcccgggtcccagtctacttccagttttggttctaattttggctcacaaggtacgggttcgggtccaggttgcgatttggggctgggttgaggtttgcgtctagtttcgggtcccagtctaggttcgagtttgaggctgggtcccagatccaaacactgactaagggttcggtccaagcctcaggtctagatcaagatcctgatcgcgggtctcggtcgggttccattttgtgtgtcgagtcaggagttggttcctatatttaagtccgggttgggggtcaggtcttgggtccctgtgctagttccgttgcccaagtccgtatgtcgattcttggtctaagtcccggtttgggtcccattctaggttcaggcatgggtcctagtcgaggtgcaggtttgagtctcggtctgggtttttatttgggtttgggttcgggtctgtgtcttagtccttgtcctggtcctagtcctagtccagttctagttccaattgcgtttcagatttcgagtttgggttcgagttcgggtcggggtacgagttctagttcgagtttgtgtttgggtccagatctcggtctaggtctgaatcaggctcttggtgtgggttggggtccttagtctgggtcaaggttctagtccgagtcataggttttgatctgaatctgagtctgaggttaatctgggtctaagtccagggttctgatcctggtctgggttcgagtttgggtcctggttcaggtctatgtttgggtctgattcttggtctgtgtctgagttttggtc

SEQ ID NO: 225832 - DNA, 1743 bp, Cannabis indica
tgctattttttaatggtgtcgatgaaggcttcattaattaatttcatcttgtgaatctataaaggaagcgtgggaaatccttcaaactcagtttgagggtacgactgatgtaaaaggatcacgtttcaccatgttgcaaactagatttgatgaattgagaatgtcaaaaactgaaaatttgtcggatttttatgaataatattactaatgagatttttttttgccttggggtaaaattagatgaatctgtcctggttcggaaaattttctgtgtgtttcctgacatgtttgacacaaaattgctatcaatgaaagaggcaaaagactttggcaaaatgaaggttgaggaactcatgggttctttaagaacttttgagttaaatcaacaaatcaagaaaaagggtaagcaaagttccttgagtgagaaaagcaaaggtattgcgtttaatgtttctgaaaatgctgtttctgatgatgaaatggcctgttgacaaagaatttccaaaaatacatgaaatctgttggaaataaaaagtatttttcaaaaaatccaaaagctaacaattcctctaaaccctctatcactaaaaataaaaagggttttaatgttacttggagtaatgattttgaaagtagtgaagatgaaaaagaaaaggttgctttaacaagtattttgtcaagaaatttacaggaaaaacaaaaattcatttggttgaataataccttgaccgatgacaacaaggaagaagatggatccgactgatatgagtcagaaattgatgaaaactctatggctgaatcttacaaggtaatgtttggtaagtggttggaaatttgtgttgaaaatcgctccttggttaaatataataaagatttgtgtaacaacatcaaagatctggaagaaaaaattaaatgttgtgaatctgaattgatcttaaaagagtctgaaattatttctttaactaaggaacttgaaaacatgaaaaagattgtcaaaacgttaaatccaggttccaacatttttgaaaagattcaaaagtctggccaaactagtcatgctggtctaggttatgtttccactccatctgattccaataccaaatttgttaaatctgatattttggttttggacgaactgtctataccttgcagggttctattatttcagcaaaacactctactgatacagaaaagaatcaacacggtaagtttgacaatttcaaagggaatataagacgattcattcctatttaccatttttgtgggataaaaggtcacattcaacctaaatgtgtcactatgaacaatatgtttaagtctaatgacctttgaaataaacatgttttttaaaaacaaaaatgggttgtcaaaaataaatgtttggtaggttctttatgttttaaaattatttctgctaacatgtaatactttgacagtggttgttctagacacatgataggtggaaaagattatcttgacaacatcagaccaatgcagtgtggagaagttactttcggtaaaagtcttgttggaaaagtcatagggatagcaactcttaattttgaagagcttcctagactgaagaatgtcatgttggtttatggactaaaaaagttgatcttcttagcattagtaaaaaatatgattagggttatacaattagctttgctagtagtcattgttatgtgtataatattcttgatgaaattgtcttgcaagggttcagatctagtgacaattgtt

SEQ ID NO: 225833 - DNA, 2393 bp, Cannabis indica
aataagagcataataaatttttttagttttttttattttgggactccgaaaaatgtggatcttaggtacgggcttagcctgcctatacctaaggccgaccctgagtatatataaaacttagattttatattattgggtttaaatagaaatataatattaattacttttaaattcatcttgtaataaaataaaaaattatactgaaaaataattttgtgctcatgatttctacttcaacaacattttcacttttaacaaataagtattttaagtttttttaagtctttatatttaaaataggttggtttactatcattctttcacattactttttttttccattgtattgtgtggtaatagagttttattttctgatattttgtaggttgttttgtggaggacctacaattacagaaaatttaccaataagtttttaaatatagtctgtttgatattaatctttagcagttttaaattagggtgttagtatgttattactagccaaagggtaatacctttagttagttatacttagaaattttattagttttttagtaacgttgagctagttatatgagttgtgtgttaaaaatctaagtttgtatattaatttttattttgaagattgtcattataatatatctgtgttttttggtttagtgttgcgatattttttcagtgtcgctagctctgacaacaactattaatagtagaaaagtatttttttaatgtgatggggtgttgtttaaagatgttatagctttattgtctaaatttttggggccagttttgtctcatgtggctcgcgatgagaattctgcagcttatggtttggtaaaacatgcccttcggttagacgatgagctatcctagttcgaggaggttccaccgatgattgtggtttactgtattgttaatcatgtgtgactctgttcaccacgtcaaaaaaataatactattttagcattaaattttttttccaattccaactataaattgcactaaaaagtattttttattatattattttatttaattatttagcactaatcttcttccaattccaacccaaaagatattatataattattaagaagtaaaaaaaaaaaatgtccgtggtctatagtgccactcttattagtgggacacttgtagactcctataaaaatatgattagattcaatttgagtattttgtagaaaaaattatattatacatagaattttgccacttgataggagatggccttatgcaactatctatcatatttataaggctaattatgatttttttttctcccgaattttgacatgtaccaaatcatgccccctgaacttttttggtcgttaaaaattccctctaaactattgagattgttatatttaaggacttttgtctattttcattcaattttactattttaatgattgtttgtgtactaaaccatgctccccatactttgatatctatcaaatcatgcccctcgaactttgatatgtactaaatcatgtcccctgaactttcatccatgttagaatatttttactaaaattggataaaagtccttaaattcaacaatctcaatagttcagggggcatttctaacgactttaaaagttcagatgacatgatttggtaaatgtcaaagttcggggagaaaatatcctaattagcctatttataactctcaaaaagtcacatttagcattagttttgggctaaggtgggttaggcttgtgcttaaggcccaccaacccgaaggtcctaaaatattcttataataaatatacaaaaattttgataatttttaaaaatactacatatctttaaaagttaaaataagagttcaataattaattttgatccacattttcagtatcgtccctagtcaccatctataataaatattaacaaaggaatgagtctagccacaataagacataaaagggagacaattctacgtatgatgtggagaatttttccttacatcactctagtagtttagcttaaatttcgcgtgacagtgaaattgtagatttttatctaaaatttaatatttttatgaaaacttctaaaatttatttgaaaacaaaaataagttttccaaagtattaaaatggttttataaaatattaaatactattacttttgttgggaatcaatttcatttaaatggatgagaaaaaaaatactattttggtaacgagaaagtaactttcatgtgatcaacaacgaatcatctcatttattttagtgattatttcacaaatacataaaaacaacaaaaacaattataaaaatacggtttatggaattttaaatatttttacgatttttttgattttatttacaaaaaatacaatctttttatgttatactcttgttaatttgtt

SEQ ID NO: 225834 - DNA, 1378 bp, Cannabis indica
gcaaatgcattgcctccaagtttcccatacagctcgagtgttggcacatctaggactcttgtttgtgtcacggctttctcgcctcagtcaccgtttcgctcagcaaatctctcgtcgtaacaacttggatcatctacaccttctctaccattactatcatactttgcaatttcttcttttgaacccatgcatataatataagtattaagtaatgttgttgttgttgttgctgttgttgttgtgatatctctgatgtaatagtacttgcttatgtaatagtacttttcataagcatgggcagcttcctcatcacctgtgtcaaaagtgattagccaaattcacaaggcctttatcacacttgtttgtttattaataagaatttagcttattttgtgctgtaatggatatgaaacagagtgaataaattcagtatatgattgaataaaatttgttggaacataggtggtttaatactgctgcttagtcataagcatgggtagcttcctcaccagttgtgtcaaaactgggtagcctaaattcggcgacccatctcccacaaggcctttgtcacacttgtttgtttattaatgagaatttggcttattttgtgctgtaaaggatatgaaacaaaatgaataaatttggtatatgattgaataaaatttgttggaacataggtggtttaatactgctgcttagtcataagcataggcagcttcctcatcggttagcctaaatttggccacccatctttcacaaggcctttatcacacttgtttgtttattaatgagaatatggcttattttgctgtaatagatatgaaactattagtatacaaccgactttgactaactatagaaataacagaaataacagaaagtaaaataacaacctaactaactcactaactctaatagaaacaaagtgaataaatttggtatatgattgaatgaaatttgtttttttttttttgtaatacattttcaaatctcaacaaattaagcatctctttaatttttagtattttgagtattatttttaatatctaccttttaattattgaagttaacatttttattattactttctttattttaaatcatatttaatcctataaaaattcaagtttgtatctatttttatatattatattatttagaaaaaaaaatgaataagtagtatttttgccctttgaactttcgatactatttaattttgccctctaaaatatacgactttttaaaaatttcccctaaaatataacagttcataattatgtccattctgttaggttccaattctttcaccgttaaaaattagaatttatatcccctgaaatttgaccaatacaaaattttacccccttttattaaaaaa

SEQ ID NO: 225835 - DNA, 2827 bp, Cannabis indica
gagaggaggaagagggggtagtccggatgctgccttttggtgcgttcaatgaagagggagaacatgtctctaagatgggagaagtcttggaagctgggcaagagtacgtagaggaggagtacactgaggcttgccctataagcaggagagatccaaggggagctcgatgggtttctttaccatccatcctaacgttcaagagattgaccattctctttatggaagacatccttaggcgggttgaatgtttccttccttctcctgggcagctggaaacagaccctagaaatgattattatgcgtggctgggtcctcatgccaagtagggtgcaatgttgccgttgcatcagtactttaaggagattgtcaactactatcatctcagtctgacccaattcactcttaaaggcattaaatacctgtataccttatttgggttgtatgcttctcaaggattcggccagccatccgcctacaacaccaactggttttttgacctgaagtccagccctaagcaaaataagtctggatacttctacttctcctagatccaagattggtggttttatggagaattattattttatcaaggacatggagaccaatcacacaatcttccaacacattcctttgtactgccaacctcccttcacactagaacttaggaagagggcttaagaaatactccaacttccctcagatgctcataatatttctctcttggctactgaggccaatttcataaagtataaactctatccatctgatgatggacaagggggcgagcaagtagcaggagagcctgtgcccgcccaacaagaggaagttgtacccaaacaggaggctccgaagaagaagaagaagtagaagaaagcttctcaaagaaaccaagtacctattgagcagcctatcaagatcagggatggtcttgaggaggctgctcattcttccgtccaagtggtgggaaagggaaaagccattagggttgagtaggaggaagaagactcttttgatgaggatgttccttcctcgcttgtccaggagggtgcccatgttcacgtgcagggtactttattttattcttaactttgtctgcacttgtttgatttacactgttctgacatctctattttactcatgtgcagttatgtctcagagaatgatgcgtgcactaaaaaagaggtcgagtgatgcctctagccaaaagtctcaggtgaggcgtcctaaggttgacgatataccgccaaaaagaattgttccaagcaccatgactccttaactatatattgagaatagctctactgtctcttccactgaggttcctgaggtggcagtttctgacttagtccgaccgtccaggaagaattcaaagtctcaatccacggttgtcccatccattctaaggggggaatattgaagggcccagtctacccaatcctctagccactcctcccatgttgaatccaaaagcaaagaaggggaaggagatgcttcaattctaccaagatcgagtgctttcgaaagtgaacaatcagttggttagggggaggacatgtccgtagagccttttatgggcagcttgatgaaggaatgtacccaagtatgtaattttcctttgattttcttttacatgcttttaatcgttcagactttaattttatcttattgtgcagctcaatctgaagatgtcatatacatacccctgtgccaagtctgcaaccttaaaaaccatgaccaccactaacaacttaaagaaggagatggaggaggctaaaaatgaggttgagctgaagagcactcaactgtgaaaggttaacaaataattgctggctactaagaagctcattaaggacttgaggaagaagatcaatgatattcatccactactcagctcgaagcgaatagataggtcttggctaaggatgtcaactctcttaaggatgagagggaaagcctccacactcttctttatagtcttgagaccaaggtcaaggatctgaccgaagagaagaggagtttgtaggagacccttgagtctaagtggataaattttggtgctgaacaggaggtgcttcaaaaggaggtggaaagcttagagacgattgctctgaacctcttctatgaatttttgagggctaacccagaggccaactttgattacctcaatgaaaataaagaggattatctaagtttctatgaagcctaaaaggccaaggaagatgttgaggcatccaacactaatccttcgactgaccaagacaatgaaaccctagccgctgatgatgcatctgatttgtacaaagaaccagggactccaattgcatgaattaacttctttttctctattagtttggcctacgggcctatttttcagtacaatatagctgaacaagtggtttttaaacttgaggaatatttcattttgttttaaaataattggctggtcaggaaacttttaatcccagagttatcatgctttgctatcttttagaatgaatattttctcttaagtctaaatgattgcacatgtaattatttttatttttcaagcttgttacttacctatgctttgtatgggtatagttgcccccaagtgaccgagcagacttatgactcttggtcacttgtattgcacaagtttaattttgtctgtccagctactaggtttgggcaaaccctttgtatgcattttcaatggtaattacataacttgctatcaaaaagagataaaatgggcacaattagaataataattaatatctttatttatttattggtctagatgtgctgtaaccatagtaacgtatatttattgaattatgaaagc

SEQ ID NO: 225836 - DNA, 2450 bp, Cannabis indica
ttattttgatagcacgcttattgatgaaatccttcatctcccaatctctggcataaattgcaatgatactctaatttgggaccctgatcctactaggcttttcaatgttaaaactgcttaccatctagccctcaaatctagagatatgcctacctcctcctcttttgtttctagcaagtcttctagtccaaactctggtctttagctgcaccccctaagattaaacacctaatctggcgtgctctttctcattccatccctattgcctcctctttattttttagacacatcattccttccccagtttgcccaatttgccacttgaaaacggagactgtggaacattctatcctgggatgtcatcatacaaaaaaaagcctggaaacattcaaaaattttcaatttttataatacacataagaccagtaatttctacttgtttattgctagtgatttagatttacataataaatttgatttggctctactattttgtttcatttgatcaatctaaaatcaacgcaatattattttttataataaaaagggtttctctccacagcaactatttgggactatgtcaatgcccatgatgaacagttgaagttgtctactcatgagaaaagcaagaaccagcaagggcgtttccccctggacaatggatagttcatactgatgcagccatagattttggcctcaagaaacacagctatggagttctagctacagatgttgatggtcataccacagcaggttttgcgactctttgttcaggtgtcattccccctgaggtggcagaagccaaagcaatcctagcaatcctcgaatggattcaagcaatcaagcttcctgtgtcaatcattgcctctaattgcaaaagtgtggtagataaactacacaactgttactgcaataattctgttcttagtgatctggttaattgtattaaaaataacttgcttatagtttatgtaccaagagacaagatagcacatcatcatgcaaggcatgaataggattagacaatgaatgtacttgaaatggttctctaccttcctcattgacctcattactttgtactaaatttctatttatcaatgaaagttctcaggttttatcaaaaaaaaaagaattagttcacaatatgctcagttcatgaacaccatttaatttgaattcaacacctgtgactaacaatgccactgcaatattagaaaatgaacacgtgatataagtaatgaggaattatggacgaatgaataattttgaatctatcttccaaacatatactattcaagaataatttatttattttggtgtttcaaatgatgatactcatccatgtcatcttactcatccaagcatcatctttcaaaaaagaaagtagtgtgaacttttctactctagcaaaaataacttctcgcatttcaagttaaaacggtccaaattgaacataaattaacaatccaaacaacaatctatgaaaaggagaaaagatcgaccataggcaggggaaaataatgaacgaagatgcaaaattgtttatgtaataatgtaaaatgtcgtttgaccaactacactaagaaatctagaatactgaggttcataactgatagataataaaaactcttgttgaagggggaataagagaaagagaagaggattacagacaacaagtcagaactcccagtctcccttctcacacttgaaatgtccaaaaagaaaaacaaaactaacaccaaaacaaaacaaagtctcaaggtattcaaacgcacaaatattgaatcactgtgacacgccgagccatttggtgaacacttcaaactcggtgtagtcagaatctgagatcatagtttggtaccaagcctttcctgcggacttgatggcggcagcttcctcctgatttattgacaagaaagtaattaacaactagtcatttgaagagaggtcattacactatcacaatgaaaagctttttaactaaaattcaataaattgaatcattataatcgtgatattaagagaacaaacaaaagacaaaccatttaaaaaaaaagccactcgaatgtaaaaacataagtaataaaaatattgcggcgtaaaactatatatcagactgtcgtgacaaaattaagtatacacatttggcaatagttatgattgtcaatgaacataaaccacaacatcatcaaacaaaatgtattgttagaaagtctcgctaatacaaccaatcaatcaatcgtattaaaatttaaccaatagataatactttgactgcagcattcaatctcgataaaatcacatcatgtaaagaatcccatttggctctacttataatctaaccaggcaataacagcatagcaaagcatcaaatacaattcaatttaagaaatcaaacatattagaccaatcaatgataattttagcttaaatgaagaaaagtattagta

SEQ ID NO: 225837 - DNA, 1455 bp, Cannabis indica
aaacactccctcatcagaacccatcctctcctccacctttacctgtaccggagccacctggacccaaacaactgatttgcccgtcgagatgaagctatcatccacttcccatatggttttgtaatagaatctaatggtatatccaaagatttttcacaaaacctttcagaatgacccatgataccacaatgaaaacaaaaggttgaaaccttttcatatttgaacgtagcccaaagcacctcagtgctatctttcttccgaatcttcatacgccgttttaacggcctctcaatagacaaagttgctcgcactctaaggaaatccctccaaacacccgagaaattgttcgggtctgatacaacaaagcctccaagataagtgcctgcagcctttacaaccgtctccgtcatacatcctggttgcaaatcatgaatctggacccacatctccatcttgttcaatttcacagctttcggattgtctccttccttcaacctttcaaggattagatgtttacgatcaaaagtccaaggactacccgtgagcactcgagtaatgtccatttcatggtagaattgaaatagaaacagattaggactcaattccttcacatacataccccggagtggtttccataaatctgccataaagtgttgaaatatctgaaaatctgagacccttcccgttaatagacgtccaactagacaccagcgagtatcaataaccatttctccttccactgggccttcaaagatgaactcctccccatcttcttcatccaatcgaatccctgtccaagcatcctccagttcccttaccacatcactacttgacgccataatcagatcacagcaaaatacacacaacaaaatacacacagaaaaacaacctctctaagcacgagagactacaaacatgtcagaggacatgactttatacttaattctttttaattaggtttttcatatctactgtgcaagtgataatttcaaaaggaccatgataatttacatcaattaggtttttcgaaagcaattaattcaaagtctatgaactcttgaagaaagaaaatgtatgcacattaatcacattttagtcatgggataatttcattacctaaatatatttgcaaggccgatctcgatgaggtgggcattgtccttgattgcatcaatgtgtattgttcgtggtctgggcaacgtttgaatattcagaaaatattatcttctcaagtaatgcaatccaaagcattcaacatgagattgcagatcgtcttggttttttgcaatccaaagagtaaggtgaaagatttaaagtttattaaggagaatatttgttctaagatagaacattggtgttgcaaacttttatcccaagtgggaagatcaactcttattcggtatgtggctcaaagtaccaagctttacaatatgactacttttttattactgaaaa

SEQ ID NO: 225838 - DNA, 2276 bp, Cannabis indica
gcatttattataaatatgaaaattgtgtttgcgctattatatgttaatatgtagatgacttgctgattttaggatcaaagattcatgtcatgaacaatgtgaaatcagtgttatgtgaaaattttgacatgaaagatctaggtgaagtaaatgtgatccctggtatactaatcactaggtctaacaagggaatttctttagatcaatctcactacattgagaagatcttaaagaaagatacttacttgaactgtaaacttgtctgtacaccatatgatctcagcgtaaaattatttaacagcactaaggatggtgtaagacaatttgaatatgcaagcataattagaagtcttcgatatgccactaattgcactagacccggcattacctatgtcgtggattattatacatgtttactagtagacctagtgtaaagcattggcatgctattggaaggatcatgaaataccacaaacgaatcttgaaccttagattacattatcaaaagtttccagctgtccttgaagggtacagtaatgctaattgaagcactttatcagagactccaaggcaaccaatggctatattcttagcgtagttggtatggctatttgatggaagtctaagaaacatactattttggcgcaatgtacaatgaagtctgaaataattgcactagctattgctagtgaagaaggaggttggctgagaagcttgctagttgagattcctttatgggaaagacttattccaactatgttgatccattgcgattgtattgcagctattgcaaaagttcagaactgctattacaacggtaagagacgacaaatacgtcgtaagcaaatcacttttagagagattctctcaacaatagttgttggagtggatcatgtatgcactaatgataacttggctgatcctttgacaaaaagtttagctagaaagaaagtccttaaacatcgaaaggaatgagactactactcttagattgattaatcactcgtaatgcaaacccaacctatagactggagatcccaaaaaataagtttaacgggtaataataagttatgaagtgataaaagtgagattatgctataattattcgataagagaagcatgaattcctaaagcggtttaaggctgagttaatagaagctcttaatgagttttatactccaagtggagtagagtaccgagctacaggagtactcctaattgactcacctatgtgaatgtgtgagtgggactgcttcttatgaattggcgaaatttctagagcgttcactatactgggatagacgtgcatggtcattaacgcacgagcttttgactacacccttgaaaaggctattgtgtggtacgatattaaagatagagtcaaagactacaggtcactctagtaaaatttaaatcatattcactacgcaaaggtttaaattgaaagatacctttgtttatgctcaatcttattgctgaatgatactgttagatagaattattttttaaaaatttaagtgaggattgttgaaactttttacaaagttgatgaaatttcgacaaattaagagagtgtcctagtatgtgtgaaatagaaaaaagtcttgcatggaatatgagctcttatttacaataatatataaaatacaactttggcacttgagatagagccctaagagatatccagttttgtgcgaatgagtgacgaaacacacattgaacccactacacgtgcgtgcgcttcattttactgacatattcgtgcgagctagtgtggtgtgaaactttattttttataaaaaatttatttaataaataattattttttattttattattttaattatttgaaaacgtgtttcattaaaactctaggggcgtttggtataaggggttcaaaataatctgattaaggggaatattatgaaggagaatatgattacttgtaaacttattactgtgtttggttatatccatgggaatatctaattagattactgttaattagattatagtgtttggttgagcacaagaatcttatatattattgtagaaaagttaaataaaataaaatagtaactattatatctcttttatgttaattaaatataaaataaaataaatattcataaaaaattatatatattaattaataaatttgatgtcattttatttgagattaaattaaatgaatatcattcacatatattttttttatatatattttttatatttatttatgtaaattattatagtaattgaataagtatagataa

SEQ ID NO: 225839 - DNA, 1772 bp, Cannabis indica
gaatgattctttgtttcattattgaatatataacaagactacatttttccaagtattactcgcatcttcgataagaaaagatggagtaggttcaggttagaaaataactctataaatagacttggtttcatggtagcttatatcacaataactcgcttataactacagaatagaataattatttaggagaccttagccacttaaccaaaaatgaagagtgctcatttccttctcacacttgccatatttgctttggcatcatccattgcctctgcctatgatcctagtcctcttcaggacttttgtgtagcagtagacgaccctgaaaatgcttgtatgtaaacgcactactaactctctttactcgttatttaacatagtttatgtatagagtgcaattctttcatgctaactaattaaaaagtgtttattttacagtgtttgtgaatggaaaattctgtaaggatccaatgcaggtcaaggcagaagactttttcttcagtgggctggacactccaagagacacacacaaccctgttggatccaatgtgacacaagtgaatgttgacatgattaaaggactcaacactcttggaataacattggctcgcattgactttgcaccatatggccaaaacccgcctcacactcaccctcgtggaactgaaatcttggtcgtccttgagggaacactctacgttgggtttgtgacatccaaccaaaaagatggcaaaaaccgcctcttcacaaaggttctgaacaagggagatgtgttcgtgttcccaattggtttgattcatttccaattcaatcaaggacacacaccagcagttgcctttgctgctctcagcagccaaaatgcaggagtgatcaccattgcaaatgctgtgttcggttcgaaccctcccatcaaccctgatgtccttgccaaggccttccaggttgacaaaaacattatcaaccatcttcaaaagcagttctggtatgacaacaattagataagctaaaaagatgctgccatatgatcttgtaatagtgactctgtgctactacttaaataattattcatatcttaatttccagttatagtgacacattagtagtcattactaaataagaaggtcccctatgtacctttcatttactgaatttattaatataaaaaaagaatttagttacatataactgataactagaagcgaatcttgtgtgcatgagtgtgactttatcctcaaactattcatcaatcactgacggagccactcttgagactagctagggggcttaacacaattgcttacatgtatttttatacatatattttcacatattaaaaaaaacaattatctatagtaattaataatcctcccccccacaaattagtttttttcacaaattgccccaaacatataaaccctccctccgtcaatgacatcaatgattattactgtgacggaataaagtatggcaaaacaataaaaatttgcaaatgaaatatgaaaaccacacacattgtgttaacatgcaaaagagaacgaaaaaaattaatcatctcacgttttctgttacacttttaattatttctccatagtattcaacaccaccatcttttaaataatgttggtgttagacacagtagtaacctgtagctatattcaaatcactatataaatttagggaaatttcaatttttgaccctaataatacaacctatatcaaaatttatacccctttataatttgtacaaatttagtccattaattacatgaact

SEQ ID NO: 225840 - DNA, 2649 bp, Cannabis indica
gagagagagaggtttcttaatttaggttttcttcttattttcttaatttactaaaaaaataaaacaaaataaataaatatcaaaactaatattaaagcctaactttcagccgtaaaacttaaataagacaaaatagtattaaacttatgaaatgattattctaccctctcaccacacacttaggttaaacaaaacttaggggtatttggttatttctaattttctcgatttaacctacgtttcaatattttaacctagttcggtataattctaatataacacaatttcaaccaccgtgacatttctaaccactccgtcgacttttccacggccgccaaatctgaaaatattttattctaaaaatggtatccatgatacccctatagtccaataaaatctctgtaattaataaattacgctttatttaatcatttattaaatttacactaattgtcacataattagcttaagtaagaccataatcttattcaagtatcagcataatcacatatttaataaaatatgtctaattaaatataaatatattttctgagatattacagtaatgtagagagtagagctttgcaatccacaactaacaagccaaaacttgagaacattttttgctaactgcgtaaagcttgcaccgatatcatgctatcagtctcaattactacacgttcccagtgtttgtctttaacccaactgatcagggtctctttgattgccatgacttcaatgacttcaactgcaaaattagcaccataacagccagagagagctgttataaggttgccaagatgattacgagcaacaatgctgaagccatacttattttcttgttctaaagtcgttgcatcacatttatcttgattgagttttcttcaggtttggaccatagctcagctccatcaccgttttattcgagacacggtgaattaagagcgattttatcttgacattttttctattgatcaagagctgctcttgcagatgcaattacttccataacaaatgagcttttcttcttccaaacaattttatttcttgccttccatatttgcgcaacaaatcattgcaacactatacacattctccttcgaaagtatttggttgagtagttccaaccagctgcgaaaacttatttattcattgattagtatataatgtcaacaaaaaatgtgatgagactatttatacattaaacaaaagcagtctagcataattatatatatatagatcagacgatttaatgactataggctcatagattagtagtactataatgtagatatgtatagctaatgattatagcagtatatattaaggaaaatataaattttttacattttatgttttaaattgtttatttacattcttacaaaattttataaaaataaaaaaaaataaatgataaaaataaaacacaaaaaaaaaaaatcaaaaaaaaaaatatataaataataaaaaaaaccaacgacaatacaatcacaaaattataacataaaaataatataaaaatataaaatttataatttttaaaataaaatcttaaacaacgtaaaaaaaatctataattttgtatcactgtgtctgaaaagttaactttttctcagcagaagacaaagcccaaaatttataaattttggatgaataggagattttataaaaatattgttgcctcatagaaaaatttatatttttactgccttggctatgtaaacaccgaaaataaaaaaaaatggggctaccattttctacacccacggacaaaaccaccacatcaacactacagcagccgaaaaacaaatattaattccggcgagatgaagcaaaaacattaaaaccattactgggaatgtcatagtttttctaatgttgtttttgggttgttttactattgtctcgtatgtttaataaatgttggtttaaaattacacaggttaaaccaaccactaaatatttatttgagataaccagaataaaagaatcatagagagtagacctcaaagagagaacacacacgtacaacaggttactagacaagcactgttcagattacgacaccaagaaaaattgactagcaactagttaaggaacagtgtacccaataggacactaaaatgagttggatgtagcacaaaatgtgaaatatgtaatagtcttacctcccattgaaatggtgaaaggtggaagacaaaaacgaaaagaggatggaagctggctggaaaaagaaacaacataacaaatgtaacagatgtagggagctggggcacaacaagagagcatgcaggagaaaacatcaaaaataaaaagaatcagaacaactaaaaaataacagtggaacaatggaggagaattgaacatatattggagcataggatactgaagaaaataacttacatataaattttattatttttctattactattaaaagtagagcagtacaacaatatttagaaaatgtaataaataaataaaatcaaacaaaagtaaaacaaccttaaaacaataataaaataaaccagtaatagaaatatatatttaatcttaaataatccaacagaaacatgtttaacttgaagaactaaagaacatgaatatagaaaaactacttatagcccagaatgagagagagagagagaga

SEQ ID NO: 225841 - DNA, 2094 bp, Cannabis indica
tggctaatgtaacaaattaaatatatagtatacaaaagatatattttatagaataaaattatatacctacaataattaaaaataaaatgatattattaaaaatatatatatcatattaataaaattatatattattattaaaataattagggcaagcctataatacactctgctaaagggatgttttagttaagaatgggtgtagtgcaatttcacattcttctctcaaccagcccaaacccatattgtcgattagcaacagtagtactgtagtagccgatctagtaaccatcccaaaagatgaatttcactatcgttttttgaggccatcaaaattcttgactaagtaaccacttcaccagtttagagttaggtctgacagtgctcgaccaagaaggatagagaaagaggctactgtgacagccaatcaagaacaatactcgatgaaatcaccataacaattctcgatctcagaaataaaattgtcatcgggtaatatttgatttttgtttgataactttgacgagcaggtatgttgggatagaagtatttgcagagtaatattattataaaaactaaagtaattttttatttattcctaatttaattgcagatcaacttttttttcataattggtttttataaaatgataaccataattggggattgtgaaattcagacgagagagaaagaaagagaacagaattgaaagaaagaaagagttgttttgtctattgattatagttaggaattacaagggattatatatacatgtgaataaccaacaactaacccctaactaacaacctaactgtcaagacaaatagtgcttaatagaattaacagacttaaccaactcagctcccttaaacagcccccttcaaactcaatgtggtgagagaaagaacactgagtttggacctgaattcattgaacgtgctgctgctatatgtttggtgaagaaaccagcaagttgagcagagacagggacatgtttaacctgaatttgctaccaaagaactttgtctcgaacaaagtacagatcaatttcaatgtgctttgttcgagcatgtaaaacagggtttgcagccaacaaatcgtactctgattgtcacaccacacagatgtataggcaaggatgcgaatttgaagttcttgcagcagtgattgaatccacacaacttcagcaacaacactggccaagcttcgaaactctgcttctgtggatgatcgagagatggtaacttgtttttgtgacttccaggctatgagattacctccaaaaaacacacaatagtctgtggtggatttcctatcatccaattcagatgcccaatcagcataacaaaacacatctaacgctaaatcaggagctggtttaatgtaaagatcatagtcaagagtgccagcaacgtatctcaagattcttttcactgcagtccagtgtgaaagcaaaggtgagtgcatgtattgacatactttgttaacacaataggagagtccaggtctggtaatggtggtatattgaagagcccctacaataaacctgtagatagtggtgtcaggagctagttcactaccatagctggacaactttaaaccactgttcattggagtcagctgtgtgttgacattttggaggtcttggagatattttgtttgggagggatgaattccagctgcagttctagtaacctatatccctagaaagtagtcaaccaagccaagatctttaaaagcaaacctggtgatgagatcagtaacaagggaatcaaccaagcagtcatcacttcccatggtaaggatatcatcaacataaaccagaacatagatacaactggtaatgttggctttgatgaatgagggatcagacttggagaagtaaaagccatactcaagaagaacagtagagagtttggcaaaccaatctctgggagcttgtttaaggccatagatagtcttgtaagtttgcaaactctgttagggtattgaggatcaacaaacccaagtggttgaaccatgtaaatttctcttcaaggtcaccattgagaaaggcattgtggatgtctagttgtctaattttccacccttttg

SEQ ID NO: 225842 - DNA, 1117 bp, Cannabis indica
atttatatgtatagaattcagtagtaaaattgcataaaaagaattaattgtgacaatattcccatttccaattaaagggatggtagtagacagtcaggttaaagggagaaaggaaaagattgagtagtgctgtttggtaggcgacccaaaggtcgagggagagaggattagaatgtatatatgagtcctaacctacaacagaaagtcaagcatacgcaaaagtttgagagctgatgtgaccaaatttgctagtcgctcattttaagatattcttcttcttgctccttttttttctttggaaaggctgtttttaaagatattccaccatgacataagccctacgttcatgagagcttaactgtctactagtaactttttctgaagctacgtaaataagtaaatgttgtctctatacctaccaagctctagctgtctttttctatttttcttttattttgacaaataaatcaatttttatttttactttttaatggaacaattgatcaattccctataattaattatcttagattagaattctcacgattatttttcgttgggactttaggaaagtagacaatagagaaaaaaaaaagtacatgacggaaatagttgttactgaactgaacagtttgtttttggtcgatgtgtgtcatgaaaaagaaacatcagtgacgactatatgttgtcactacgctattttttttttaaagaaaaaatatagcattacttttccttattttttttctaagtaaaagttttatgttataagattcttttagatgtaactttaatattatttcagattttcattactcgatagttaaggttgattaggttttcaatccaatattcaatcacaattttagttttaaaatatattagagtaatacattcaaaccaaagataatgaaaaaataaattcatgaagtcatacttgaaaactaccaattaaatccaaaaagtgtaaaaagaaatatcccaaaactgtaagcgagaaaaacaataaattaaaaaagaatgtacatacataagatatatatatatatatatatatactaggtgattgttacgtgccaagccacgtagtgttagttttatttaatattttagtttt

SEQ ID NO: 225843 - DNA, 2800 bp, Cannabis indica
aaaattttcaaaaaaaaaaatatggtaacaaaagaaatcatgcatgccaataaatataatcctaggtacataaaagaatcactcaaataaaatcaacttattattatttttttgaagaaatttttgttcggaactgaacttcgacatgaattaaattatgttgagttattgggataatttaaatttaaatttttgtcattttttattaacgaaaatcgaagctggatgaaagttgatagggctcacatatcaaagttcaaagaaatttgaaagtcctaattactacgaaatctaattgattaatctcaacagatgagttctaagatctcaaacagaatttaaaatcaaaaaacacggaatttataagcttccattggaaacgcattccaaccgagtagtgcttgggttcccttgaaccggcgggtaaagtaacatccacaataaaatcaattcaattacaaattccaattctgattatccaaatcaaacaatgtaatcaaaattgacttttacacaatgttacctaacacttgaacacactcaagttttgagatctaaactcatttagatctcagtacacaagaactccttgcaatctcacagctgaacaatcttcaatacagaaatctgaactcccttcagatcaagcagattcaatctccatcttcaaccacaggaagacatcaggaatttctatctgcaaacaacaaaacaaaataaagaaatattttattgccctagcagagcaagaatcaagaagatgattctaaccgaagagagttagttagaaaaacaaaagcaacagaatatatatcctgaagataataaaaatcgactaactaaccaaccagctaagtacagctagcacatactaacaaacacataaaaagttgacatggcactaaaatagagtttagcgagatcagatgcaactaaccacatcaaagatgacaatagacaaatactaagacagataaactgaacacagagtatttacataatttgccacacaaaaatatgacacttacagaattgtttgtagatatcaaagttttgagggcacgatttaatacataaactcgtcgtgttagtgaataaaattagacaaaaattcttaaatccaacgatctcaataatttacaggaatttttaacggcctaaaaaatcaaaagacatgatttcttatttgtcaaagttagaagaacaaaaatcttcattagttttttttaaaagagatttaaacttgctttttgaaaaaagatttaaacctattattaattttaaatatatatcattttgaacttcttactatatatgtactatatatattttcagcacacatcatcaaagttgaaactgcatgcatttaaaaatcccttcaaagagaaaacgaaaagaaaagaaaaatgagatcaaattataaggggaaaagacaattacacaaattatatacattgaagtcttttcataccaaaccaaaaattataaacaatatatcagaaaagtcttgtatcttcagaaatgaaagctaaaatattattatataattaaaattaaaagtcttctaaattataataatattagacctgaaaatagtacggatatccgtatacacgtgattcaaaataaaataggaaattcttgccaaacagagacaaactcccaagaaaaatgtcatccatgatatcattattattatttatttacttacttattatgtattgtaataaatttaaaaaaaaaatcattcttatcaagtgaatggatttatttgcttgtccaatataatccatggattatatctctatataataaacatgaaaatattccaaagtcggtcacgcaacctaaaacataattaattataaataattaaatatataattattattggtgcaagacaactgtaattacttgaccattgctccattaccatcaacccacttttatcaataatatattaattaataattcctaattaaagatatcatttatttaaagctattttccaattttctaaagaaataataactcgtaattattctagatttattataaacaaacatcaactacgtaatcaaattaattagtctaaagagaaagaaagaaaaattaaggtaattgtgcatgaaattctatacaaagagcgatcgacaattaacacttttctttttgttttgttaaagacaattttcctattttgatccaataaagtaaaataaaaattgtaaataatacatttagattctatatcttacaaaagttactgattagactatatattttgttgaataggttttgtatttataaaattttgcatactgaattaattttttatcaaaagaaaattaataataatctatatatgaaaaaattgaatacatttcctttatatgtttgttctgaaaattatctttaaattacttatgtaaaaaaaaaagttatccaaatttgatcgctcaagtacagtttttgtaacattttataaaatgtacagtttaatttattattattatacaaaacagatagtaaaaaatgatattaaaaaaaactattcttgtcacatattacttaattatattaaattaaaatatgaagtttattgaacacctgtttttaaggtttattgaacacctttaatattgtatgatttctttttaacacgttaacatttttccataattaattccttcgtatatctttctctaattctcattattcttcttcaaatatagaaaaacaaaagcacaaaagccaaaataactctcatatatcattcaaaataaaaataaaaactcat

SEQ ID NO: 225844 - DNA, 2703 bp, Cannabis indica
tgtgagtcactagtcacgcaattaatacaatgcgtgaccacatccaaagcctatatatatataaatatttatgactacaaatatatataaaagtcttaatttaaatctaaaaacccaacatatattacatctcaaacatgaaaacaaatatatgtatatggaaataaagatattggtctaatctctctaattttatacttctacaacgtcaatggctccgacaaaaatactccagatcgtcttggccaccaccatttttaatgcacagagcaaaaaaaaaaaaagttgccaatgtatattcaaagaccttatggctgctgccgataacgaacaccagcacaaggagggagacacgctaacttagagcttagaactgcaacaacgccaaggacaaggatggagaactaagaaagaagggtcttaggttcttacgaaagtataattaccccaccataaaaccttagttactgaaaattaaaactaaaaatttgggaatatgatcaaatatcgagttgatagattccaacggaggatgaagaagagggaaaccataattacttgtaaggtaaagaaactactttcacaacgaatccattacgaaaaggaatgaaaagaaaattgaaaacaaattaaatacagattgctcataaaacataccataactggtttgaaactgaattaatatgaatccattgatgaaatactcacacaatggcatagaacttccaaaactcccttcacttataccaagattataaaggagaaaataagaggagaaagagggcgtccgaaggtgcaattcatagggtagagagagagagagaagaagcttaagcagcgatggtggttttgagagtctctttgagttaaaatgtaagggtaagagtaatatacggtaacaatttacgccaattaaaactaattaataggtttaaataatactaataaaaattaaaatacaattacagaataaattttttaaaaaatcacaaaaattaggagaagctagattagtaaacaattacaattaagctgccacgtcaaccggtttagtgcattccttaagtcattaaatgtgatataaaaaaaacataataacgaaaagtcattgctaaataattgaaaggacatcacttaaatcattaaatggttaatatttatttatattaaaaaaattgattaaaaaatatttaaatatgaaaatttgagaaatcaaagaaaggattaagaaactccactaaggtgccacataagctctaataaactttactttatattagatatatagatatatagatttttctcttaaaaaaaattggaaaaaaccccgaaatgcaaccaaaaccaaatgatcgaaaaaaacaagaaaagataataataatgacccgaatccgagacacaaaatgctgaaaaaccctttctcaatccacgtagacagcagaagcttccaaaatccacgtacacaacccgttgttcttatccaaactacccattaaaagatgaacacgtgtcccatgagggccggagtgggccccttatttctgcttttatctttggaaaccccgttgcgacttgctatatcatcaatcttattcaatagccctctgtttcccaatcccatttctagtacgcccttacccaaatccaataggcccctggtttctttactacgccgctatatataaagcacaaataaccagccatacctagaaccataacaataaccataacattttctcacaaccaaatcgaaaatattcttctttctcaccattcatcagaatcttcacgtaaatctccttgtttacttttaagaattttaaaatattgatgagcttgaggtacgcaagcagagttttgtatcaggcagggaatcgggtggtgcagggaatgaaggaccagatctcaagatgtgattcaacggttaagatctctttgagagattcttcttcaaagcagagtagggtgttctctggaggagcagctgattccacttctgctttcaaggctgccaaaaacgacacacataattataagcaggcggaggagtctcttcggaccgtcatgtatttgagttgctggggtcctaattgaaagttttatacctaatcatgtttgtaaatacttggtgtacatatgtataaaccttaaccctcgatccttgatcgtctcaacatataaatattaatcaatatcttttcgctccttatatttttggtgactttttatgcatgtattgtaaaattctgattttcgattactctcagcaaaaacacacgtcatatgccaatgtatcatgtgtatgtactaatggtataatttgattttgttattatgctatgttaatagactagttattaattgaagcaaaattcttccttcaattttggcaaaatttccttaaacttcttcatagagaagattcaataaagtgtgactgtgatgtcacagatttgttaattattttttaatgagctttactacattgtttatctattattatttctcattttcagattttatataaattaacgctaatctaaaataggcggattggattaaagctattcatatctttctttctttatcttggtgaataagaaatatatgtataaaactattaatgggtaatgatttaattgaattttcttttaaggaaaatcataaaataaattagattttaaggtcattacaaataataag

SEQ ID NO: 225845 - DNA, 2197 bp, Cannabis indica
tgaaggagttggtatgacatttgctttatccaatggaatagtggtaggagtaggagcaatgggaactgaggatgggacactaggatttaatggtaaagcatcagaggagggtggcaagggaatagacaagtcacgggtttcatggtttgtagagtgtattacaaggtggtacagggataggcatggacatgtcattgtttggagataaagtggatgaaggagtcgttgggatagggacatgtgatgagtcatttctaggtagggagggtgtctcgggtaaagggtgggaattgattaaagatgaggacacattgtggtcaaaagtagtaggtatattagtgtttgaagataaaggtgtagtattaaatgtagtaaaaggaaaagaggttgagtgagaggattggacctgatggtcaataggagaaccttttgcaggataaagttgttcattaaaaacaacatttcgtgcaatgtagacacgcccttcattattttcacaaatgtatcctttatggtgattggagtatcccaagaatagacattgctgggacctataatccatcttatggtgattgtaaggccgtagatgaggatagcatgcacatccaaatgattttagaatattgtaatctagtttggtatgaaatagagttccatagggtgatagataatgtaagactctagtaggtaacctgtttataaacacagcagcactaaaagcataccaccaataagatagatccaaaccagattgtgcaagccaggttagcccagtttcagtgatatgtctatgttttctctgtgccctcccattttgctcatgagttcttggacaagggtgttgaaaatgaatgccctgatcttctaagaactttttaatgttctgtactctcctccccagtctgcttggacagacttgattggtagattaaactgcttttcaaccagtcctttccacttgataaacatattaaaggcttgagatttctgagttaatgggaatatccatgtgtacctactataatcatcaagaaagtagacatagtatttgtatccttgtttggcatcaacatgggatggaccccataaatcagtatgaattaaggctaaaagttggttagctcttgtgtcagaagtggaaaagggaagtgtatggcttttacccaactaacacgcatggcaaaaggtgagatctttgatggaaccagtgtgggaaagagagggtaaaagttttatgagagtgtttatggctggatgaccaagtttgcaatgccatgaatttacatctttagtggtaaaagaatgatacaccacaggagagtaagcagcagaagtagatgttttattcattaaagtattagtacaatcggttgcttcaggagcatcatgaatattattcatgttgttacagacacattcattttcagaaaagggactagacacaagattgcattgtagtgtagctaaagtggatgatgcagagtcatctcccaactgatatagcccatctttaaccttccctttgatcagcacttgtccagtttccttgtccttgacaaaacaccaatgtttatgaaattcaagaaacacattgttatcttctattagtttagaaacactaactagattctttttaatggaaggaatttgaaggacagaatttagtttgagggagtaattatttaaagaaggtaaaatagatgagccaacatgagagatacagattttcttaccatcagctacagcaagtgtttcgggtccattgtaggcagtagatgtgtctagagtctcaagattatttgtgatgtgattagtggccccagtatcatcaaaccaagagaggtcatcaccaaaatcaggcaatacagtaagttgatgagaatcatgaacatcacactcagtaagataggcacggggggcaggcacattcggtttgggtgttacccaatttttgtcaaatctgtagtggcacacagctggatttcatgcaaacttcacaaatcaatctagaattagagtagaagccacgaccatcacctcgagtttgattcttggattgattgtcagtaggtgtatctttgccgtgagcttgaaaaggcctgaaatggtcatttcttgaatttctcaaggcaagattggcttgcattttcagtgtgagttctgaggcagaattatgatgatcaaggcggctctcgtg

SEQ ID NO: 225846 - DNA, 2088 bp, Cannabis indica
aattattatttattttcataaaaaataaatttacagtagtaagtaaattaaaatagcttatttacacttgatattaagaattttgtccattgtatgtacttctatttagtgtattatttaaatgagtcaaacaaattaatgtgtatataaatcaaatatgcaatactaatcaggttgatcaatatatgtggatcgagttagggtgaccaattagacataacaacctacataacatgaacacaaatatgacacctcgacacaaattttcacccctacttgtgatattagaaaatttgatagttttgatcttctcacaattgacaaatgataagcatttatgggcatgccatgacatgacttggctctagttatgaataattaagtattgtgttgctctttgtttgtgctagtgagggtggtttctttaatgccataatgagtttcccctccaattacccaaacagcccaccaacagtgagatttacatcagagatgtggcatcctaatggtaaatcacttcttgatgtgttttgaatttgtgatcaatttaacttcttcccctttgtaagttccttaaagtttctgtcaaaatttcagtttattccgatggtaaggtttgcatttcaattctccatgctcctggtgatgatccaaatggctatgagcttgcaagtgagcgctggagtccagttcatacggtatgtatttgatatttcaaggcaatcactaccttcaatatcatagatattcggtattgattgtttgacatatggctcttttcgtttgtgccttttatgtttgtgcatgttttgttaactgctttcattgatatgaaattatagaaagtatagttgaagtttatggtagaaaccatgtatggttggacagatcgttctatttttaaaaaatatatattagttagtatcagcaatggcagaggcacctttggatataacaatctcagctacggttctgagtgtaacttgcttgggatgagtctgaaagtgaaaacttggaattgcacatgtgctttttatcttatcgactttttgatcgtctaatgttagctctgattcgcagtttaacttggtggtggctaattaagaccgaaggttgagatttatttccgagacaaattgaacacttgcaatatggatctcaacctaggcccagattgaggtgcttgtttttaattctagcacaactctggtttgcagggattgcttgagttgagtgcttttattttttcttgcactgcaattgttcagccttccccaagcatgagtaattgaagaaccatttaactggaaaataacttttttcattttagtcaaacaagatgattgaaatcatttgtttgaaactgcatcacataatgtaaggtgctaaagtgcatgggttaaaagacaggtcgaatatggcatatgctcgaatgtgtttattggtttcatcactgtggattatatttccactgctgcatataaatttaggttgggttataaagggaatggaaataagacctaaggaggatgggaataataaaagtgtgtcctgttacatttcattcatgtgttcatatttaggtaacaaatttttaaggtaaagctcaattcgttgttcttttttattgttctaataatttttctttaccattactttttgtaatcatgctctcaattggcaaaattggatcaagccccacacttaaactagcagaactggaagtttcactttatggaacttttttttctttcgaataattcactttatggaacttaagtcttcttggttgttctaaagtagtttacagtgcttgaagtttaataataaactctacttatatagacatttgattcaatttaatatagaaaagtatttgaataccttgagtcaaagattgatttcaaagtttcgtgtgaaaggacattttataactttgaatagtgtggaaggttgggctatgatggatttatttaaatattcatagccatgtcatctaccctaattgtagcgcgaactgcatacagatggccaatgagtggaaattgcattgcagaaaattcaattgagttgtagattatacattaa

SEQ ID NO: 225847 - DNA, 1970 bp, Cannabis indica
gttgctcctccgaccaccgaacaagcttggaatcatcgccatttttcttttgtgtacaggaatttagaaaacttagaaaggtgagaaagattgttcagaatatattacgtctgtattggtctgagcaatgaccgagtccgactctgtttttatagtatagatgagtggaaatccagtactttctcacacattctattacaaaccgcctcagaatattgcactagctgctttgggagctttctagatggatccggttgcttctcatgggccttctctaacgggctgagatttgaaagacttattgggcttaaactaaagcctttcactcaaacgttactaccatggcccaatacataaaagttcttttttttttttaaagcatccctaaattagtaaaattaaggttatggtttatatagatgaaggaaaaaagaaaaggtggaaaattaggagagagcctcatcatctccatctcttctgatagagaacttatttcataactagggaattaatcaattaatatcatcaattgtattctgcattcttatttcaaacttttcaattgctcagcttttattttgttaatttaatattaatgtatattattttgaattataaatattgtaaataagtagttaacaaatttaaatttgtaatttcgattgctctggttttattttggtaatttaatattaatgtatattattttgaaattaaaatataataaataagtaattattatagataagtatttaaaaacttctctaaaacttgtaaaaaaatttgtccatccatttttcaaaggactttgaccattaaagagaaattataataattagtaaaagatctaaaattataggtaaaagtgttctcattttaaaatttgtagagaaatagttcttttacactctttattacttcaattatattttgtcatataaaatttatgattgaaatttataagaaaaaaaaaatgtgtgttttgtctcaaattacttatgcgtccataatatatgtgatgagcaaattaaataatagcaaaaataacattataaaagagatctctcctttacttttttcaacaagaagaagcatacacatatacttaaaatgttacatatactgccactaataagactattatgcaacataagctagggaaatcaaattaaacaattctactatgttattttatttttgataaacatttactaatttttttaaaacattctactgatttttaataactctataatagaaaaagagcatgggtgcatgacaatcttaacaagaaatcaatactattaacctaataatatcacactcagcagaacaaatctcattaatttgccttttccccctgagagttaaatcattcattatctaatgttcaaccaaaacataataaaagccttttagtgaaactctcaactgagcaaaaaatcaacctcaaaaacctcattccaaagaccatagctaataagaaagtctacaaaattaaatgctaactaactagtcccatctaagcctcaggtgagggcattttctttaaccttcaaaacttaaggaaagctcaatcagaaacatgctcagtaaattacattattcactaacaactcattcactaaaattaaaatgcacttgaaattataagtacctgtatgaattttaaacaaaattttcaaaataaaacattacttagagaggaaaaatgaaagatgataacacgaaaacatgagtttgcctactaaaactagataatgatagtcaacccttcccaaattcaaaagtgttaatttagactttggtcaactaacagcggagccttatttatgattaccaatcaccacgtgtaaataagaacagtaaatagtaaaggagacacaaagatttatagaggttcagcccccttgtttggcaggtaatgacctactcccctatagaagcttctcgacttctaggcatagatt

SEQ ID NO: 225848 - DNA, 1628 bp, Cannabis indica
taaaaataaatattaaatttatcctgttaaaataaatattaagtttatactattttttttttaaaataataaaaaaacaaaaaaaagttgtgttggcagaaatttgatacgtgtgacttgtatataatgtgaaaaaagacctcagttgttccctctataatctatattttctttccgatttttctcttctgagaaacccttttcttctttagagttaaatcgaaatttggcttttaaatctttcatcaggaatcgaggatctcttactccaatctttgaatcagttctttttctgcttatttaaggtaattttgggaacactctgcttttattttgcaattttctgtaatagaactcactaggtgtaaattctatttcaatgtgcatttatttcaatctctatctctttacatacgatcatttaactaaattagtaattgtgatgtgaacttttgattttatttcagattgttcttttttggggaggggggaaattttcttatactgtattggaaacaagttttattgcatagagagcttagattgacgatcatggcaaaaatggtgagattctgtgatttgccaaaggaaataattgagaatatcatgttgtgggtgcctgccaattctctagtacaatctaaagttgtgaacaagttttggtattctcttatttcgggtttgattaacgacccgaaatttgtttccaaccacctcctcattaccaaaaaccaatcctctacatccttactcttcaaatggctttccaaccatgtcgatcatagcttgatcgcatacaaattgttgactgtaaactatgatgatcgtggtgaggacgatcctcttatgtctgtcacagaacctctcattattcatttgccagaacctattggtgatgaaagctcttggtatagtggttatcactgtgatgggctaattgttttagtaaatgatgttggaacaatggcgttatgtaatcccgctttgaaagaattcatgtttctcccacaaccaaggaacttgatatttgaagggtctcttagctttcctaatggtgttgtgggatttggatttgattctgtaaataaggattacaaatgtgttgccatttggtgccataacaaatgcaaagttgaggtttacacaatgagttccaactcttggagagagattagcatgtctcaagacattgtaaatattataatgtctaatgttttagtctgccctttatattgggaaggagtttgttactggttggggcatgatttagacaattatttttatgactttatcctcagttttaatttgagtaatgagaaattccatctcatacatttgccacgctttgtatattgggacttcacttcttatttcatcgagatttcagtgtggaacgattcagttgtactgctatggagagatgacagagagaatatccttcgtatcttaacaatggatgttggtgaagatgcttcttgttcttggaccaaatatgagtatattggagatggaccactggaaaatatttgtttcggggtaccgattccgaagaatggtgagattctaaaggaagtaaagaaagatgggcataaacagttggtgtcttttaacagtgatacccaaaagat

SEQ ID NO: 225849 - DNA, 2888 bp, Cannabis indica
atagtacataaataaaattaaaaaaatattctacaaacaatattaaaagtaatataaatattttaccttgttcccaaatattattatttcatatataataataaatacatagaaacatatcaaaaaatatatatacaggcaaatggtttgaacttggcagagtgttctaaacaaaagaattatatataagcatccgaattgaccaaataaacaattgacattaaatttatttaatcaggtctcaaataatttatttagataaattaagtaattgcagattttataacaacactaactaatttatatgatcaatattatatattgtaatgaatatatgatgaagattaagatggtgaccacgagtaacccaagaaaaacattggaatatatatagagagcaactgggttggtttggtagtttattataattaacatatatatatatatatattaattagttaaggaccatcacatctgtcctactcagagtgtactaatcgagaatattaaggagctaattaaaaattgtgatttgattagtaaaatatattcacacccaataactctaagatgccacacccctaaccctagaaagtcccataccattggttaaagtcttctttttcagactttcttttgtcccttaacatattattctattacctttaatattcatgtttatatcttattagtactgattactgattagtggtggtggatttgcctttaatttatatatatatatacatattctttgatagcttttttctttttaagggtgacaattttctttataattaatcaattaatacatatattaaaattatgatcatgagaaagtcatgtatggtatttattaagtaccatatatgaaaaagtacatgttatatatggagtaaattttaattgcttcctgagagtactaatgtcaaatcaaatttaaaacacatttatttttaatttaagtacataaaataagaataaatgtaaatttttttctttgaactatgactctggaaaattttgtcctattatgaactatattgcaactattgcaaataatttgtctcttcaatttctgatcatttttctaaatatatctttaatgaagctaatgtagttgtagtattacactaatttaaagagctcatgcaatatatatatataatatatatagtgatcaaacaaaaaatacaagcaatatataaatatatagtgatctaataaaaaattaataagtatatgtattcctagtattattttgtgtattcaagttaattaaatatataatcctctaaactgcaactctacctgtggttggtggtcacataatcaaaatttaatttaaaaaaaaattaaaattaaaataaacaaaagcaatcgaaggagatggtcatttttaataatttttataatttaagagtacttttttcaaataaaagatttgaggacaaaataacactccacaataattataatttagagggaaaaataattataattatttcaaaataaaatcagcaatatctcatttttttgatatatatttatatataaaaaatgaacaaaattatataattaatgtatattttatttttatatatggggcacatcctagccctaatgagctagctttcaaaaaagaacggtggtaatgtataggacacttaaacctaactacgaatatcaatacattaattatttttaaattgcctaacagctttatatttttatttaaaataaaaaaaaaatagataaacaaataaatattgcataatgactaatgaagattaattaaatattacacacacattataaaaggtttatttgcctaaatgttgctctttttggggatgctcacacgtgtcatcaagtgtcccaagaatgggataatttaattaattaattaaattaaatgaatacttaattaattaattaatctctactatgcttttaataaatgatagtacgtagttttgagtgtcattatataattactttcattttttcaatgcttacttggattttttcaatggtaatttatttatttatttagttattttatgaattaagaaaagtttttttttttcttaatagaaaattatattttattaactattaatttcagttaccaaaataactaataaattagttggaacagactccgtactgaaacgaaacgacgatcagaatataaaatggaagctctaataaacaactttatttactgacggtttgataaaaataacaaaaacatttctcaaattagaaattaaaactttacattcttaaataacataatcaaataaaaaagagcataacaattgaactacgtaaaacttgaacaacacaattggtttttacagttacttggtaccaatgtcgatcgcttccattatactcaatgcttcagctatcaatttaaggctcgacactgccattaaagaagaacgtgccccctaataagaaaagttttattgttcaaagaatatctattacaactccaaacataatacacttccattttaattttctttactataatttgtacaatatatacgttttggtcccacatacaaaagtttctaacctcccaaatatagtacactaaaacattaacacttgccacatatttctaaaacgatggagtaattagctttaggagtgagtgtttggaaatttgtgtgttgctcatgtaatcatcattttcatagtgtgtaacgtttactaatcctacctaaaagtagtaaaaaacttaacacaatcctacttgtagttgttggtattctactttgttgtgcttcgtgttgggtccggaaaaatgtttccaaaactacattttgttctgttttttggtttttgctggtatgagtttctatcctattatg

SEQ ID NO: 225850 - DNA, 3020 bp, Cannabis indica
aattataaataattatatatattataagattacttacatcgttaatgagatcatcaagggcacaagaagctgcagactcaataaaatttattttgtggtcaacaccagctttctgaatgaacggtaatccaacttcatatgcttctctatttagatcaatagctgttatctacaaattaattaactcaaatctcattattgataactaattgtggtggattaataatttgttcttttaaaataatccaatatatataaatataggatgaaaagactttatcaatagggtgtctcgaagcctataaaaagttgacacctcatttaataaaattgtattttatttcagcaataaacagataattagtaagcttatttttatattattttttacttctttttattttatatatttatatatattttttattttgttagacgctttttaatataggggtgttcatctaattcaatttgtattattttgttcatattgtatttaatccgcactaaatgcgaattttaatttttggatccaatccgatcagcacaatagctcaaatccaatccaatccgcacaatagctcaaatccaatccaatctgcacaatatgtcaaatctaatctaatcgaatcctcaaaaatgcggatttgataaattattttggatttattactttttaatatttatgaaaaaatatttttttttccacataactagtaacaaaataaaacaaattattattttatgtcttcaataataaattaaaataaataaaataataaaggataaatactattttggaccctgtgttttgcaaaagttactgattggaccttttgttttgttaaatgacaaaatagaccacgtattttttaaaattgtaaaaatatgattttgagcttaatttcgacaactcttttttaatataaccaacttgaagacaatttctaacacgaacagatacaaaaaatgtaaaaagttttgtcataaacacatttagattatattattattaaattttattttaacaaaaaatcagttcagagtcctatttatactattctgaaaatacatgatttattttttcatttaacaaatagatggtccaattggtaatttttgcaaaacacaaggtacaaaataatatttatccaataataaataataaattcaaataaagaaaaaaaaaattgtatgtataaaaaaatattaattttattttaaattatatgtagaaaatatataaataagaatagaatatatatatttatccattaaaattttaaaatataattgtattatatgtatttaacttttaaattattattttctttatattaaaatattatttgtacatataatttttatattttttttataaatatgtttgaattgaattaaatgtgttattaacatacaaattagattatattagatggtgtaaattagattggatagaatattttatgaaaccaccacctccatcgcgatatctctctccgttgctccctttcaatttctggattgcatccgttgctcctttagtttacggtgtcgtttagcgtttcagttttcttcaattttattctcaattcattgaaaatgaattctctcgcataatccatagccgtttcagatctagagaaaatcatcgttttcatcgaatccaaaatctctgatactcctaagcattgggcgagattatccacaaccttccacgatcttgacagtaactgatcattctttactgcgaaatcgaaccgcaccatcgcgatctctctgaaatcatcgacaggactagctttccgagccatcttcggtgtgggcgattcgaatttgaaacattacattttgagactgagaaaagagaaagaggctaaggctttcccgaggaactatagaaaatgatcgccgattaatagtatccccgaaacagagcagaccagaccgatttgatcaaaagacaataaaagcagaaaaagaataacagagtctattgtagtgagttgcactcaaccaaaatcacattggcttaaatcatgcatgtgtcactttattataaaaaaaaataagatcttactttggcatcatgaggaagagcaagagcagtggtaagaagagaatagccagtaaagactccaacttcaatagtcttctttgcattcatcactttcaaaaacatcgatataagctgtccttcatccacaggcacactcatcggactcctgcaattatatatatatagataaataaacccaaatttaaattaaattaattaacaagaaaagatcgaggccggcaagaaaaaaagcaccgtagtttatagttcttgacagtggcttctctaagctccttcaactgctcatgttctcttggataacaatatgtttcatagatgtactgcatgcaaatgaaatcatcaaaaatcaaattaccaaatattaaacaattaatggattaattaatatatatatacctctagaagtgctggtgatttgaggatactcttattcggtatagctacttcttctgccatttccggttgctgaaaaaattccgggctagcttttttgatgatatatgaggcaagtgaaattaatgaactgtgggatgatgaaccaatagtggaattagtagtggagctttaattgaattgaaccaaatgccacacctcattattagttagacaacactgatatatatataaaagttgaaaatatttttttttatgaattaactaaatttatatttaaataaaatttaattaaaatatatgtctttttaagagtattgtactcaaattattcttcatactcttaaaagtaaggcataatttcaatataatagatttgtattttttataaatagatgtgtaagtttgtaagaaagttggggtaaattttaattaaagaagaatgaaaactatcgtgaaatgatagaagtaaaattaatagaataattaaacataataaatttaaaaaaataaagtaaaaatcaaaagcatcaaattaaaaaaaaaa

SEQ ID NO: 225851 - DNA, 2358 bp, Cannabis indica
ataatgttggaatgaaaaatgatgatgtttttcttcggctgaacatagaagaaacggaaatttcacttgtgtagttgtgtatagataatgttataaatcttttggttgggtgaaattattttgatcggttgtttcgtaagttattaatcatttgttgcatgtatgatgatatataaaattgaggggattaaattaaagctctaagtaataaattgttagcaacaacaggtactaactcctgagaagttggcaccagcagcccacttagccaacatatgatatgagctacttattgtgctcaccagggatctacaaagaaaaattaagactctttagagaacaaagtatctagtttagctgcgtaggctgttgcttagctgcttattacctttgtgtgtctgttcttggtttcttctctgttagtgtgacaccttgttagtgtctcatgtctctttttctagatttatttgctttaattgatgctttttctggttatatgttgtgttggataccaaggaaatgtaatgagggtgctcatagtctagcggtttgggcaaagaacaggttcggttccattgatgatgggaggtagatccttttgtatctacagagtttttaaaatgagacaatagtctttaaataagtacaattgtggtaccattcaaaaaaaagtacaattgtggtggtcaataaataacgcaaatctgtaattctcttcatttgctatccataaaaacttttctgcccatagtgttaatgctgggtggtaatgtgaaatattaagttttaagggtttaatcttagaaccttttaagtaatatagctacctttgaaaagagaataatatttgtacttaagaaaaaaaggtgaatttcaattatttttttccattatcttaatttagagagtattatttttaaataataaataagtataaatagcattaattatggtttattataaaaatgtttggattggtttttttttgaaattgagttaattttatgttattagtaataatatatatatattttatatataaattttaaactaattaggactttcgccacctaaattttaacatgtaataaattatacccttaaattttgtaagatttaaggacatttgttcaatttcattcaattttactaattctgtaattatccatgaactaatcatgctctttagactttgatatttactaaatcatgttccttcaaactttcacatgtactaagtcaagccttctaaacatgttagattttccttactaaaattagaaaaaaaatctttaaatccaacaatctcaataattcatgggagatatttaacgactttaatagttcatggaacatgattcggtacatgttaaagtttaaggaaaaaaatcctaattaatctaaattttatgcaaatggtatacataaatagcatagggataagttgaaaaataccactttttttgtatctattaatcaaaaataccgtcatattatattttattaaaatatacccatttttttttgagtagattgcccattataccctcactctctacttaagtgtagcatataatttacattaacctaagaggtctaatgggaacatcatttataaaagtgggtatatcttaaaggatataaaaatggagataaaaattaaaacaaataaaaaaatataataaaatttaatatttactaattaatatatatttttaataaataattatttatctatatgtataactaatattaaatagatataataaaaaaattcttttattagaattttttaaataatatataaaaaatttgtactcaattaaataatataattcaattaatgagattataaatacctattactctacacaattaaacacaaacacatactacatttttttctataattatattctcaataatattacctataatctaattattttgaactactcgtaacaaacatgccaaacaccttagagtagttatccatcccacccacaatagctagaaaaagttgcgtaggtagtcatcgtctaatctcttggttaattaattggagttattttctccctaacttggagaaaaatagagaatactaagttgaaaaaaccagttgactttgtcttgttcattcatggattggacctgccttcatatttagtcaaaaattcaccactttttatcttctctacaagagtgctatactatttttattttagatgtctttccgtaatatttttgtttttaaatttttaatcacttatctttaaaattttaattttgaaaaataaaaatacgttttataatcatttttgtcttttaattttacaaacagaaaataaaagtgtgttc

SEQ ID NO: 225852 - DNA, 1444 bp, Cannabis indica
gaggccttcttcaacttcttagctttatagcgtagggtgcctttatcatctcctcgactttatagtggaggaggccttcaacatccccccagctttgtagtggatgaggccttcatcatctcctgagctttatatcggaagaggccttcattattccatcgactttacaatagaggaggtcttcctaatcccctcaactattggcatagtagaggaggtcttcttggtgaatgtcaacgatgtgttgtaacatttgcatgctactcccttgcaccttacccacaaacactgttgcgttggcactaccaggttcgacaccactttccagaagtacgaaccgaaatcaaagcaaagtctccttctccaatctggaaaacatcgtggatttttaccttcgtctattatggaggattagggcacgagagttcccacatcattgaccccaagtgattagaacttttatagtaggagaaaaattgtgagccttgatttcaatgcaaaattcgattcgttgatcaccttagcatctcgtctttgtgaaaagtgtgattaacttctagagccaaattcaacaatgattagcttaacgtcaacattattaatattagtgatgctgttttttcactataggattgcattttctgaatttttcgttttaaattgtatttgctgctctattttgggatgcgaatagggttttttgtttgtgtgattgccatcttaggtagatttaagcatcacaaaccatgttgtcattataattttttgtttataaattcctggagttggtcaatttgcgcagaagtgctggaaaaatctcctttgaccccaaatccttctggttatgactttgtctttaatttctgtcatctttttctgtacatcattcttgacttcctatatggaatcagtaactcctagaagttctcatttctagatagttagtctagttggaacctgtcaaagaaatttatgggtgaggacccatagctccctttctatgttatgtagttaaggtggctaactacttggttttcttctttttgtatagaaactatgcctaagcaaacacgtcaagtgaaaggtgactcagaggaggaaataatgcagcaatgagatgctctaaaattgttcatgaatgacagtccatggaagttggaccaacatgtcaacatgtaacatattaaagaattataacaatctgaggaagtacgagaccctacgagggcttcaaagtgttccaaggtcattctggaataggatctccattcttggggagaggcccagtaagtgcgtggatggaggcttcggtgtctgtagctgggctcatattgagattagggcatgcttgccctcaaggtgctatttcgctaatttttgtgctatgaccagattagcatctttccagcttattcttcacgcatactgttggaattattttacc

SEQ ID NO: 225853 - DNA, 1546 bp, Cannabis indica
acacgtagagagccttggtctctacataggcctcattcccctcatcattagaagatcccatttcctgaagccgagatctatttcccaggctcaagaaatctctctacactaaagagagctgacgcaaagatcccctagcacaggataaggccttaagttggctggttactctgatagaaaccacgccaacttcctccccaaatctacctaaaaccatgccgatcttcctttggaattcttcatcaacctgaggaggatctttgagatcgcttacaagatctatactctttgggatcacttgtgaggattggttatggcaggtcacggggttcccctggtttggattggttggaagcttgtaagccttggaatccatcatttcatgctccagttgaggcttgaagtctgtaggaacgaatgaaaattggttggtgcatccggttattatgagtctggaaagttaaacttctaaactcagaaaagaaattttgataggaaggaagtaatccattctgaaaatggatttcacaaaagagccagaaggtttgtgaaaaatgacaagcttgagccgtccttttatacacaaagccaaaagatgaagaagcgattcataaagatcttcgaaaccacacaaccgctagaatcaaaggaggtgtcctttctaagaaaggacttgggcaaaaatgccctccgtaattattaaaaagctctttttactaaaaaagaactttttaaggggcaattgttatacctgaaattctgctggaggacacgtgtcaagataaagggaatgtgaatcggtgccgtatcttttatggaataactcattaattatttaagtactagagtctatttgcaacccgctgattgtatagtcttaggcgaggaattaatgtacgaactagtacttagagtattaacgagaaaccatatgtggctaaaaaagaatagcgaggccccagagaagaataacacataccttggctcacaaataagcagactaagtataaaagtcgaacgggcttggaagtataagaatgcgagacgaccatctcactaagaggaaaattcctatagtttcatccaactagcagaagcgagactcgcaaccctggcaagtcagtagatttccttatattcgcgatcgccgtatgttgtcgatctccaacagaagaatggtttcagctcgccattgggatcacgacaatcaagtttctgtcgaggcatctccaaaatcaacaattaaagacgtgtttaatacacgatatttatgactcagtaaaagtgggaaaatcacagctgtatgattttcaaaatcatgcaccacgtttacattttgtaatatgtaatcatatcccacgatttaagcaatgataactgtaattacattttggtcagccttgtaattaactgtcactatgcaaattctacttacaccactatagtgatgggatcaaaagtagctctcttaagattacaatgtgagaactagagttggaaaatctcaagcaagagtagagcaatgggcatgtgagagagagagaga

SEQ ID NO: 225854 - DNA, 843 bp, Cannabis indica
tcacaagtatagttggaaggtctctttaacactttaactagccaaaaagcctgattattgatattataaatacaaatattagctctatgaatacataaaaatattccctttatttatcattagactactatttatgtatttattttttgtctggattcttaaagtgcattagattaatgtctcattagtactatatcaataaattgtttaatgaaataagcatagtgtaattagagaaggatgtttgcaactgttttcataattcaaaaaaagtttatggacaaaacattacaaggttcatagtttgggattaaaattctattcattcgtttttgattctggctcagagtagtcagggccctatttccatggttttgcataaaatttgaaatagtaagttgtataacagaactactgctgctaatttgcagggcacagtagagtcttatacactggtttgaagaacttatcttttgtttgtttctttgaaatgaattttgttcctctaattcaaaatttagattgtagcccacaagagaacttggcgtgttttgtagttttttttgtagttttgccttctatcattagttttttggggagaatttttgtcaactaaaataaacaaatatcatggttttgcttaaatttaaagtttcaaacttaggaatatcaaggggcactagctcgtaatctatggaccttaatattttttctacatacttttttttatgtataaccggtgttaacataattgtagtagatgttcactttctagatattcaaaatgatgtaagaactgggaatatgatgtgttaaatgggcaacatatcatccttttttttt

SEQ ID NO: 225855 - DNA, 1574 bp, Cannabis indica
actaaaaataattttttttgtagtgaaagaaaggaaaataaaaaaaaaaaagaaaaaaaccgaaaatgtttaaaacggttggaaatctaacgtgacatgtcaataataataatattaaaattattattgtaaattagataaaaaaaattgttatactattataaacttcatttttaagaaagtagcttttagttttgtaaaaactgtgccaatcgggtctatatgttgacaaagatcataattggatacagatgttctcacgagcagcctaactagttaggagtctagttttccatgaatcgaaaggccattaaatttgtattttatcaaaattaattatgagttttttttttcttgtatatatcacatgtgtaataataggttggatggtggtttatgcccgtgatgaatatatataaatgtgtcatttcagagaggagatattctttggatgctctgaaaatgataaaattaggtataaaaaataaatattagatattttttaaaaaataataaaattaagtttgccctaatttatattattatatggatgttaaaattggaggtttgcaactccaaagtgacctaacaggttcatatatacgtaacattataaattaatatccaattataattatggtacagatccgatgtggccaaatagatagagtctcatttttgacagagtgtaagtgactgtcaccaattctacttattatatatacatataattaacaagcatttacaagtgttaataaacagataatgtcttattcacgtgatacattaatgttaaatatatgtattatctctatttctgctcatgaataattaattaatatgacaacagtagaataataagtttgtaattaaaaaaatggggtaagtaatatataattatcaccaaaggatttctaataatatacttgaaaaaaatatatcttcactaccaattcatatatataaatatatggaggtaaaactaaaaaaaatgtatctatgaagtctttaatgcaagttgcggtcgaagtgactaggccgaagacacgtttgtttgggcatcacacaccattgtacgaaaaaaaaaaaaccattaagactagcttaatagtgagagaaatatgaaaaaaagagaggttataaattcgaactctaaacctttaaattattaaactattaattgattataaatactattacgctataccaaaaaaaaaactattaaactagtatatatgtatagtatttaggaggtacgtacgtaggaatagtactttaattaattatattatattaaacaatattatattattttataatataataagtgtagattaaaatgtagtaatatatattattatatgaataatatgtattaggtgtttggtaaataaattgtgtaacatataatttatttaacctaaaattgtaacctacactttataacatggagaagagttacaaagttaattgcttttgtaacttcttttggttgtatcataatattgtgtaataaaagagatgttactacaatttgatgataggattcaaatggtttgaaatatagttgttac

SEQ ID NO: 225856 - DNA, 2611 bp, Cannabis indica
ccttcaggttgttctcgtgcaacaagaagttagttgctcgcaatccgaaaggaaggccaagaagaatcctgtgccttttctcgatctcaggagttggaataagtctctttgtaatagctgttaacataacaaaaataaaattagtaaaatatgaccaatgtacattgaattaaaactcaaaaccaagtttatgaaaaaatctatacttacgagtctatacttacgagtaatacttgcacctcgcttccttgcacgacaggcctttacggagtaaaaataaagaatttttagtggggtcggacactcccacatcagaatgtgatataaagactttaaataggccagtatcctgtatgattttggagctaactagaatggaacaatgccgaggatatccttgaaatagtccctaagtgggagaactgccctagctcttatatgttctaggctccaagcgcctatccaagaaggttcactagtgctgcaaccttcatctcaagatagacattcaggggggcaaaaactgaactccccctaagcaacagacctaatgcggcatccatgttcattcctgatgccgcatgaccttaagacatccccaacataaagtccaatggacctgattttggactcgattagctcagcctcgaaagtaactgtaggatcttaagggctctttggtttgcttactttttgagccataatttcaaaatctaagtcacctggtgaaaaaacaatagtgactagaggtaaaagcattggcctcactaagggaatatcaattaagctgaggggttcaagtcaagctgcttctcgcaaaaagtgacgtctaccctcaattatttcttgtaagaatcgcctataatggctagaagtttcatcttgactagacttaacgaggtgatccctaattttttcattatttattttaagattggtttgggctctaagagttttgggtctaaattttatggtagaaatttgagaacaaactgattctaaggattcagggattgtgatttctgggataaattgagacatgattataactaataatatcctaatttctaaaaaaacaacaaataaaatttaaaaatctacgaatcgcataaccttaaattttttagccttagaattattcaaacactcaaaatcaaaatacccaaatagcaagatgcagacaagaaaaacgcttactaaaaaaattgaaattgaaagcacagaggaaaaatcagaagaaaagaattttgtttactgttctgatgaaaaattctgggcaagacgaacttcacgattgaaattctgaagatcgaaaagctgggtcttgatgattgttagggagaatgcaataaaaaaactcgcaggaaaaatataaaagacaaagagggcatggaaatttgaaagagagagtgattgagattttgatgaaaagctcaaaggtttgaaggcttaaaattgcaaaaataaggcacgatttcaaatttatacctaaaaggtcgccaccattcgatcaagataaatctaatctaacggatgggaactttacaagaaaggaacagtcagagcattaaatgagaaatggtgtgcctcgaagttttgaaccgccaaattctaagcatgcaaatcttaaacggaaaaaatacggttatacccctgaagacatctaaaaagttctttaataattaaaaagtactttttaggggacaattgttatattcgaaattcgacatttaccagttgctgacacgtgtactacacaaggaatacgaatcatcccaatgattgttatattaaattgaattattaaatgtgacttaaataactcgtctcaattaattatagttgataaaaaatattcaaactcgactgccacataagcatatgcatgataagagtaataactattaacagatgtgattgacgagacaatatgtctatctcaggatagatagaatatatgctagaggtatgcaagacgagatattaaggagcttgcagctcattgacccacatacttgggaataagagcttgcaacttattgatccacgtattggtacatgaagaaaataattgcattcatccatctcaccctttacacgacggagtaaccacctcgctaatatccttacaatatgaagaacactgctaggagaagtatattcatacttagcattttttcctataaagacggtgaagaatgacaactcacattcaacgagaaacaaccttgttagttagcataaccgtttaaggataaaaacaaagagcgattgggtagttattatattatcccatgtgcataaaaataaaatgtgggaaatatccatgtttcatgaacaattataaatggatagatcccaataaaaataattgtcatcctatacacttataaatagggacagaatctaaggaaaaagggacaacaaacttgagagaaaaactatactttacatatattaaagagaattgtattctgtatacacagggccggccctaggcataggcgggctaggcccgtgcctagggcccacactttccgggggcccgaaataaaaaaataaaaaaattattagccttttattaagtaaaatttaagtgtattataaacaa

SEQ ID NO: 225857 - DNA, 2593 bp, Cannabis indica
gtgtatataaataaatatatgcatttctaatgaaaaattactagatgaacacataatgaaaacataagataacaaatttttgttttagaacataagcagacgtaattaccattttaatatttactttatagtttattagtcgttcttagtattaattcttacaattatatcactctttttgttagtttttcaacatatatgtctctccatttttgtttaatctttctgatgaatacaaatttttgatcatctactgatcataacttagtgttggaatttttcccatttagatattttcctcataccatacaatgaaaagatctgaacgagacacaaaatagtgaaacataaaatttatgtaactttttaacgttatcaactattcattattgattaattacaaaaaaaaaaaaaaaaaaacaaaaaaaaaaactaattcattattgacaatatattctcattgactatttttggtaataaaaaactacatgtgattatatatactaactgcttctgtgctttcctatttggtgttactactttttaaggtataatttaatccatcatttatttcagatgaaaacttcatgaaagatggcacgcttgacacaccaatagactggattccaggcatgagagacataagactcaaggacttaccaagcttcatcagagtgttatcaactgatgatataatgtttgattttttaggatcacaagcaaagaattgcctgacttcttcagctataatcttcaacacatttcaagagctagaacaagaagtattagattcaatctcagttatgtttccaaacatctacactataggaccactttttatgcttcaccgtcatcttccagttgaaagtcaagtcaagtccatgagtacaagtttatggaaagaagactcgacatgtatcaactggcttgataaaagggaacccaattcagttgtgtatgtgaactacggaagtatcacaacaatgactgaagacaatctcaaagagtttgcatggggacttgccaatagcaatcactcgtttgtgtggatagttaggcctgatgttgtaatgggttctaattcggctaaagttttgtctgaagaatttttcgaggagattaagggcagagggttattggtaaattggtgctcacaaaagaaagttttggaacattcttcagttggggttttcttaactcattgtggttggaactctactatagagaccatttgtgctggtgttcctgtgatttgctggcctttctttgctgatcaacaaaccaactgccattttgcttgtaagacattgggtataggggtggaaattagccctgatgtcaaaagagaagaagtctcaatgcttgtgaaggagatgatggaaggagagaagggaaagaaaataaaggaaaaaagtttgtattggaagaagaaagcgtttgaaactactgatattaaaggtgattcttataataattttgacaagctgattagggagagtctccactatgatgggtaggaactaaaaaaatatattcagttttgtaatttagtttcactagattgtgtttaaaaagagatacattcattaacttgaatgtatgatttatattaataactattctatgctacttgtattcaactataatgaaaaaaaaaaataaataaaaataattggagtgcctttcagaaactgaagccgtatctcgttactctaaaatggtctttttgcatcaattaactttcaaaagtgacacaattatacacttaaaattttgtgtcaattttaaccgccaggattttgcgtcattttttttttacaaacacaaactcatttccatcaatttttaaagtatgcaaactcttgcatcagtataaaactgatgcaaagcagaaaaagaaaaaagaaacaaaaaaacctaaaatataaatgaccataccaatcctacatatataaagactttgaatggtgtatatgtatacaccgtgtatacatgtaatgtagaaaaacacatctaaaaaattattcatgtgatagaagtgcattgtagctataatgaaagattactgatggagcatgtagccatagtgaaaagctattaatatagtactatatatagctatagtataaggtacttttttgcacagtaaccctattttaataaaatagactttattttttaaacaattaaaatgaagaataataaaaggtgtttttggtaaatctgttgtagatgctaaggtttatttgttatttttcatgataaaaaaattaatgataataaaaaaacatctttagtttcagctgttacataactatgttgcattggttacatcaacttattattacaacagagataatttctattgtataactttaaaattaataatttaacattggagttgtaatttttatttgtaaatataaaaaaaaaaattcatattttttctaaatttaaatattaataattaagagactcgtcgccaatatcatcatgacgggtctctgaggtaggggtgttcatccgatccaatccgcactttttggtcaaacaacatccaatccgcactaagtgcggatttcatattttggat

SEQ ID NO: 225858 - DNA, 1230 bp, Cannabis indica
ccatcaacagcaaacagaagttttgcctcttgttctggagaaagtctaagcgccttggttcgagctttccacacaaatgctgagagtgcttcaaatgtagtacatttttcaagagctccattctccttagctttgttctttagcttttcgagcatttcaggatcgaaacaaaatgacctgtagagcattttctcttcttcataaaggtcaatgctactagaaatgtccttgatttcggagaattctctatgaagattttcaatcttaggtggggttcttgatttgagaatagtcctgtctagagatggagggacagttaagggaacccctctagcagtttcaccccatgagttcacaaattccattgcaccaattccatcaaccatacaataggtttaaacaaaggacctaaagacaaagcctccacacttgaattttgttcacctgaaatataacaaaagtaaaaaagcaatctttaactcaataatctcgagagtacaatttacttaacattataacaacatgtaactgtatatatatatatatatatatatgtattattgagctgagaatttacaaacctgagcaaccaaaggaggcatttctagtatgttctttgcaccaggaatatcataaaccagcttcccaagagtgtcaggatcaggctttgtaacatctccaatctccttcatcatacaatctgcttcagcctcaacaaaaacagctccttcaccattacaatttatgataagttttccttctgagctgatttctaatctccctgcaagagggtaataatgaaccaaaactctcgccaaggcactccttataacttgtactgaatctttactattattattattatcttttggctcaaaacaatagacagttctaacaatgacagctatgttttgatcaagattggacaagaagtaaaaacccttttgtgtttcctcagctgggacaactagacttggctcatttctcttcactttgatgagcttgttaggtacattgccattgttgttagtcatctcctccatagtatatagtagaaaagagttttagtttagatatgcaacaaaacaaatgatatagtaataatgattggaaagaaaaagaacatatatatgatttattatatgttcttttttgcagaatataaaatgagattttattgagtactcccaaaaggttagtagactcactatttatagcaaatttaataat

SEQ ID NO: 225859 - DNA, 2108 bp, Cannabis indica
atattagttagggtgttacaattcccctccctagtcagataaaaatgatagaattttagtgcctaattgcaactctacttctattttaaaattttggaatgttttgacagcgtcagattggatttaagtagataaagccatgtaaatctagaataaacatccatgaaatgtatatagtatttatattcattgtaggaggttataaaggaaggtccccataaatttgagacaataagctgtaatggcttagtgtaacaagtgtaaaagccttaggaactagaaatttgtgtatttttcctaaacaagtttggcatacagaatttggcattttatttaaatttgagatgtcacaacttgagagaacaatcttgacaatcctctcagagggatgactaagacgattatgccacaattcaaactcatgaatagagttgtacatttgacacaaacactagagttggtactgtgactttgggaagtggtagccatatttgtgcatggttgatgagaaagttgagaggcactacaaggtagggggaagcagacagttgtagttgattggagaaaagtatataggccattgtggtgtttccagtcaatagaacaactttgctcacctaatccttgacataacacacatcaggataaaacacaaagtacacattattatcagcagcaaattttgaaacactaagcaagttcttggtgatttcaggcacatgaagtaatttgtttagaatcaagagtttatcaaaggttttaggaatgagataagtgttactaatttgggagataggcaggccagcaccattgctaacatataactactcaaggccctcataatttgttgttgtcatgacattttctccatgtggtgtacagtgatttgttgctccaaaatcagggtaccagttatcatcctaagttgggcctgcaattgagtttgatctgcagctaggaacacacttgtgaagctcttgtcaaagcaataaaagcagtcaattacagtatggccaagcatttggcatatttgacattgacacacgattgggagttgctgagaatcgaccacctcttcctcttcccatggtggtgatctgagtgttgtgactagttccacgagatggatttcctctaaagtttcctctggaattgggaaagaagagaaattgaatccatttgggaaatactaacctcgagggtatgcagggggtctgtaattttgattagcttgagcatagaaggcttcaacagctggatcttgctcagtcatggtcatattaatgcttggttcagcttcttgatcctccttctctattcgagattcagatgcaaggagcacgaccttgatctcaccaacagtgtagccttcaacacaagtgttggtggagataatgaatgtgtcatactcactgggtaggccttttaatatagcagcaatatcgtctcggttagagagaatttcaccaagagatgccaacaaatctacatgttgttttaccttaagaaggtagtcattgagacttgacgtgtctttctttaatttttagagcttagttctgaattcgagaatcttggatgagacctttagtgtaaagtgttgctcaagagctttccaaatctgacgagcttaattgcaacccaccatccgagttagaagactcttagtcatggaggagagaaaccaagaaataagaagttgatcttggacctcccaatcaacgaatttatggttgaacctatgagcaacatgatcgacatcaataagaaattgagtaggaggtggaacatcctgaatgaatttttgtaatcgattgccacaaatggctgttagaatctgctgcttccacaaaaggaagttgtgatcattaagcatgatcgaaatagtgtggttgaagtaaacaggggatgtatcatcttcagttctggttagatttcttgaggcaacaaactgagttccttgtggtgtaggttggtgattcgaattgttaggatcaacagaagccatgttccccgttaatggtagaaatggctctgataccatgtgagaggtattcaacctcttggacatagttgccaaaagcaaaaacagagcaagaagaagaaga

SEQ ID NO: 225860 - DNA, 2053 bp, Cannabis indica
gatgtctcaggctatgttgactcgactatgcaggtttgcatagacacaagaagatccattacaggttatctattcataatgtaaggaggatgtgagagctggaaggtaaatatacaaaaggtagtagctctatcctcaacagaagctgagtacatggcagctactaaggtaattaaagaggttgtttggctgaaaggtctagcaaatgagatgggatttaagacaaaaaaatatcacagtgttttgtgataaccagagtgcacttcacctgatgaagaaccctatgtttcatgagagatccaagcatatagacatcaacatgcacttcattagagatgtaataatctcaagcaaggaagtccaagtttagaaaattcatactaatcacaatcctgctgatatgttcactaaggtagtgactcaagtcaaatttaaacattgccttgatctacttcatctagcaggatgtgactaaccttcctctttaggctacttaattatttcaactctctgttgattcacttactggcatgagacagattaaggaggatttgttgtataatgatccatctcatgccaaagtcggctacaaattagttaggattagttgatagttatttctattaattgtcctaggtaattacaagttagtttttctgttttttgtctctaatctgaattgtacaaatagttagagtttaattctttgtagatatagccttgtacagtttctaatctctctctcaatgtaattaccccacttatcaatgaaacaacacaattacttcaacttgttcttgctggtttttggtcattgttcttgctcgttcattactagtttgttaccaatttgctggttcattgctacagcattcatgctgttgctgctgttcttatgttctgctctttgagcaccattcttgattgttaaggggtgatgatcgatcacaacaggaagagttatacaaaatatatgatcatagataaatacagtgatatttaaaaattgataacaataatcttaagagatatattatcaccaaaataattatggatcatatgtgcatgagggagagacacattcatgttgtactcttttttctttagttcaagttttgtcccactgtatttttatggcaaggcttttaacgagacaactttaaatcgtgttaacatacttgcactttatggagcaagtatagaatgtgtgggagtgagatcattgacataatatatttgagaaacatatggattacactctgtaatgaagtatcaacacaaacagtactctatgaagataatatagcttgcatcgctcaactaaaaggaaggtacattgaaggagatagaattaaaactcatttcaccaaattcttctttatacatttcaagaggatgcatattggtgttcaacaaattcaaacaagtgtcaatcttgcagatttattcacaaaattattaccaacatcaacattttagaagatggttcacaagattagaattcatcgattaaaagatctccacgaatgcctaaatgatggggagttagtttacactacactcttaatcttttgacgaaattttttcaacaaggattttaataagacagtttttatggacatccaaagaggagaggagtattataaaatattatatatagatgtccaaatcactaaattaattatcaagattaatgcttgattatatatgtctttattatttattgatttagtttcctattttttagtgttatttttatataaatagaaatgcaccttattagaattaaataactgagaaattcttattcagtttttctttcactcttcattttcttctttcttattaatttcatattattttataacatcttttaaattaaaatgtgtaaaatttatattaaattagtactgcaatatggcactttatattaattaaaaaatttaaagagaatttattccaaattaaattagatattttaatattattagtgtaattaagtattagatttaatatattatactttacttatttaaggtggcgtttggtaaca

SEQ ID NO: 225861 - DNA, 1771 bp, Cannabis indica
actaaataatgagttatattaagtgcgtgaccgatactaaaaaaaagtggtgagggattaaatccatgacctatatatatatatttggttgtcttttgtttctcgactacataatagcatcttcagtagtagtgcttggagaaagtgtttgatgatgtggctcaatgcttgcaaaagagaaagagagttgctaagagcatcttcaatgatagtattctttaaagattttatatatctccacatcatctaatgatataattattttatttttattttgttccacaattattttttggtacccttacttttaaaaacattccaatagtaacatttttaagaatgttataattattacctcacacattattatatatgtaaatcttttttttattaaactattatatatatattccacctttaaatttttattttaaaaaaaaatatagcatcaatggcattgtgtggtatcaatataaaatttaagaataacattcttttatctctaatggtatatcatctttatattttgccaacgaagcttttcacatcattaaacattctctaaaatgctacaattggagatgctctaaaatgcactactagtgcctagcatcctcctcggtgtcataccgttattggtataattaagtataacaggtcccatataacttaagaaaataatttttaaagaatatcgctaaccaatcgtagaacgccacctatagaaggtgatgggcaccactagtgcccaataacaatgcttaaagagaaagaggaatgctataaagtatcagtggtgcttagcacctcctcctaagtgtcaatatcgctattagtacaattaagtatcagatctcatataatttaatataataacttttacggagtatcagtaattaattaggaaatgacacgtctagaaggtgctagacaccactcttgaatagcaatgctcattgctccttacaaaaaagttaacaatgggatgtttatcagtcaactcaacgagtaatattgatgtgaaaacttaatgctatatttattttgtcaacaaaattaaaataaataatgtattaaataataatgtgtgacattatggtagtaaatttgaagagtgcttattatttgagtaattttaaaaataaaagtgacaaaaataatatgaaagaaagataaaataaaatattatattgttaggtaatggggagagttttgacacttttgaaaaatgcatcccattagagatgcttttatgcttcaaactttttgagattgttatttggtacttactcaacactatacagatgtgatagtctataattgaagtaatttcttatattattaattgagaatcattattaattataatattctattatacaatctcttcgtcaatctctacgtttgaaatcacatagtatactatgtttttggtacttcgttatagttccaacatttctcctgtaaatttttaaaaattttcaaatagtttaccgtatcaataatagagtttctaaaattttagtttattatgcctattaaaaatattttaaatttattttcaatattgtaaatatttttttaaaaatttataaggataatatttgtaactacaacaaatacaagaagaaaagaataaaaaaagattaagtaaaatgttgtaattagtatttttttatttattaaattaaaattatatttcttccaaaaaataaaaaaaaaaagtaaataccatttaggattctgtatttttgcaaaaattactaattgg

SEQ ID NO: 225862 - DNA, 3197 bp, Cannabis indica
aatagtggaagccggcgagctcagtcttacaagacaggacttaattgtaaattttgagaatcttagaagcaaaactgaacttagagctgaacataaagttatatatctagttcttagattttcaaatcatcttgaatcgtccaatttcgagttgtattgaagaagttatggctgaaatactaatctgaacatataatagaattttttcggcaacaagtcgtggccatgacgagcctcaaccttcggcgcgatgagagcacgatgccatatttttccaaattttatcttttttagatcataagatttttatggagtatacataggacttttagtgttcgtttttagcaacttttagattgcgtttttaagagaaaaactcgtagaaggtggagaagagagagattacatcatcaattattcattattctagttcttttcttctccctaatctctatagtttttaataatgattatacttatggttatagttgtgattatgaattagtttctttttagttaagagttatttcaaaatcataaaacataaattcttgattgttaataatgaatgttattcttgatttttctcatattaaattgtttttatttttctatttaaatggtatgaatattgcgaattcttgttaggtgtgcaactaattaaagtttaaatttgtattgttctattatcatcttagaattacttctcaccaaatagtttaggattctaagtagagtgatagtttgtaattaatatcaatgtcaaaggtattatggattgtgataaaaaatagaacctaagctaaatgaattatatgcttcattgatttgttacctagattaacttatctccatagaaattaatattttcttatgttaaatggattgcatacttcgtagatctattgcttagtaaaaagatttaattattgagtgattcgctgtaactaattatagtaggaagattgggataagtgattatctgcggggttaatagtttaattttagaataaaatataatatttatcattattgttcttgattgattgttggaggtggagaataattcttatctgcttttaaaatcgtaattgtcattcattatttgttttccttttatgctatttaattgcaactcaaaactctcattcaatttttgtttgatagtgaatgataaattaatcatagtcatcgtgggatcgactcgtacttacttttatactgaaattattgaaagtattggaataaaataattagtaaatttgttgtggcatacgatatgcatcagcttggtttggtaaatttagtcaggttgttgagaaatttagtttgttgaaaagtatgtcagacaattttgtgctctataaaagatttactgttggtatcattttgttagttgtgtgtgttgatgacattgttaatactggaagtgatactaaatgcatctcatcccttaatactttcattcatacccaatttcacacgaaggatctaggggtgctcaagtatttcttgggagttgaagtcgctcagagtaaacaaggtatttttctatcttaaaggaagtatgtacttgatttgttaactgagacaaaaaaattaggagtcaaatcttatagtactccaatgaatccaaatgtgcatcttacaagtgatgggaaaccatttaaagatcctgaaatattgcaaattggttgaaagtttaattatctgactatgactcatccagatattgcattctcagttagtgttgtgagtcagtttatgtcatctttaataattcatcattgggcagcattataacgaattttatgttgcttaaatagagcactagggtgaggtatattttacaagaatcatggacacacccagattgagtgttttttcagtacagattgggcaagttccaaggtatatagaagatcctttttaggttagatcaactttcatctaaaaatggccgacctatttttgaaataagacggtccaaaattctcttatctaatcttaaaaaattcatatctcactcaatcttaagccaaaccttataaatatttttagagaacctatgcacatcatatgtaacattttttatgaagaaacctcagccaaatttccaatagaaatcaagttatcaagtatgagcaaaatttgagttctttgaactcaaatttacataacttttgctacaattagtcaaaacacttcaaaccaattctattcagtcctaaacaaccctaggaagccttttctaacctccatagatcccctcaacaagtcctacacaaaacaaccacttaaaaccaactaaaaccttagaaaatcaatgaattcgggttagagtttaccttagattgcttgggaggatggatgagatgtttcttctagatatccttggctgaaataagctttgaaaatggaggaaagcttgttggatcatactagttttggagagttcaaaaatggagagaaatgatgaagaagaaatgtgagttttgacttttcttcacttcgaatttcttttgatttgatttctatcttaaatctttccaagctactggtcaccagaaatttgatgagtcacagccactttccactcaaaaataaggtgactaatcaaaggacgaaaagactaatatgcccttacttccccgctaagtaacctcgtaaccctaagggtttaaaatagtccaatactattaccctgctaaaccccaatattttaaaatcaacttatcataataattcaattgaaatcacactctaaaatcgttgtgacatttttttttggctccgatcgagtccctaaggtcgctaaatctaaaaatatttttattccacgaataacatatatcatacctacatattctaataaaatctctataattaataaaatacgcttatttatctacttatggcaaaatttcttaatagaatcataatcatactcactataaatactgcatgtttatataataagtcttaattattcataattaggtttccaggtgattataggaaagttaaaataagaaaacaatttgaattaagggtattcattcaatcaatcttgcactattttgctcatagtgcatttcgatacatactaagtgcggatttcatattttagatccaatccaatctgcatattaactcaaatccaatctgcaaaagtggggattgaattggtacttttt

SEQ ID NO: 225863 - DNA, 1387 bp, Cannabis indica
tttgcttttctcttttattcattctcctcacatttgagcctaccaaattccagacatccatgaattacttggattagaattagtaaccaaaaccccatccccagtttcttgtaaaaatgcataacattacttatcacaaccttattaggagccaaaactgttttatcaagaatagttcctgactatcaaaaactttttcttttggggttatccaattaccatcattaactacattgccttcatcactagcaaaggatgaattattcatctcttcactcttgttgactaagaaactaacttgtccaagcccttctcctcgtctatagtctcttcagaatgtgtctttccccctgtttctcctacaataacaaccttagagttctgttgattacccaccacatttctagctcattgcttaacatttgtctcacctttttcaacaatgctttttccttattgcaattagaaactatgtgccctaattgaccacaaggtgcacatttagatgggagtcattcatactcaataacttattcaactaattgcttccattaattgatataagctatagtttttggacgaagatcagaaatcttcatatccaccaaaactctaacatacttcaccatcgttctactatgtcaccttgtccaccataattggtttaccaattgtactgaccatagcactgagattattaatcccccaatattgaaaacccaatccattcaatctaatccataccaaaactaatctaaccatactcaccaaatccatgtctgtggtccaaggacgaaggatcactgggtttttttttgtcgaaaggaatgactctcgatgccaatactaggtcatgagtagccttatccctgaaattaaccaatgtgaatcctgagttcattatcataatcttatctatgcttaggtttccccggacccttttaatgaatctttcaaacactctgaatggaggattagcaccaagaacgatacaaactataacattctactaaactgaggcttctattttgacctcctccagatctaaacgagctacaatttggtctccaactttcagaagttctatatatttcaaccgagtaaagggagaaggtacccgattcgatttgaatttgctccaaatctccttccccaaactctgaaagtcaatattctcaacctcctcaatccacttgactgttttaggagagctacgattcaagtctcgcatctttggcacaccacgatccacatctaaattagtacacgggtcataaaattcttctacagaattctgctcaagttcttcttggatcaaagggaggtcttctatcgcttgatgttaggttatttttagtattaattttaaattaagtttagtatattt

SEQ ID NO: 225864 - DNA, 5547 bp, Cannabis indica
aaaataaagtagtgttttaaaaaggccacaagccacatagaacataaaagtaatgttctagaaaggccacaggccatgtggaacatgaacgtaagtagttttctaaagctaaaaggctatcggccataaaaagccacaggtagttttctaaagctaaaaggccatcggccataaaaagccacaggctacacgaaacatgaaaaccttatgtatgttatacaaacataatgttgaatgctactaatgaaaataatgtttaaatgtgtgcaggggcagcaggagctgaatctgaagtcgcgagattgagatcaacagagtctacgccggtcctagcatcaacatactggtcggcctagtggtcagtgtcttggccagccacctcctccacaggtgggtcggccagcccctcgtcatgagtgatgatgacccctctcgatagtcatcaacctattctgcctccatccaattcttgaaaagtgcctttccatggggcaacattctctccacaaaagcctcactgctcatgtatgacagactagcttgggggttacacaacttgaactcataagggagttcaaaggataagtcaacatactcctcccttatggcttgctatccatcaagagcctcctttagtttctccttgtactcatcaaggtgagacttcagcccgaagataaaagcagcttatgcggtgttctctgtgtttctaatgccaagcatagtctctaagccagaaaccattctttgtctcttcgtgaggagagcctccagctcagatatggctttgttcttcaccacaagggaagcttccaaggtcttcttctactctcaaagagaatccaaggatccccatgagccatcacgtgctaagctcagcttcatcaaggcctgaaaacaaaataaaataacattagtgtcaaagccacagcactggcttgccagtcccccgttgggactgctatggccggccagcccctcacagaaacatccaaggccagccagccacattcaacaagtctcatggatagccagtctatacagtgccaaaaaggtgaataaagctgaaagtacaacgaaccagagaaagatcccaaagaccattaaggtagagcctatctggctcgccgtcactgagctcctttagatcctcatcaatgaatgggagagccctctatatgcacctgtttgctgtctcagtccctctacccagcaattgaccctgctcctctgctaggcctccgagtaccctgggttgcaagccgtatcacaggctacccagctagtgtaggccttgatagtggaggaggcagtgaggacccagcagcatctccactgccagaagtccttgccaccttggccttcactggtcccgtgggctcatctgaaggtcccctaataagacctcttagtctagaagacatatttgcaaaaagaaagtagcaaagtcattaagcaatcataaacattcaatacaaaataaaagcatggcatatcaaatatcaaatacgatcgtcatcacatggggaactattagagtccttgaaaatttccttgcccctgcctctagatgcaggcacggggtgagtaggtctctcagaagcttggcctctaagcctgatccggagagaagcatcaccaactggaccttcgctaactaagcactggcagaagctcctctccttcatctatagattctgtgcaatgcgagacaaagttacatcaccgtccaagtcaagagcttggcatctccaaggcatgccccatccacaactagtgctcctacaactcgaggaataggacgatacaggccatacttctggaagttggccacactggtcaacctcaatatgtttctagtctcttctaaaagagataagatgtggtttgccatatcctttttttgcaatgtgtggatagagtgcttgaagaatggcacccgccagaactcataatggccaatcctcctaaggccataagcaatgaagtacctcttggcattcctgccaacttttgacattgctttaccatttgtgtctcccaaccactgatgactgctctgactaaaataaaattaccctgtcctatttttcttcggggcaggcttcagatcaaaaatagtatccaatctcatagggagtaggctatggccagcctagctccatatataagacaaacattgtcaaaaggtacttgatgcttttcaaggtgcattgttttggacacatcccgcagtatgcaacaatgtctaaaaagtaaggatgaagcggtagtgctgccccatgctcgatatggcactcataccaagccaaccacccaaggggaaaccagtgcaccagataatccctatgtggtatttcccaattgacacccctcactaagccactagaaatgacctcgctaaaggcttcatcagaaagagaaaaagcgggagatacccaactatttccttatggtctcgcgtccaatatctctagctcagaagattgttctaagacatgatccaacccaagctctaaaggctgatcgagcttgttcagcgggttaccattagcatcatagcgaccgaagcgataatctaggaggatagaacaagtcctgtacctccttctcctccccgatgcaacctcctctagatcagattcaatatcaaaactctcagcaccttggtcaatctctagctcaacatcagcacggggctgagcagtctcctccaccatcttaatttgaccccttctctccaccttggccacgtgatggtcatatggaggcaccctatggagggtctgctttgttctggccataaatacaaaagtaaatagggatctacgcggctatcaccttccctattcaacacttggtgctacttacatggaagaaataagaggaggtgaacaacctgacaaagctacaaacacattcaagtcaacaatacctaacgataccttccaggtaaaacacaatgtacaaggtcaatcatcgaccaagtaccgtcttaagtacacttactaggatgtatagtaagtcttaagttgtataattaactataatggactcactacctgaccttatacagagtttttaagagaaaccacgagtaaggccacagttgtatatgcctccaaggtcgtcataagatcctagccaagttaaaagagggagaaatattagctgcccacttggagccttggccttggcaagtttgagttctaggccttagtggctggccaaaccctaagacccagtctagtggccaaccaggaaccctaattctaggcataggatggctagcctagggggtacaaccccttggccagccaaaccccttgatagactcccttggctggccaggatctccatggatcaaaacttgtgttttttcaagaacgcaaacatgttctttgtgttcttcgtcaattagagagccatgaatcacaataatggtcagattcagatctttttcatctaaaaatcatacattatgtatcctaaggctatcatgcggatgaaaatactaaaaggataacagtctaacgtaagaatcaatgcatgttcaatgtaaggaatagtgttcatgcatccatgaaaaaattaaccaaatcaagtgaaatatagggaatagaaagcttacctactacaagatgttgttaaagaagaaggtaggaagctcggatcgtcgaaacggtgcaaaaatctcgagaagatgatgcttgtggtttcgaccatctagagagaaggaggagctttttttaacgtaaatttctagtgagagaaagtgaaaagtgaaaagtgagaagtgaaaaaaagtgaaaagtgaaaagtgagaagtgaaaaaaggttttccttccaaaaagcacttatgtaaggcaagtggggccctttcttcacttacttccactacataacaaaaaggcagctaaagcaattatttttctactgcaagagattaggcagtcaagaaaaagtgtttcaaaagggtaaaaacacatcaaattttattcagcaaaggctacaatagtcccgaccgtagcaacatagctggtaaagtccctatctgtcagatatccgcacagagacttggggggcaaatgttatcttgattttttcctcctaacgtggcatgattacatggacaaaatcagtgacatgtcacagtacaactcaccaataagaaggccaagtaagcacctaagaaaacggagaccgtgtcactcaaatgaacatctaatgacagactagctccctcacaggatctggctggccaccctaggccagccctatggctagccaacgtggggaatgtaccatggccgacctgcgtatcctccataggggttggccagccatgaggtttcctgtagggttccatcttttgggttgcaaattgggccctaaaagcccaacagaatagttgaataagatctagattcattgacatttttgtcttttgtaattaactaataaaatatacaaatatatagggtttcaagttgtaatttaggatttaggcctcctatttaaaagggcttaactctaacctagaaagcctaagctcagttatgtctaatacttacctccaagctctaagcctaagtttgaaaacttctctcttcttcactttctctctcacacgctcatacaagcattatctctatacttgagttttccaattcttgattcaaacattgtattcctaagggtgctatagcaaatcccatctatagtgatctagatagtattaatccttggtattaatacaactaaaatggtagtaggtcattacccgctatcacaatggggcctaacctctataaaaaaatctgtgtatttacttctctttcattcctgtttgtgcaacacgtggcaagcattaaatctatacgatcccactgtcgattgatcactttttaaggtcaacaatgtcgaaccagtaaaactttccaatatggaagccaaaaaatgattgactttctttgaaaaaaaagcatttgttttcttattttttgcatctttccatacttaaaatctactggttttacttcttggagaatttattctcttgatcgtggcaaaggagccatatctccctcctcagtaccatcgaatgctttcttcttcagttcatcaggatgatttgtaggaaagtaccgtctatgacccatataacgcatcttgtgtccatttgccaagggacgagcccatgtgttagtgcaacaatttgaacaaccttcataaccttttgtgcttaagcctggtaaattaatataagctggaaaatcactaatagtctataacaacactactttaagattaaagaattatttttttaaaccatcataggcctgagcactattattcccatacaatgctattaaatcttcaatcaattgttccaaatatatatcgatattatgtccatgttgttacaggtctgatattattaaagaattcctattgaatttccctctcatcactaaccagggaggaagattatacaaaacaaggaagacatgacatgaactatgacgactacttagagatctatgt

SEQ ID NO: 225865 - DNA, 4777 bp, Cannabis indica
ctttgtatgagagatttaggagcaagcacccccagtgttcttgggggaccttgatgtgcttaaggaagaacagtggtcgacggtgattgagaggatattaaacttcatgggagtggccggaaatgatagggtggcatgtgccacgtttcaatttgaagaagatgccttagtgtggtaggagatggtatccctcactaaggctgttgctagaatgactagggaggaattacgggagttatttaatgctaagtattacaatgaggcggtccgcagtgcaaagtggaaggagtttgttgaattggtacagggcaagaacatgacagtgaccgaatatacgaccaagtttgatcgcttggccaaattagcctcgggaattgtgccaacaaatttcagtaagaaggaaaagtacttggtagggtttaatgccaagataagcatgatctggttatcaccacaaacaacctatgctaagatggttgataagactctttgagctgaaagagcagtaaagtttctccatgatacccgagaaactcctggtgctagtgggaccactactttccctatttatggtcctggaaaggagagtgatgattccaccattgagcagaggaagagaactttcctacctatgggaagttcagggaaaaacaataggttcgtggaaaccaaagtaaagggggacgtcagacctactcctatcctgagtgcccgtgctgcaagaaacatcaccctgggacttgtaatcggagggcatgctttccgtgtggatcactgaggcacctcaagaaagattatccccagttgaagaaataggaacctaaccctaaagctaagccagcgccagcacgtgtttttcccactactcaggcagatgctgccgccagcccttcagtagtcataggtcagcttctcatcaatgcaattactttaactgtttttgatttgggagctacacgcccatatgttgcaacaagagtactgagtcaactcggtaggcctagtgacgtatttgagatgggatttggagccctgttgcctaatggggaactaattatttcaagtaagtgggttagatcggtgttaattagaattgaggatagagaacggtgtgccaatctagtggagttaccgttggccgagtttgacatcataatagtaatggaatttgtgtccaagtactctgttagtattgacagaaaatggtagttttcaaccggagagtgaagaaccatttgtttttgttggttcagttcaaggttctcatgtcccgagaatctcagtgttgaaagctagggatttattaagcagtggatgtgtaggatttctagcgattgtaattgattccagtacacttgtgttactcggaattgaagaggttaaagtggctaaggaatttttggacgtgtttcctgaggaattaccagggttactacctcaggaggagatagatttccttattgatctaatacatggggtagaacctgtttcaaaggcaccttaccgaatgatacctggaaaattgaaagaactgaaaatacaactccaagggatgatacaactccaagggatgctggatataggattcacccaacctagtgtgtttccttggggagctctggttctgtttgtaaagaagaaagatgggacccttcgaatgtgtattgactacccagagctgaacaagttaactattaaaaacaaataccctttaactagaattgatgatctgttcgatcaacttcaaggcaagacgatattcttgaagattgacttgagatctggttatcatcaattgagaatccgggaagaagatattccaaaaatagctttttgaactacgtacgaccaatatgagttcttggttatgtcattccagttgacaaatgctacgatagcctttatggatctcatgaacagggtattcaaggatttcctcgataactttgtaattgtatttattgacgatattcttgtgtactctcagtgggaagtagaacacgaataacatctctgtatggttctacaacgactcaaagatcataaactctatgtgaagttcaaaaagtgtgagttttggctgtcacaggtatcttttctaggacatattattgggaaagatgggattattgttgacccaggaaaggttgaaacagtaaagaattggcctagaccaaaaatagttactaaagtacgaagtttcctcagtttggcaggctattatcggcgatttgtagaaggattttctaaaattgtaatcccattatctaagttaactagaaagaatcaacggtttgtatggtcagataaatgtgagaagagtttccaagagttgaagcaaaggctgattacagctcctgttttagccttgccatttgatcaagagaaatttgtggtgtattgtgatgcatccagacaaggtttgggttgtgtgctaatgcaagcgaataaagtcatatcttatgcttcacgacaattgaaagattatgagcagcactatccaactcatgacttggaacttgcagcagtggtgttttccctgaaaattaggcgacactacttatatggtgaacagtgtcagatctatactaaccataaaagtcttaaatagtttttcactcagaaagatctgaacattagacaaaggaggtggttagagttagtgaaagactatgattgtgaaatcttgtatcaccccgggaaggaaaatgttctggcagatgccctgagttggaaagcacctgatcagactttcaatatggtaatgatttctcctcagttagcctcgaatatgtctagggcaaatattgagtttgtgatcgggaaactacataatctaacattacagtcaaacttactggaaaggattagaatggcaacagtagaagaccctaaactgcttaaaactcgagcaaatgtcttagcagacaaagctaaggactttttgatttctaacagtgggatgttgttgtttaaagctcgagtatgtgttccgaataacattgagcttataagaaagaaattctggatgaagctcacactaccccttactcactacatccgagaaccaccaagatgtatcaagatctgaaaccttatttctggtggtatgggatgaaaacggatgtggtggattatgtgactaagtgcttaacctaccaaaaaattgaagcagaacatcagtgaccagcgagattacttcagcctttatcactttcagaatggaagtggaaagacattgcgatggactttgtggttagtttgcccaagaccataggaatgtgtgactcagtttgggtcgtagtggattgttttacaaagtcagtgcatttcttgcttataaaagtaacttatacagtggattagtatgttgacttgtatgtaaaagagattatttgttttcatggtgtaccaaaatttattgtttcgaacagagaccctaaatttacttcaaaattttgggtgagtctgcagaagaccatggaaactaatctgaagttcagcaccgcctttcatcctcaaacgaacgggcagtctgaacgaactattcaaatacttgaagacttattacgagcttgtgtcatagattttggagggtcatggagcaagtacttgcctctgattgtattctcctacaataataattatcaaagtaccataggaatggctccctatgagctgctctatggcagaaaatgtcgaattcaattcattgggacgaaacaagagaacagaaatatttaggccctgagttggtccagagaacaaatgaggcgttaaacaagatttaagctcgaatacttgcttcacagagcaggcagaaaagttatgcagatcctaagcgtcgggacattacatttcagccaggagaccatgtcttcttgcatgtgtcaccaacaaaaggaattaagcgctttggaaagaaaggtaagctaagccctaggttcataggaccttttgaaatacttgagaaggttggataggtggcttaccggttagccttgcctccagcattgtcagcagtgcacaacgtgtttcatatctcattgttgagaaagtacgtatctgatccaatgcatgttctaagttatgaggcattggagttgcaactagatttatcttttgataagcaaccagtacaaatcttagataagaaggagaaagtccttcaaaacaaaaccatagctttggttaaagtgctctagtggaatagtaaagtggaggaagccacttgagagttggagtctgatatgaggactcaacatccaaagctattcaggttagattttgaggacaaaatccttttaacgggggataattctagcgatcgcaatatttaaatatgaattagtgagattataagtactaattttattattattatcattaatattgacgtttcatgtgaatgattatgttaaatgtaaaatatgctctctttatgattttagctcgacgacgatggaaaatgcaacggaggtcattttagtcacttggggaaatataaagctttgtagtgatagagattatgtcatgtaagctcaaatggttagtgttagcgagcttgtggtattggaccattttacccctaagtcgattattgaactaggtttagtgatgggagtagtttagtaatttaccctttttgattgagtgtcttcaccataacttgacagctgccctttaattaaataaaggctagttaataaccttttattagttaaaattgtgagtttagtaaatagaaaaaaaaaaaaaaaaaacaaaaaaaaaaagg

SEQ ID NO: 225866 - DNA, 3454 bp, Cannabis indica
tcaatttaagaattcttagatcgtgttgatgagttcataaagctcaaagaggcagaatgaaaagtcaatagcattcacctcgctagtacaagcgtaggtaagacccttgatgcccctatctaaaacaacagaaattcccaaccacaagggaataaaatcaataacaataacaaaaatagtggtaagatgctgaactatggaaacaataacaacaacaacaggaatggaaagaaaggaaaattcaataacgccgatcaaaaaatcctcaggagagagctcctcgatgcactaccttttccatcctcactaacactcgagaaaacatctttacgaaaatacaagtaccttacagaaggccccctcccataaaaaagatatttataagagggacaccacaatgttttgttgctttcaccaagatcttagtcatgacatagatgagtgtaataaaaatctgagaaaggaaattgaattcctcatccgaagaaataagccctcatatgaattgatatatgaagacagatcaagttcagcgacccccttagcaaggggataatgctcaaaattatttgatgacacccattgtgtatgggaatcttaatgtgatagaggatcccacattgctgggaatactgatgaagacacaattgttggccattgaagaacatactcccaaacaaccatgtctagatgacacaattgtgtcatttagcgatgatgactctacacaagatccatgaatgaacatcctcttcaaaaccacatacgagaagatgggcttctagctcaaacaccttgttccatgtgcccaattgatctatgatattttaggccataatattgcagctctaggagtcatctgtctctctttcactgtagggaaagtgcccaccagtagcacagtcatggcacagttcttggtgatagacgtatgtcatgataagacgaccaaatctgcatgacttgaaagaaataactttcattgaccacctttgtgtaaagttccccactaaaaatggggttggatgtatgaagggagaccagcagctagcccgccaatgttacaacatcacggtcataaaggcaaagaaggaagactaatttggccatagtttaaaggctgaacaaactaaaaaaaaatagggatccacccaaggtggggatgttgagatggatcctactttggggaccctaacactgaaatagggccgatggaagaattagaagacatggagctagacccaaccataccgaccaggataatcaagataggtcgaggttatacgagtgaaataaaatctgctttgatcaaatttttaaagaaaaacctcaatatatttttgcatggtcgcatgatgacatggttgggatttgtctatttgtaatttaccacactctaaacattaatactcacaattctgaccagtacaacagaattagagattgcttgaaaaagaaagagcccgagctctcaaagaggaagcagaaaagctctgagacaacaaattcatcatagaggcattttacccaatttgtgtatcaaacccgatgcttatcccaaaacctaatggcaaaaggtgagtatgcataggcttcaccgacctgaataagacatgcccaaaggattatcttctacttcccatgattgatcatttggtggatgctactgccagacacaagattttaagcttcatgaatgcatactcaggttacaaccagatcaagatgtatccaactgaccagtgttacatgaaagagtataggaacgaattagtaattagtattgtctagttagtataaatatgtaatactatcacacaaatagaaaatcaatgaatgaatgagagaaaattaggattattcctattgggttttggcactaactcgaagagtgcaacccgatacaattcgatccccagtaacagcgtcaaaaactttttgtgaaaattagtatacgtagtcacacaagtaataaagtaataagtaagatcgtctccacagggaatgcaagtaaaattcaatgcaaaactaattatttaacaatttagattttaagaaaataaattgattggatgttgtgaactagaataacatcaattgaactggaattaatactgaaatattgctacaaatgctggaaaattaactataagaaaaagtaatcaaacaacaaacggacttgaatagctagatccccctatgtctaaaactgcccagtcgctacaacatttcttcaacaaaatgcacagagttaactagaattcctatatgttcatgagatttttccaaaactcatgaaataagttctatcatctaattcaatataattctatattaaatcacatctaagaacacaatccaagcaccaattcttaaagttatgcaaactaaatattcctatttcacttactaagaataatctaaaaatgggtattctcttgcatcattcaagtaccaactactagatttaacctttccagtattaaatctagattaataacctgccattgatttctaatcatgtacaacagtaaataaacatgaagctcacttgaatgaataatgaaaatttagcttaagtaatgcattcaaatttaaaatacatgacaaaaggagtttttaaccattcaagtctcaaaattttagctcataactaaaatagcaaacataaactaaaacaaaaaattaatatccatgagtgctagaatagctatgaaaaataagaaaatacaaaacagaaaagaaaagaggaaatgagaacaaagcctagattgatggtgttgtaggttggatcttcttgttcttttcctccttcaattcattgtgtttccttctttttcttcttcatgttttttttttctacaacttttttccaactatggcagccaacaataattcctctccttttcttccacattttgatgtacccttaaagttaggtccctaaggtactttttcaataccctaattagaaaaacccatttctctccaagttggcccactattcttggtctcttgtttttacaacagctagctggaagaagattaagtggatgccacctgattgctgatatggatggatgaaaacttcttttttaactctgtcgcgtcactgcgcagaatgcccagaatgctacaacattctggcagcatttcctcctagatttcagatgtaaagctcctaccttgtatcatttcacttggctgatatttagagggttttttctaacaacaaaacaaacaactaattaaataattataattaagactaaaaatttaatagacacccaaaatttgctaaaattaaaaaaaaaaaaaagaataaaaactaacaaaagtaacaaacaacacactctttcaatacttgttttcatcaaaattgaagtttaaagatgataaaaataactctataccatagagttatcactgatcaagaacacataagcttccgaac

SEQ ID NO: 225867 - DNA, 2163 bp, Cannabis indica
gccaatgatttctgcaacttcaggtgcaaaggtcccaagattacatccagctttgccgtcaataagaatgcccaagttgttcttgcaaccatgccataaccatatctgttgtcactagcaaacgtagcagcatcaacatttatcttgattgtgtttgtatccggtttagtccatagctcagccccatcttcactattatagaaattaatggaggatagggaagtgttatcctaagctttaatccaatgatcaagagatatccgtgctgaagctaagacatttgcaacagtgagagctttgtttttccagacaatagagtttcttgctttccaaagagaccaacaaaccattaccatctgggaaacacgatcagcatcaagcttatgaaagatgttatctaaccagattggaaaagagtcatcgagagcaattccagcaggtagatccatagaattccaacagcatgaagaaaaatggcaagaaagaagagcatgggagatagtctcgagagccgaatggaaaactggacaagtggaggagatatccacatgtttagttctgagattcaagcaggttggtaaaaccctagatgcagctcgccagagaagattcttgacctttggtgggatcttaagttgccataggtttcgccaaaaccctgagttgttaacacctaaccttgaatccttgttatcctgaagcatgcggtaggcacttttaacagagaaattcccagaatgttcaacagaccatgaccaaaaatcacctgaagctgaaaagctcaaaggaatactaagaataagatcagcatcacggtggttgaaaatatcttaaacaagttcaatgtcccaagttctagaatcaacagagaagagagaactcacagtatgaccaactagacccacatgagaggaagtaacatatggattagtggaatgaggaagccaaggtttgtgtaagatattgaccgtcaaaccagtaccaatgcttcgtcttactcccaaacgaactaaggattgagcttgccaaatactcctccaaacaaaacttggattccttccaagatccgccgataggtagtcatcatgtggaaagtaacgagccttgtagattctggtagccaaagaattcggatgtgtcaaaaatctccaaccttgcttagcaagcatagcaaggttgaaatcatggagtagccggaaacccaagctgcctgcatcttttggttgagagagtcgattccaattcatccaaataataccattgcctttgctactagtggtcttccaccagaaccgagacattaatttctcaatcttgtcacaggtacccaaaggaagaaggaacacactcatggcataagtaggaagggattggacaactgtcttcaacagaacttctttaccagcgccagataataatttcccagtccaactattgattctgttgatcactttagtcttcagaaaaccaagaatagattttttatttcttccaataatgtttggtaatcccaaataaaagctgttgtcagaggcttcatccatactgagaagagagcatatttggtgccgaacatcttgttgaacatttggactgaagaagatggaagactttgtgagattcacctgctagccagaagcggtttcaaagcgacgaagaagagacatgacactacgtgcgacacctgaattagcttggcgaaaaagatagttgtcatcagcaaacagcatgtgagagatggtgggagcaccgttagcaacacggtagccttgtaacaatctatcagtttcgaacttagagatgagagcagagaaaccttcagcacagatgatgaacaagtaagtggataaggggtcgccttgtcatataccgcgagtgggaagaataggtcccataacatgaccaccgtgaataatagaatagcgaacactggtcacacaagacattatcatattaacccatcgaagactaaatcccatttggatcatgaccgcccttagataaccccattctactcgatcataggctttgctcatatcaagtttgagtgccatatagcctttctttccatgaactttacgtttcaagtaatgcataacttcaaaagctatcattatattatcagaaataaggcgtccaggaataaattgttgggttttatgc

SEQ ID NO: 225868 - DNA, 1865 bp, Cannabis indica
tagaggttctactgtatatatgttttttccttttctagaattatgactacctatgtaccaaagatgatcaataattacctaaactaaaacaaaagtgtatatatataggacattttaccgtggagaattttctaaatgccttatttgtatggtatttaatagtttgttctaattgggtaagtgtaatatcgtgatcttgaatgcaacatattcaaactaagattgattaaaatatttttttattcaactctattttctgacattttctattttaattgagaaatgttatttatatcctatgtgtccatcatatactgtatcatctaaccaattttttataattacttttttattaatttattatttaattttattcaatactatggaccccactgatataataatgcattaattggggtaaaaaaaaaattctgctcatcgtttcttctttgcctcgtcttcttcttctttcatgattgcagagacgtgggcttttgcaaggccaacactcaagaggcgtcgtcgacctagaaaatgacggtgttttgtacagtctttgacgataagagcttgatggcgattataggtactcactgtgatgacactttcgatctaactaggcagggactcaatggcgatggcaaggtgatctcatgactagatctctcatgtttgggctgtgtgagataagtgatggaggtggccgatggttttcgaggttgaaggtggttgggctacgtgagatgagtttgtagatttggaatttttcacaatttgatagatgtaaaattttatgattaatttaaacgataatgttattttagtttggattgatgttgggcattttgattttccagacagatattaatagatgagttaataaaatttcctacactacactacattgtagtggccatgtaccccttttatattccaaaaatatagtgagatctattttataataaattcagattgcacatttttaaaattctccacattaaaaaaaaaatcttatatatatatatatatatatatatatcaatatatgttccaattttatattaatttaattcaagactacaacaataataataatatacaagtaatttactactaataataatatactagcaaaatagctataatacaaaaattgtgactaaagaaaaataattatggaaacctaaacaatttaaatataataaaaattattttgtattctttattttacaaaaattatcgaacttatcatctattttattaaatggctaagactttgtattttcgagaaaggatatttacggtataaatatcttatctttttagtttcatacacttctataccatatattttttttttcaacaaatttaatattatatattatttttttctactgattaaatactatatgttacgtttttattgcagcttttaattctaattttgttaaatcttattaaatatgactaaactaacgtgcgccaataaattaattgtctactttcaataaaaaatgattaaataattcaaaaattgaagaaaaaaaaaaactaaatgattatatttaattataaatactaaataaataaataaaaatatatttttattgttctttttctcgatatttcaataattattgttatttattttaagattatttaataattttttaaaaataaaaatgaagttgatcgctaatataatatgtgacattttacttaactaaatcaacacttaacaaattttgtagtaacgactgtaataaaaacgtaatatataatatttaatttgtataagaaaaaaagaaatatagtatataaatgtatgaaactgaaaacataaaatatttatgtggtaaattttt

SEQ ID NO: 225869 - DNA, 4143 bp, Cannabis indica
gagaactttaatttttcagcacctggacactcaaggaagaaaacatctcagagttttttgataagtcttctgggcatgaacttttaagcatcagaactaaaatctgactcgtgcatcttgttcatcttcatcaaaaacagggaaatatgtactttcggggaaaaaacaacacatttgggtgccagaacaagggcccagggcccaggttgaaattttgtcaacctaggcctattctaaggagttttatgagaagtcttccgtgaatactctacgttttcaacaaagattaagtttcaactatttctagggacaaaatgaaacttccaaatggccaaaaactggacccagcgcccaagttgacatattgtaaacctgagctatttccaatgagtttcacaaaaaagtgttcagtgaattatttccatcatcagaaataacaaagataaaagaaaactcaaggagaaaatcacaattgtaagggcatgaaaactgagcccaacacccaagttgacctagtgctgggcctagcacccaggtttacaaccaacctcgtacgctggtttcgatcatccaaatgccaatcatggtacaagaattctctccaaaatggtcaaaaactgggtaggagacctcgtcttcaagttcaagaacctatgaagtagaaaaacattccgaaagctctaaaataagcacgcatcgcccaggttgacaaatagcctggtgtgctggattttgcttattcgattctgattctgttttgaccatgtgtctagtttttcataataattgagagccatgaagtcataacagtaaaattctcttcacattttcacttttctgacaaggtgatttactcggaaaccaggtagtttcgagtctcctatttctacagaacatcaacatctccgagaactggtgaccagtatcgccagatcacagaaatggagtaaatgatgtcaaaatatcactcacttaggcataggcatcaaaaaaatacatccccggtacgttttcccactgacccattgtccaagttgacatcacttgtcaacctgggcactgggatgtgaacctgggtgttgtgtcgagaacaaccttttgtaaaatggccataactcactcaattttattttgattgacgtgattcaactcgcattttgaatttaattcaatactttatcaagttatgtctcacagttcaatcgcaattctaaagctatcgaatccaaattttatggagttatgaatttaaccttcagcttacccagagcggatcctgtcattgcgactcaaactccaaaaattgacaatcaaccttagaagttagtttttaccgttagatcattatctacaatcaaaaatattctaaatgtattttttattttttattttggttttttcacatttaataagatctcatttacctatagaagaagagttccactagcttatttttcatattcaaaaaaagtaactataaggtcagagaacttctctgtagtttctctctttagaaattagagcatccacacttagccatttttctgtaatccatctcataaaaatcaaaagccgaagtagagatagttctattactgtcgcgatacagggagtgaactactataaattgttgtgtctctctatttatacttataacatatctctcattctcgccaatctagcaagctggcgtagtttaggagtctgtgtccaaatttttgaatcaacatatagatttatcgataatcttttctttattagatttctattttttgtgagaatttttcaatttttatgattaacaaataattatattttaaacaaaatcctactacatgcgaatgactatttgttttctaatttagtataagataaaaaataagaaatatatgtgaaatgagttttaatttgtattgtaatacttttaaaaaataacaatgctttcggttatatatctacacttaatataacatagaatagatattgattttacatctatacgaatttcatttattactccataaagtcttcctcactttgtacaagtaattaaaagataaaaataattattagaatatgggagttttaataagggtttttttaagatatatataaaaaaaagataactatattactaaaaaacttataatcggcgctttaaatatttatacaacccacatattaaatattacaataatacttcttctaaactttcagtcgcatggaacgaagcaaaaaaactcacctacgcaagcttcaatcgatgaacccagcaagccaaccaaaataaaatttaactaggcggagaactaccattaattctggtgacttcacctgagaagatgaccggaatcaatcaaaacaaagaatattttgaattcatgaaaaaaaaagtgcagaaaactatttcaaaactaaaattcaaccagaaattcggtttaattcgcataaaactaatatcatgacttcaacttttagatccattaaatgcagttctcaaaaagttgaactggagttcccaaacaatacagctcaggtataatccaaaaaaaatacatcaatactatagttaaatgtttatcccagtgtatttttgatgttttctagatttctaatagtaaatttgttcatatgaaatcacgaatagacatataaatagagttacgtacgtaaaaatactgttcttatttttaatatttcataacagttgcattacagttacataaatattttgctaactctttaaaatttgacatatcaactattaaaaattaataacgatacaatagattttatcatatttacaagtgtttcatatcgtcaatacaatataaagctctttaaagaaatttttctaacatatttaattttattaataaactaaattagttgatataaagttaatttacagaggtccaacagttgtttctccacatattactattaaggtacaattaattatcgattagtgacgaaaaaaatactgataaatagtttcttatatatacacattcacattttatatttctagttgcaattaaattgcacgttagttgaataataattttgttaccacaatatcatagtactataaaaacaaggctcagaattgtcaaatacgggacctgaacagataaaacacaatttttgtaatattcgtttgtattaaatatgtagaattattcgttgttgtgtggttttatgttagttgactcgcaacagatataaccattacattacaggttcatcacaattgtcctgaagttgacattttcttactgttatggccatcagagttggaattctttcaagcaaagacaccttcgaatttttcttcagtgggcgacgaccacctttagccacggggggagcgacatcgaagtcatcatcatcgatgactggacgtttccctttagccttgttagcaactaatttatgacctatttttgaagatttttttttggcaatgaagatggagaagtagagccacaaataatagtcattccctacaacaaaattgggtattgccgggggtattattacaggcagaaattacccgcttctattagtaggggtattaccggcagaataggcattccgtcggtaataactattaaataaataaatattattttattttaaatatattaataccgacgaatgggtattaataccgtcggaatcccacctctaaaaaagagggggagaattttaccgcccaaacatttcaaaagattattagaggaggattaatatcgacgggtcccgccgatattaattgtgattttgactgttgtgcagtaataccgatggaacacagttaatatcgcctgtattaaaaatctataaaaatccatttccatttcagaaaacacatttttcccatttcacttctcaaactctctccgcctccttcaccattttcacctcctcttctctagccattaacttccctggcattgcctcttgcacctttaatgagtcatctccaccattgcatccaccagtacacctccaagtagtgttattgttttatttttttttttttacatattgtcattttattttctcaatatttattttttttctcctattctttaaatttttgagataaaaaaatcggtggggaaaataagtctcagt

SEQ ID NO: 225870 - DNA, 2015 bp, Cannabis indica
agagagagagagagagcaaagtaaaaggatcgattcgatccaagagaaagagagagaaaataagattgaagagagatttacatacataagatgaaaaagatgagctaccagataatcaatgtgtcttggagctctgaaacttgatgtaattgctgatcactatagtggattgtgattgagctttctctgaggtagctcaccaaggacgtagccccaaatttctagtggtgaaccttataaaattgctttgtgtttgttctttattaccctcacatctttacttaatttgttattcatcttgttggtgcatgtctctctaaaccagctcaagaacaaagtcatttttctcttaaaccttcactcttgattaatttttttgccctaatttgttttttccttcaaaaatttgttcagacaagagatctgtaaagcaaagtcaaagataaaaaaaaataataaaactatacgtgtcaaacttgtgcccattaattcagattgaagaaaggtcaaaattgaccttgtgtactaatgtgtgtgagagttgtgtagggaaataagtgtaaattcctatagtggtatcagagctgtggtttgagcaacaagaataactcacaaggaggaagagaaggtgatcaagattgaaggaagttgatccactaaaagaaaatctcgatcaagaagagtttgaataaacaaactgagaattctcttaaaagaaatttgttatcttttctaaattaactaacatgagaaatataaaaagtgaatattgacaggtgtgacggatttggagactacagaatttggaggagaaagatcaagtcattactggcacaacaaaagctgcttagagtgctagatgatccaattgaatggcctagatagaactattaaagttcaacaagaagagttgcttaaaacaacaattggaataatcattttcaatctatctgatgcaattattagacaagttgacaaggaagaaacccgtgctaaaatctagaagaaattagatgagcgattttagaagaaatctctaactaataagattggattcaagatgtcacattcaaaaactcttgaatagaatctagatgagttcttgaaattacatattgaattggctaactctagagagaatgaagctcttagtgatgaaaaccaagcaattataatccttaactctctaccaaaatcatatagagaagttaagaatgcaataaaatatggcagaatagagattactttagaggaagtcatctctgccttgaaatctaaggatctagaaataaagacaaagaaacacaatggatctcatggtgaactaaacctaagtaaggggaaatcatatcatagaaaaccatggcacaaaaagggaagaagctcaagtagaagctctagcaaggatcactacttaagaaaactaaagtttcaatcaagaagtccaaaagaccctaatggttgctaccattgtggaaaacctggacatctaagaagggactgctatttttggaagaaaagcaacaaatacaaatcagatgcacagaacaataattcacagaaattagacagttacaagcatatagatcatcaagaagaaaactctagtggtggttaggactgtacagaaattttcgtaaaccgcaacccgaataacccgcctaaaccaaaccaaaaaacccgataaaaattataaaccaaaataacccgaaaaaaattctaaaccgcccaatcagttaattgggcgggttaaaaatagacccaacctacccaattaaatcgaccaaacatatttaatctgactttttacttttttttttttaagttcagtttttaactttaactttttattattattataacataaacataataatataatatatatactgtttcaaaaaaaaattatatatatatttaaaaaaacaaagaaaatgaccccgatagtcacgatcgagacctctcgtctcattcaatttgtctctttcttcatttttagcctctctctctctctc

SEQ ID NO: 225871 - DNA, 1885 bp, Cannabis indica
atattttgtatatgattaacctcaacataataaattaaaggtgagaagtgaggactttttagtaatttaatatgtgaaagcccaaaacaatattctcacttttatagtagttatagattatagatatatgattaacctcaacataataaattaaaggtgagaagtgaggactttttagtaatttaatatgtgaaagcccaaaacaatattctcacttttatagtagttatagatatatatttaattttttttttcttgcttaataaaactctattcaaaggaaccaactaaattgggagctattttcccaagtgaaccagagcacgagatacaatttctccttgtccaatttgccaacaaatcagccataacattgttttttctaggcacaaacttaaagataggaaaagtaccccaatcgagtaataggtgacacatatatattttatttaaagtgcacatttgaatgtagtcgttgtattataaaattatataattctccatctatttcatttaaagtagttacaattaactttatattttaatagataatgaatccttacatgtataaatataattatacaaatttactttagtcattcaatatgcatacatagatttactaatcatcccaatattcttattagaatttctttgcactgaattcattgtcggacgaggcactaataagtacatacacacaaatagtaacaattatttattctgaacatatgtaaataattatacatattacataactcgagatgaacacaaacattaataattagaacaatgaaaataacatataagtaaatatttaatagattgatgaaaatgtatagtaaactacatattccatcatattatgtatacataagtacataaatatatcatttttcctttattttaattcaagttccatatttgaggggcctgactaatgatgaatttaagatggtggtggtggtgatttatgtaatatgctgggtaatgattttggaggtgaagctgatcgaggtggtgttttgggtaaaattgatggtggcagtgatggcaaagagtgtggtggcaaagttggaagtttaggcaaagagtgtggtggcaaagttggaagtttcggcaaggatggaagttttggcaaagagggtagtggtggcaaagatggaagttttggcaaagagggtagtggtggcaaagatggaagttttggcaaagagggtagtggtggcaaagatggaagttttggcaaagagggtagtggtggcaatgatggcttaggtaatttgggtaggatttcgggtagtaagagacctttttgatgatgatcatcatcattttgatgatgatcagctttggccagcttggttaatccaataaggcataacaacaacgtcacaacaataataagtttattatttttcatactcacaaattcaatttgtatgtattttattacttgaatttaaccaatgataaataggtgtgagtgagttaattgttattctctgttcacaatatatataggtagtgaagaagttgataatgagagtttggtattgtaactattatgttatttaattatgtagggttgttataaaggggtatgcataacatattgctcagcatactttctttttacaaaatcacatttactacctaactttattaatatgatttagtaaaaagaaggtatactgagcaatatgtagatagtaaatgtgattttgtaaaaagaaggtatacatttactacctaactttattaatatgattttgcctaaactttagattcgtttggctccgcttttgattcggctttaatatatattttaaaaaagaaaatatacttatttagtaccctgtcttatttcgaaaaacacatttaa

SEQ ID NO: 225872 - DNA, 2272 bp, Cannabis indica
ttcaataacaatccacatagcttttgattaccttttggatgaataccagtcaggttctcctgctgcctcataataattaaccatggtgttttatcgatgctgacatcagctttagttgttgtgattaagtttgggagatataaagattgttgcaaaaataatgtcatcaattcatactcctgcattcaacaatttaatacgaggccttcttgttcaaacaaaaaatggatgctggttaggaagttaagcctaactttttcacacactaatttttttggttactattttgcattttaaacatgatcttctgtcactactttgcataacagaaaacatgatcaaattgtaatttttttccttcaatttcatgattgcacatataatattttaggtgcaactataaattctgttttttcattgtaggacatttacagaaacagtagaataaatccgtattatctaatgggatgaggatttgattattttttaatatggtttcagtggggtgaaaatgtggaaatattatatcaccgttttcttaagtacccagatcgtgtccagaacttgtacttcacattcctttttgttctccgagccatgaccaaagtgagcacttgttggccctttttttatgctccaaattatagtttcttgattctcttagtcagttttttcttgataacatgttgcaggcagcagattatctggaacaggctgagtctgacactggtaacaattcagaagacttgaaaacacagtctttaatgaagcagctactgtacagtcgtaaacttcaagctgcatgtcctcttcccatttgatgaagcaaagttgtggcagggccacagtggacaacaactaaagcaataaattcaaaagcaattcagaaatattaggtttgtctttgaacaattttatcttattactaccttgtgcttgtttttatgcttaatactacaatataagaacaatgttttaatgaaatccaaatcttacaaacggcatttaattcgccaaatgtatttcttacatgaatttcaataatctctaagttttcaaggttaacagttcgcttccttaactatggtaagtcagttcatgcactcacctagttctaagcactttgatgcagtttacagaattctaaggtatctaaagggaacacttggaaaaggcctcttattcaaatcacaagggcacttaatcggagtttataccgatgctgactgggccggaagtatagttgacagaagatctaccttgttcgttcattggtggtaatctagttgcttggcgaagtaagaaacaaaatgtggtggctagaagcagcacagatgctcacggcatgtgtgatattatatggataaaatcataaaaagacttcttgaagagctgaagtcatcatattcatctcttgtaaaattgtattgtgacaataagttagtgattgcaattgtttatgattcaggggtttcatgatcgcactgagcacatgttgaagttaacaagcactttatcaaggaaaagatgagaatggccaagtgagcttgccctatattcttactgagtggcagacatctttacaaaaggattatgtaaaagatcaaccagcttgaggggagtgggaaaatcttttctgttagggaattattcttgtatagctgtatatttgattgttattctgagatattaggatagttaatagaattttttctcttatatattgtaattatttattttcctgtacttaatatatacacggtttgtgtatacagaaaaataagatagcaattacccaatattgtcttaacttgaatttcaataatctccaagttttcaaggttaacagttttgcgtttttttttttttttttactacagttccttatctatggttggtcttttgtaagtgaagaaactgtaggttttcaagttgggatagatttctcaacgtgggtgactcgagtagcattgggtttaattctttctgggtaggaattcagcttcatttccgatgataatgttgctgcatttctgaattctgtgtattgctaatagaaatcatgaccaagtattgatttatttccatgcgtataaaggacaaaattcagatattcatcttacaagtggaagtcagtatgaatgcacatccttcaaataaaattccttggtaattttatgcacaaaacatatatatggtggtgccatttactttaaagaacatttacgcacatgacattgtcgagtctcgttgtccattctaagttttttac

SEQ ID NO: 225873 - DNA, 4148 bp, Cannabis indica
gggactatgcgtaaaggcatgaactcaactaacgtgattctaattccaaaggttcccaacccaaaaaaggtaacctagtttaggcctattgctctttgctttatagtctataaagtgatttctaaaatcattacaaatagaatcaaacccttcctccccagaataatttttcctactcatgcagcttttgttcctggtcctagtattcaaggcaacaatgtgttagtcaaggatatcatccattattttaagtgaaagaaagagaaggaaggctttttcacgattaagattgatcttgtgaaggcctatgataaactgagttagcaatttatcgatcatgtgcttcacagcttcaaatcccctaccattttctgcaactgggtgactcaatgtgtgtcaacgtcatctcttaacatttgccttaatggagtttcagtggggtaaattatgcgtgagtgtggaataagacaaggggaccctctttctcggtaccttttcatttgggcagcaaaaatcctctctcgtcttttggaggatgctctagataaaggcgatattaaaggtatcaagcttagcaagaatggcccctgcctatcacatattttagttgtggatgacatgatattgataggaaaagaaaatgttgcagaagcaaaggggttctgggactatctcaaaaaattttgcgcctagtcaggccaacgagttaataaacttaaaacatcaatctttttttagaaaaaatactagtgagggtatgaaagagacattaaggaggtttaatggattgatgatttgggtagaaacatcaactgcttgggtctgtctctcatcagatcgtgtcaaaaagatgtggactttaactttgtggtggagaatctagtatcaaagcttcagggctagaaagttaaaaatctctcgaaagctagtcgggccactttcatcaaatcagtcgggctagctcttgcagtttacactatgaaaactacaaagttatccaagagaatggctttcaaggtggattggtttggttagacttctggtggggacataaaaaaggaaacagagggctctatttaaaggcttgggacaaggtttgtctctcgaaattcaggggtggccctagtttttgaaaaatagtggagatgaatcaagccaccctggaaaaatggggttggatgctcatcaacgaaaattagtcgctctgctgtaaagttctcaagccctagtacctgaaagactccattcatggaatcctcacctaaaaattctgattcttggttttggaaaaatgttgttaaagctagaaccatactgaaaaggggcttgtaggatgatctccgatggaaaggatactatggtttgagaagacccgtgggtaatccatgggaaagagttcattcctacccctgtggccaactgcccgtgtgaggttaacaaggttgtagacattcttttggattcaggagagtgggacatctcaaaactccattgcctttgtgattcaaagacagtgagtaatatcttgaaagggggtaagccgagcagtcaaggaaaagataagtggatttagacattggaatgctcgggtaattgttcgttaaagtctgcctatttagcccaagtgatggagcgggcccctcattgtaatgtggccccttctctttggaacaaattgtggaattgtaaagtgcttgagagacataaggttctgtggtgcagcatcctttctaatgctctgcctattcgtactgctattgcaaagagaatgcagatcaacgatactgcttatcccttgagtggggtaggggaagagacgatggaacaccttttccactattctaattttgcatactacttatggaaatcctccccatggggcttgatgccgattatgaatttaggtgggcatgtttgggactgggtcaaaaacctttggggcttaaatcaatagggcgccaatgttgaggaagtgtttttgtacgcatcgattgtggtagatactatttggcgagcccgtaatgataaggtgcacaacaataatctgagttgcatcatacattatattgactctatcattcgatgttatgctaattatggatcccaacttttcacttcccctactactagagctgctccccattggtcccctctgctggaggactggatcaaaatcatcttcgatgttaaagtgggaagttcatcgatgagtgttgtggctctggctcgggatcacttgggaactgttttgtgggttgcttccaacatgctcattttctgtgatgcccttattggtgaagttgcagcttgccatccaacatttgagacagcagtgaaaaggaaacacaattttgtgattatagagagcgactccgagacaattatcaaggctttgcaaaggaaagtttctgtctggagcattgataattatgttttgaattgtaatagagtctctagacaggtgttgagttgtaattttgcctttatccctagacttaatatttttgcggctcacaatatagttaagtgggtttttgcccaaaacttaactggtatggttgatgtgccaactatcctaacggatattatttgtaatgatcataaggtctaactttttattttagtaatgaacaattctttttttaaaaaaaaagaaaaaaatctctttttggcatgtaatccctcttaaagtgtttcaatcgcctttaaaaataaataaaagtaatatcatgtaaagtgaaaagataaatagttatagtcaagttcttgtggcattaattttttagcattcttattaggatgttagtattatttagaagtgacaccttataattggtgagtaatactttttaaaaattattttcttaaattatatgagactcaatacataattgtactaataataatataacaaaaagatgttaaacataattatacataattatactgacaaaattgcttattcaaaagtcaaaggagaaggggtttggctttcactctctttgtaaatctcttggccttgtcaatctgtgttttgcggaagatctaatcatcttttgcaggggtaatgagaagtctgtccagcttgtcaatgaggctttccaacggttcagtgaatcaacaaggcttatggctaataagtccaaatccacaatgtactttggggggattcagaatgatggcaagcgaaaactcctgaacatccttcaaatggatgagggaaactttcccctcaaatatcttggtgtgcatctcaggcccactaaatggcggtttttagattgtggaatcatcttagataaagttcataaacacttgcatacctcggctaccaagaatcttttgtttgctggaagagcccaactgattcattctgtccatttgggagtttgaaactactggatgaaccttttcttgcttccccaaaaagttacgccgactatagataaaggttgcatggactttctttggggagttaatggaaaccgtagtaaattgcacgtcccttcttgggagaaagtttgccttcctaagaaatttggcagcattgggtttagggaagggaagaagtggaatgttgctcttatggccaagtatctttgggccatctcgagcaaacaagatagcctatgggttaggtggattcatgccatttatttgaaatgtcaaagcatatggatgggtgagtttaaacatgacgctagttggtatttcaagaagcttcttcatctctgctcaataattggtgaagatgatgtcaaggctgcggagaggaaaggtaaattctagtctaaactgttctatgcctcctttgttcaagtgccaactgctgaatatgcaaagaacatatggaatagaatgattttgccaaaatacatgtttattggttggcaaatagtgaatgaacagctgctaactaaggataacataagcagattttttgtgattcccacagatatttgccctgttttgctacattgagaaggaaactcatagacatcttttttttgagctgttgtttcactcaaaaaatcattcaaaaggttatgtcctggtgtggttacttcagctggccaaacacatcagaaaattggttgtctaggcctttaaaaaagtgtaaagggggcgaggtgttgaatgctattgta

SEQ ID NO: 225874 - DNA, 1500 bp, Cannabis indica
tgttggagaaaatgttaagccctaaaaaattagaataaaaaagatagagaatgccacctaaatcttttgatgctttcctttatgtatatatatattgactaggcatcaaagtatgtccttcgtgcgacagtttaaatatttaatttagctattatttattgagaatttttaaaacttaattaattaaaaattaagctaaggaaagatattttaaagtaaaggagacaaagatttttacatggttgggacattaataaaccttagtccacgagtcaatattattgaagctctttggctatggattattttacacaaatgttcttgccaaatctcagtagagtttctagccaagattcataaccctttgcatgaagggatagaaccctatttataggctgaaaatagttcttgggtgaatacgaacccattagggttttatacatgaaataagcccactaatggggtaaaatacattataatactgactttgggctaggtaggtaagacctgatttaagagataattgtcgtttgtacggagtggtaccatttgatggtgacaggtggacatgcgccaccgacgatgtacagtaaatgtcagagtagtgggtgttgcacaaaaaagtatgtagctttttgtgttgtgtgcctttcacatggttgacgtaggggacaaacccctgattttgtgggattgtgttagaagggtgacacataggacaacatccatgcacctcttcgactgcctgttcaagattaccccatgagggcatccacatatgttccattaagtctttccttctctagacgagtttccctttcgagaccaaaagggcccagccttatagagattatacttggcttgcaattaaatctggagccgtggttgaactgtatcatgggttgactcgctggcttaattgggcctgtgaattggcccatcttgcttgatttggggaccttaaaagtacacgtgtcactcatccagaaacacagataacatttacccccaagccttcggggcttaatagtcgcccaagcttgcaactgtcctctagacctgtctttgtgcgtgggaccatgaacagttcatgcccttcaaaattctagggcagtgggtcacaaatggttgtgaacctttcattttccatgagtggagtacacatgttgccaacctattatgcctgtgcacatcacgaggatcaaggaagcatatgaaatcttgtattgtgaaacgatggctagtcacgtcagtgagacttctgaggtgaatattatcattaataatcctcgatcctgtacctgacatttaatggaaaccattggtattttcgggtggatggttcttgataactgtgttttctcaggtgcgatttgagccattagatcatgagcaagtgaatcaccaccttgtatataaatggggcaaaggttatctagttaccacctttgccattttgaaattcctcctcaaatttcccgagagagagagagagagaga

SEQ ID NO: 225875 - DNA, 1248 bp, Cannabis indica
ttttttatttatatataataaaaaataaaaataaaagaaattccattaatatcacaaacatattagctatgaataacttttccctaaccacgtgaactgataagagcaataattagatttgaactgatatttaattatataaagggatttttctgggtaatgtcaaaactcttgtgtctgatctatctttactttatgcattgttttttctataaaacttcacatataactcataaattaagttacaaggtcggtatctaattttgccctattctttctttcacgctcggtggttggtgtttgaacagaaccaattcatgtcgttaaacattgctctgaagtaatttccatctcctttctttgtattaccttaaaattttatgactaagaatgttaggaaattgactttgtttgatggaatctttaatgatctgtaagtttggaatagtcaaacttagaatctaaacttattgcttagggttttaagtgttggtttgtttgttgttgttgatgatggttcttcccaatataaattttggatccggtaatggagccgatttaggcctgtcgacaaataagttcaccgtggattgctttaaaaaacactttggattgctgtttgagtgcttaattcgatagtttatcaaacatcatattaaattaaaaataattctgtctactattgtcctttgcaatctacccaattctgcttgcaaaacagattcctagggtattttcagcatggacacaaataattggagacctatccaaggtgaggaacctacgatggacaccacaaattggagaactcaattgcagcacgattcgagacaacgcattatcaacaagaggtaagtgtctttttttcattttttatttttaaaaatagcttaaacatgtatattttttgttttacaaatttctttgttaaaataaagactttagaatggttttcatgtattttctttaatcagaacttatctttagagtatgaaatacaagaaatgttcattttcactgacttgtataacttaatgtctttactggaagaatggatacattgaagaagcatctcccttactctggctaagaggaattgcttgaactgaaaaaaattgctgaaaggtttgaagaaaagatttacagtgccgccacaagccaagtaagcaatacattcttaagtgcaaaccaaaaaacaatattctttatggtatacaaaatgtatgtatttgaatcacattctaattt

SEQ ID NO: 225876 - DNA, 5338 bp, Cannabis indica
ggttcgagagaaggggctgggtcgtgcgtggttcggacggtggtgcgtagtcggggtggtgggtagtcatcggtggccgggcgtggtggtcggaatgaggcagccatgggagagagaggttcgggatgaggcatccatggctgatttattttttgatattttttcaaatgagaggggtatttgtgggatatgggaaatgtggtcatatattaccaatattattaagtatgtatttagggaaaaaatattaaaattttttaagtatagaaaatcaaatttccctttagaaatcgaccattatgaatgtaccccatctgtacatacatatcgtcgcatttatataatttttttttttggaatccatattactattagatgaaaattaaacatgctctttattactagtactagaaaacttaccaccttagaatagacaacaaaaaaaaaatagcataaaaaaaaattcttccaaaaaaactttttcacggtttcgtaaatataagtttagatttagtgtattgtatttggtaagagtgattagttgcactttttattttgttaaatgagagtatattactttctctattatcttaagacaaaatattgagtatgaatgtgacacggttttgttgcagggcggcacattcgccattcaagcttctatgtagatgtgttgatcatcctgaaattggaacatttttttttttttgtaaataaacttgtgctacaaagaagagaagaaacaaaaacagaacaaaagcacaagctacagggaaggtagagaaccattccagattaactcattatctaatcctagacccatcctagccactttatgcgctaagagattaaaatccctaccaacatgacaaacggttaggcccggactaaacaataataagttcttaatgctacaaattacatcatcgaaaacactgttattccatttacaagattgaagtttatctactattgatttacaatccgtcatcaacacatccaccggaaaacgaagcaattgagcccattggatagcctgatgaacaactttggcttcagcaacagcaggaggaacaagcccagaaaaaggagcagagaaccctgccttaacccggttgcaaccatccaaaagaaccactcctatactatgcttgcttctatgagaattagcggctgcatctgtgaaaattttgaaagtacttgaaacagatggttgaactcgtgttggtgttgtattgctaactggacaggatcttggcacctgactttgctgcacatccaaatattgaaaaaaaatatgcaagactccaatcaaaaatatccttaggaggaattgagaactgtttgtgaaagatattattcctttgattccataaagcccacaaaaaataatataaaaataccaagagtctctttatcttggtctacaacaagacccatacaaaactcattcatatccaaatgtttattagtatcataataagatacaaacctggaagatcgccaagcctttctggatctggagcaatctagcatagcatgcttaacattttcaggagcaagtttacataaaggacaaagaggagaatcaagcacttttttagtaaaaagagaggatgcaacaggaagaacattagacaacattctccaaacaaacaacttgaccttaggagggataacaggagaccaaactcgagaccaaaactttttagaggaagagaaagaagaagaagaaggaagatcctgagaggaaaaagccaaatgataagcaaacttcacagaaaaaatatctgaacttgtcttctcccaaatcagagaatctctaccataacaccctgaaacaggtacttcaagaatatcagcaatcatagaatcattaaaataagaacccaatttagcaacatcccaagcacccgagtcagaaataaaataggataaaaattgcgaaggaggatcaacattgctagtaaaaagatttatatttatgattaggaagccaatgatcagttatagttcgaatatcactcccacttccaaatttccaaatgagacccgaagccaacaagtctctaccccataaaatgcttctccaagttaaagaagggttatgaccagggacagcagtaagaatagaggtctgagaaaaatagcgagctttaaggatcctactgagaagagagttaggattttccagaatacgccaagcttgtttagctaacatagcctggttaaattgaacaagtgaacgaaaacccaagccaccacaaaattttgatttacaaagaaacttccaggattttcaatgaattttcctagactccccattagaagcccaccagaatctggccatcgcagcctcaattcccttacaaagcttaacaggaagcctaaaacaagccatcacataagtagggatagcctgaattacagctttcaaaagaacctccttgccaactctagagaaacatttagaagaccaagttctaagaacagaggcaactttatccctaagaaaagaaaaagaatgaaatttagatcgagaaagacattggggaagacctaaatacttagacacaaaaggcctatcctccaaatgaaagtgtcaaataaacatattacgaatctcctgaacagtgttaggagaaaaaaggatggaagatttagaaaaattaatagcttgacccgaggccctagaataaatatggaaaacttcatgaagcgctaaataagaatccctatcagcagagcaaaaaaggaaactatcatctgcaaaaaaaaaacaaatgagaaattgaaggagcatgcctaaaaacaaagattcctttaaggagttgagcatcttgcctagctcgaagaagggaagacaagccctcagcacaaagaataaaaagataaggggataaaggatccccttgtctgagacctcgagaaggcttaagagaacctttaacttctccattaacaagaaaagaaagagtagtagtagttatacatttcataattagagtaacaaaactaatagggaagttaaaatgatacatgacactttccaaaaaatggcattccacgcgatcaaaggctttagccatatcgagctttaaagcagcccagcccctcttgccagattttcgagaattgataacatgaacaagctcatgggcaataaggatattatcaaaaataacacgcccagaaacaaacgcactttgaaaaggggagataatcttgtcaagaactacttttagccgattagcaataaccttagaaatgattttataaattgtggaacataaactaataggcctgaagtcctgcatagtattagcatgttgttttttagggatcaaaacagttaaggtattgttgagagtggagagatcaatctgttcatttaaacactctaaaaccacgaaaaccaactcatgaccaaaagtatcccaattcttctggtagaaaaaagcattaagaccatcaaggccaggagctttatcaccagaaaggctaaaaacagccttcttcacttcctgggtagtaaaaggctgagccaaaaaaatcatattcagactcctcaaggacggggggctaaacaatctaaaatatgattagtagcctcagcatcacagccatcagtgcaaaaaagggttgagaagaaagaagagattatttcaaatatagcctcaggatcattggttgaattaccagaatcatcctttaaataccgaatggtattattctttttcctatgggaagcaaatctatgaaaaaacttggtgtttctatccccagccttaagccaggtcacacgagccctttgcttccaataaatctcttctttgtaaagaagagcatcaagctgagattggagatacttaagttgaaggctagactctctactatcagtggttaatgattgaatcttaacaatctctctttgaatatcctggattcgagattggaaaactggcataagagatttatgccaagatttcaaagcagagacataggagttctgacgagctaaaaagataccaagagcatcctgattagcaaaaagatgggaagaattcttccaagaatcctgaacagtagtgtaaaaacaaggattttcaagccaaatatttttcaaaatgaaatcgcttttttaaaaccaggaggcctattagagttattatcaggatgcagaacaaccttaatggctcgatgatccgaaccataaaaaggcagatggtacaacatagcatggggaaataaaaccctcaaagactcagaactaatagcccaattaagacgctcacaaatagattatgccaagtatatttatcaccttcaaaattaagaggaaaaagactaaatttatgaagaaattgagcaaattgatccatatcagtaaggttataataattactaccagttttatcatcaaaattcaaaaaactgttaaagtctcccataataagccaaggcagattagggaagtataaaaagtttatctaataaattccaagtaacagaacgagaggaagaagaatgacaaccataaaaaccagtaaaatgaaacatatcattatccttaaagtttatattacaatcaaaatggctattggaaaaagataaaatatttacataaacagttgctttccacaaaagaataagccccccccccccaaaaaaaaaaaaactaacttcctagggacctccataccatggtcaaaacccaaagcaactctaactcgatcaatagccctcacaggcaaccgagtttccataaaaaaaaaccacctcaggacgctgctctttcactaacagggagagtctcctgaatgaacgcgtactccctaatccatgtgcattccagcttaaaagactcatttttctgggcgggtgtgcatagcatcacctgcttgttcctcatgagcaatatcaatagaagactcatcctccctagcaccggagcgagcacgcttgagttgagacctcagagagcttccaaccacagcaaagtgaggctggaatgaaggtctcttaacaccagaagcagaggccaagcctttcccacaaacatcaggatcaggttgacccctagagaggttaacatccattctagcattatcagcaggggcagaagataaagcatccacttgactaacatggctaacaacctcatgggaagagatgccagcagacagagcagtaacaaagatagattggctagcagccacaataatagagtcagtcgagtaagaagtaaaagccgagggccttaaagaaatatcaaaagtgggtctagtgtagggtgaggcaactttcgagagataaggatttaatggtgtaggcatca

SEQ ID NO: 225877 - DNA, 3471 bp, Cannabis indica
gcggtgtgggattgcacagcttacccggtatttccccttacggatcacgggactactgactgtcacagtgccaaactttcaatgcaaaacaactacattcaatatcatgactgaaattttactgatcatactcctataataacttaggtatacaagcaacaattctcctacactgtattagaacacaatctaatccttgtttagaagtgtcacatcaaatcataatttctccttactaactggtaatattattattggtagaagggttaacctctatttcaattcttccgactaaattccactaaagcatagacaaccctcaacaaatattccatagcatccggttaattctagaaaaacctctaatttgagttgtagacttggattaacatcaactcagaactgccttaatcattgccaaacttatcaggatattatctacatccgtctcacgctctaagaaacttacttagggttggcaaaatttgcatctcctgaacttaacatgaagtttagactcccaaaacattacaatacaattcagaaatacctctcaaataccttctttgaattggaagaaatcaaaatttcattaatgaaatcattcatgaagtcatcaggtatgaaaagctactttggaaatacccctctcgaatatccaactggtaataaccagatcgaagatcgatcttagagaagacggtccttctctaaaattaatcatcataacttttatccttaaccaaaagaatacttactctttaccatgaatttatttaatttccaacgatcaatacatacctgtaaagtttcattcttcttcttcacaaacaaagctgacatattccagaatggggtactcagtctagcaatttgaagcccaacatccagcatcccctgtaactaaaccttcaacccttttaactcaacaaatgccattcgttacagagtttaagatacaaactcttcctcgggtaccagattcatttcaaaatcaatctcccacctcaataataatcccagtaactcctctgggaagatatttagaaattctcaaaccactggaacatgtcccggtcccatgggtatttttcataacatatacttcactagttaagaaattgacacatccatcccacaacaaatatcctaccttaaacgctaaattaatggaattcaagatccttaaaccttgctcacgagcacgaatggatcctcaccgtttgatttaagaattaccatccttctttcacaatcgataattgcattaaactttacaaatcaatccattcctaacgtatcctcaaaatcctctaatatattttttaactcatataaccaaacattctctttcccccacaacacagaaaggaatttttttaaccacctgctagagaatgactagttctctaataaacagtaaggtaccagaaccacctggtaacacattattaactttatacaaactttccaatcacccttctcgaaatatagaaatatgctgcaccaaaatcaattaaaactatcaacaaagtatgatcaatggaaattcaacttaccatagtagaaagactaacaccagtctcagtctaggtcaatcaaatacccaaataagaacgaaagtgccatcacccctctattttggtcgctgcaacagtacgcatcttctttctaaatgacctaccacgccacattaaaagcaagctcaggtttagtatttaccctaatggcatcttttgcatctcagtccttacccccttagcaaaagacattaggtcaaccacctgagcttagaactgggcaacccccagttgctaaacaactatatccacattccaagcgatatattctttccatcttcaactagatttagcctccctagcggccttaacagccacttcctcaaaacaaaactttgccaattggtcctatttaatgtcattctccatcaccacgttgtccgggatcaatcgtgtaagttttgctaccttgccacttagatatttccttactttatagcatacatttgctcccagtcttgtggtaataaaaaattcatacccagactaccaacttcgagcctaacaagctcgtaattattcttactagatcgcttcaggtacacctttttctacattcgcgaccattcctttttttttcataatatctttccaaccagaattaatgctaataagcattaccatacatgtaatacatgcttaacaatttttatgccaaacttatcatacttctcgaataaattacacatttcagataggcaacaattcaaacaatcaataaataatctactaatcaacaagaaactagcactcactaaaccatgagtcgaacgagtcttcccagccaatgtacatatcaagccagtcttcaggatctataaactttggttggtgtgataccatgttgtaacgcccggactctcagggacgtcacgtgtgtgcttttataaacttattattactaatctataaattttggaaaagtgtggtttaatttaaacctttaactaaattcaaaataaagactttcattttaaatactgtcataatatcgggatcccctgctaatgaaattcttttacaaccaattataaaaccgttaatacaagaataggttacacatccaatcatagaaaaggattgatcccgcttcttgaaagccaagacaacacagttaatatgtacactgctgggagacctctgactcatggccaaatagaaccgctaatcttcttacttgcaccatgaagcacccgtgagtcatattgactcaacaagaaaagctaatagacaaaagtatagcaagtgctagtgtacaacaaaatatacatatcagagattcattacatatatagcatgtatatacatatcagtacgtctatgcgaacatattcacaacacatgataagaataatcataggaactcataattaacaatttcactgaataaacattcattcaatccatagctatataatcttagtgctttataaagcactctagtcatacatcattgtaatcacataatttcagtgctttattaagcactctacttacacaataccataataacctgaactcagtacttcataaagcacccttaccactcgttatcaacgagctgtatatgtcactatcgttgtcctatagcgcgaatgataagtaagaaacctatctgcagtttcaacgagtaattactcataacggtaatgaccgtatcttatactcgatcataatcgagttacaacgataaaaatcgtttcatatcatttccctcaatcataatcgagtcacaacaatgttaatcatttcataatatttttcctcgatcaaaatagagtcaaaacaatgataattatttcataatatttccctcgatcataatcgagtcaaaacatacactaatcggaatctcgatcataatcgagactatcacaattataatcgttaa

SEQ ID NO: 225878 - DNA, 4263 bp, Cannabis indica
tggatatccaactttttataattggattggattggatcggttcggttcaattggattggattggatgatgcccacccctaatcataatggtagtgctttggcgttcggtgttgctcctcagatggccatgttcatctcattggggattgagcatgttagaaagtctctcattgttaatgcgtaaaaaaaaattataatattcatgagataatatacctctcaattgtgtcacgatccgagccctaggccgtggcagatatacaatattcataacttggatagtcaaaggtaacactttgactcttgtagaaagataatacttattaatgatccctgaatttatatatcataaaatatttatttaaaaataatgaattaactcttatatcaataaaaaaatattagtaacaaaattaggaccactcatttatataaaagaacaataatatccccatagttatgtagtcaccgaataaatagatttaataggtcaatgaaataccaaaataatgtctagcatccaccattcatcttttctaactagtacatagctaatttaagtcatccaaaccatctattttaacttaaatacaaaattagtttcattgaaagtttaataagtagagtaggactaaaataataataactttcttcctcaacgataccatccttattgtaacgcctgacttttaaaacttactaattcaaaaataatttatataacttcgtaaatcgggatccccagttaaaaaaaaacacttattgaaaatacatatattgtatatcaagttacataatattttttttatacacactagaaaatcacagagcagccatgaaatatacttcaaagtattgaaagatcaaaactctccaggttgcactaccgcgatatgtacaatcattgccaagttccaactcactgctcctccagcttagctttacccttacctacataaggtagtaaactgatgagtcgacaaactcaataagatatgcataacacacatatataagaaatgatataccggctttatgcttaagccgtcttgagcccaattgttaagctcaccaaatggttaagaacgttctcaacgaaagtacgatcacggtaccatatgcactaaagcatcaacttcgtactcgcgttgggaggaccattattgtacatctagaagttaccaagtgttggaccacatgctcgatgtaccccctggtactcgtgttggtaacattgtaactaccctaaaaccctacaatgtactaacacccttaaaactactttttcattagtgttagtagtgtaaacagataataacatgcatacattcacaaatatatactttatgctatcttaacttgtttccgtgcttacatgtgccagtcagcctgagtgaaactgcagctcgacgctttataggaccctaaaccacaatatttgaaattttgatgagaaacacgctaaaacacttctcggagattttaaaatcaaactaggaataaccctatcgatgaaagacctggcaacaacctaaataacacaaaaatgggaaaaactagggtttcaaaaattgccccaatctatagactggcttcccaaccgaaatttcggctcaatagggtttcttggggaccaaccagtcgaccagttcctataggtctccctgaactggtcgaccggttcaatgcaggaaacccaaaatgtgaccccaaggccacaattcgaacccaaattctccaaaaatctctaaaatacctgtatgcactataatgaaacaaattcaagcaatagaattcaacaattcacccaaaaacttaatttaccattggagagcaaagtttgagtcttaaaactcaaactttgctcacacctcacaacaatcaatgaactcaactcaaagcaaaaaaaaaaaagtttaaataaagctcgggactctaactcaaacaccaattgtcaccttatttcaaatattcatgcattatttcttacttatgctcaaagaaaataaatggaaaggaactaggaagtgctaccttgaattgaatcacctaattctgctagaaatcattgattgaagctgataaaaacaagattcctagctggttgcttagggtttcaaaagagagggagggttgatgataaagagatagtttctagacttttcaagagaagaatacttgatttctaggattaatgtaataatattaaatattatgtaataatcatatttattgccacaaaagataaaataagaaaggtcaagaaaattgaccatttttccctccacataaatcaagtgttgaataataattaagggtagtttgctcaaattctaaatcatgacaaactctcgatacaaccaagttaactatattgtcctgatatatactaataaaattctaaaccatgaagaaacgtgactctcaaatggcccaacgtcgtgtcccacggctaccgaacacacatagaaaaaaaatgagaaaatcacatatagcataattaatacattctgaatttaaataaatctccacaaacatgtaaatcataattaataactcaatattataattaaccctaattatttaacaatccaatatattgaacttaagcggtctttccaattatcccccagttaaaaagatttcatcctcgaaatctaacctgaatagctctagatgttgtcctcctatcagactccagctcccaagtggcttcttccactttgttattcctccaaagtaccttaaacattgctatggttttattctgaagggctttctcttttttatccaagattttcactggttgttcatcataagaaaagttgtccaatgcttcataactcaagacatgcattggatcatatacgtattttctcaacattaagccatgaaatatattgtgcgcaactgacaaagctgaaggaaaagctaaccagtatatagcttgtccaaccttttcaagtatttcgaagggtcctataaacctaggacttagcttgcctttcttcccaaagtgtctgattcctttgattgtgatacacataggaaaacatgatatcctagctaaaatgtaatgtcccgacgtttgagatccgcataacttttctgtctgctctgcgaagcaagcatccgagctttaatcttgtctattgcctcatttgtcttctgggctaactcagggccaaaatatttttgttctcctgtttcatcccaatgaattggggagcgacattttctgccatagagcagctcgtagggagccattcctatggtactttgataactgttattataggagaattaaatcacaaacaaatacttattccatgaaccttcaaagtccatgacacaagctcataacaaatcctcaagtatttgaataattcgttcagactacccgtccatttaaggatgaaaggtcgcgctgaacttcaaagtagtatccatggccttttgtaagctcacccagtacttcgatgtgaattttggatctctatcaaaaataatagacttctagactccatgaagacaaataatttctttcacatgcgagtccgcatactgatccactttttatgttactttcataggcaagaaatgtgctgactttgtaaagtgatccactatgacccaaactgagtcatacatccctgtggtcctgggtagtccaaacacaaaatccattacaatgtcttcccacttccattctggaagtgttaatggctgaagtaatccggccggtcgctgatgctctactttcatttgctagcaggttaagcatttagacacgtaatccaccacatcttttttcattttgtaccaccagaaatagggcttcaaatcttgatacatattggtggtacctggatgcaatgaataaggggtagtatgtgcttcatccagaatttctttcttaagctcaagatcacttgggacacacacccgagtcttaaacaacaacattccattgttcaaaattgagaagtccttagattttcctgctaagacatcttcttgagccttaaccaatttagggtcttatagttgtgctattctgatcctttccaacaagtctgactgaagtgtcaggctatgcaattctccaattacatattcaatgtttgccctagacatatccgaggctaagtgaggagaaatcataaccgcactgaaagtttgatcaggccctttttgactcagggcacctacaacaacatttacttttccggagtgatacaaaatttcacagtcatagtcttt

SEQ ID NO: 225879 - DNA, 3972 bp, Cannabis indica
ataattaaataatactcctctctttgcaagattgaattgctccttagatgagtatgaaatttgtgtggcttgattaaataaaagtaaataaataaataaatgtgtgttctatctcacattgttgatcttatttgtagagtttataagagatttagacacagaattaaattaaatgagaatatcaaacttaaattaaattttaataactaaggtttgtgtgttttcaagtaaaaactaattaaattaaaatggtaataatattaatcacctccaacacttaaattttgtattctcttcaagtctactccctccaactctattctttccaactcaaactcacataacaaacatctcattccgtaacccttgattggaaaaagtaaaaaaataactagaatataaatgacatttcaatactttaaaaataaaaccaaaaaaaaaaagaattattttttttcattccatttcattacctctaaccgaacacctaactactaaatctcgtgttagtaattaaatctatcaaaaaattagtttatcagatgacatggcgtatgttgtctaatcttcaaggccctcaagtgatcagtatcacaaagaatatcaacaagactatatccctaaccccacctcagacaattttcattcaccttactttctccatcctcactttgaattaaagaacaaaaataaaaataaaatttacgtatcacatttgctcaagcaataagttagggcaaccatcttgggtcaccataatacaagagaagagatagcacaatcaagtaagaagatgagaaatattgcagggctatgcatcagcagcaacatcttgttgctttagattacttttcagtgaaatgcaaaatctgaaaacaccactcgctcaaaatgatgagggtgaaagaagtagagattgctcttagctcttacacaagtgattaaagaagatcctcatatattaaacaccattcaatagccccaaaaaagagaagcaaaaaaacataattatatcattctatgcaccaaacgataaatgtttttaaaatggacaaaaagtctccctggccgtttaccaaactccgctggctctgtacttctcagagtagagtgagtctgattaaggtcgcgataacagtgaggaagataattaaatttcactctgtatctgccatgaatacaacgttaagcagctggcacttttctaccgtcctctataaagaaaattgcagtttctgggacctgtttgaaacagaaatttggataaatgtataagcaaatgaataactgagaaccaagcaacttcagttaatttaccaaattaatgttgtaaaaggtgccaacgagtagcaataaattgcaaagttcacctcgtatgcagattcagacagtttcaagttttaattgttagagggtagtttcatgaacaataaaggtctatgagatgattaaatagtataagaaactaagtgccccaactgctcagactccagtacaaattaaatatacttaagattcaagcattggaataaaagtacaaagttcctagtaggatcaatcaaaggtataaattgaacacttaatgcctgaactgcaactgagaaacaaaataaagtttaatcaaattaataattggagaacagatagaaaaagtattgagtaacttacatctggccaggtatctgtaataaattccacaatatcataggctatgtccccttgaacatcaacctgttccttctcagttggcccctgaaacaaattattcagaacaaaattgaaagtactagtcagacaaaaacagactagtttccatgcaagtgcaacagccaagacgtatttaaaccttgacaactgaggctccagtagcaaactttttcccaagtttctttgaggcttcactaagtttgacacctgaggcataatcagaggaacataattaaattatgacaacaataacatcaatagtttagaaagggtaacaatgaaaaataacgtcaaagcattaatttgctcaccaaaaagctccagccctttcacagtggtaatacattttcgcttattccgtgtaaccttttcaatgataacttccggcttctcctgcagaaaaataaaaataaaaacaaattcaacctcatctcttcaagatgtcaaaaaatgatacatacacacacacacacgcatattaatatcatatcactggcttccataagaaaaggctgttggtacttagttcaatctaacattttttcgcttacctttttctttatcttcccaccaggaagacgtttgacttcctctggcttagatgctgaaattatataacaggaaacacataatgagacaaaaaaaataaaaggccattgtagattatactttttttttggctaatgacaataaaaccttttgaaagacattgaatcaaatattttataccgaagatgaagatttccaataaattcagtggctacacaataaacattatactttaaacatgaggaaacgtcaggatgtgatatggaacaggtacaccagtagtgtgatacatgttaaagttacttaacagaagtttaaataaacatcacagaccaaccttctatacccttttccatgggctaaattagctaaagttcttaaatatccaagcctaagatataatttggatatccatatataagatttttatcatagtaattgaaatctgaacatgaaataagtacgcattataacatagttacccaaaatcacatctacttacataagattccaccatacatacacctgcagtatcagtattcaacaaactaaatcgaaaatgatatatgtttctcttcttgctatgagttggcaaatgataaagctcgaatcaaaggttccatgatgacaaacaatgataaaacaagatatacacaatatataacgatacatagatatatccacacgaacaaaaccaatgcataaataataaacgctgtataatacacatatacctgaagaagcagccccatcaccacctctcgatgaaataccagtagattgtaacttctcggtaactttgtcagcttcattcgagttagattctaaacaatgagggggaaaaattaaatcaaaacaaaaaagattgtagaagataaaggaagagaattagggtttttgagcgacctttgataagatcgggatagaggtctggggcgttttggatcaaccagggcttgcacttttcgaaatcgggtccgaattcacagtactcggcgggtaaactgcatacgccacagtaaagcactcgtaccggttggggcttctccgccatcggaactcgaaaacttcaactttactactccccacttcccttttgtgtcctctcggcagtgatagcgaaattcgaaacgctgcgtttcggcaaccacagactttgcttatggcaaatggtataaatggcaattggctttggaaggcttaagttggcaagaaaggggataaaaatatacccgcaacgcaaatatcggatatgaattattttatttctttttttttttttccttcttattttccttacaaaaattaaagtgttttttttctctttggcatctatcaaaaatgtttagtccaatttcttttagttagtgacttttctattttaggctatttgtttttgctcctaaattattacttatgtactattgtcttctcccagaatttgtttctaacctcctattaaatcgtattatattatagtatattgaattcaattatatattatatttttatataatactatcttgaattttaatttatactaaaatattatatattttggtgtccgtaaaaattaatattatatatagttttatataaaatttaatttaatataatattatacaatacaatatggtgtaatacggcatatcaaacgaaccctgaatttataataggctaattatgatttttgcctcttgaactttgacatgtacc

SEQ ID NO: 225880 - DNA, 1745 bp, Cannabis indica
aactttttttgccgttaaaaatcccccccgaactattgagattgttaaatttaaggacttttgttttactgtttcagtgattgtttatgtactaaaccatgctccccaaactttgaaatctaccaaatcatgccctcaaactttgatatgtactaaatcatgcctcttgaactttcattcatgttagaatttttttttattaaaattagacaaaaatccttaaatctaacaatctcaatactaaaccatgctcatctaccaaatcatgccctcaaactttgatatgtactaaatcatgtcccttgaactttcattcatgttagaattttttttactaaaattagacaaaagtccttaaatctaacaatctcaatagttcgggagaaatttttaacggctaaaaaagttcaggaagcataatttagtacatgtcaaagtttgggagaaaaattactaattagcctgacatcaatttctttcactaaaagaaataattaaaatgattttgctactcttattcataattttaaataaaatgcaaaatcaatacatatgacaatgtgctgatgcttaatttgaaatgaatgaatgcttccattgtttgcttcttcttctttttttttaacatgatgttatctatttcaatccattctactactatggtaacacaactaatttttgtattttaagatatatttgtctactatatatccaaaaataaataaaaataaaaattaataaaaacaaacaaacaaacaaacagatttttcactcttatatacacaaaataaaatctaatttcagtgactatgaatcaataaaataaatttcaacaaatttttcattcaattattattattaatattcacctatgagagaaatccagaagacgatcaccctctccattagtttcttcttcatcttcttcatcatcaaagcgcgcgccgccattgtcgaaattgagagcatagctctgagcatcatactggaaccgattcatattcttttgtttcttattattaccattacagtaacctccgatctttctgataaagttcttccacttaggtccagcaaccacttccgaaaactccttcactttcttcaccttcttcaccagccatgtcttaatcctcgtctctcgctcgtaatctccaccggaacgacgtcgtcttccaacgaacacaccgaaacaactgcacgcgtttccttccgattcaaactcttcttcttcttcttcctctcctcttcttgcacgttgttcgtaattctcgttttggggcatattcgtaaatatcggtttgtcggccatgggagaggagtgagagagagtttatggaattggagattgaaatcgaagaatttggattatatatatggagaagatgaagagatggaaggaagagtcgaagaaagagagggttttggtgttttggggattttgaattggaaatgtattttgaaagaaatttctcacactctttgttttgtcttacgagtgagaaaaaagtcaaatttttcttggacacgtggctttgtttggttggatgtttaccaaaattttctttcaaattatagaaaaaaaagttattgttcaatttgaataagaaatagagaaattattctaaaaaaatgagaaaaaagagagagataatgtacatcattactctaaaaattataaatgtaatattttttttttgaattctaaaatgtatttaaatttagtttttaatatccttgaaaaa

SEQ ID NO: 225881 - DNA, 2894 bp, Cannabis indica
aataaataagaaagacaaaataggcttgaaggggagacaccaatattggaagagtaattattgaagatgatgtatgtaaatgaataaatgaatgaatgaaacaagttgactcaatttttgtcataggccacacattatctgccgatagtggccgagggttcatgccttgtttccaaatcgggcctctccaaacgatttttgtcgaagtaaaaccaccaaaagacaatcattcatcacatgcatactttttctttgttttcttcggttgggtcaggactcgtggtcaggacagagctgattattgaagtctttatatgctcctagctacaaatccaaatgattaattaataaagttagagcaactccgggactacttttgagatcaatttaatattaactttacttcaattttgtgatctagtttagctaatttaattaaaaaaattgaatttctaacataaattaattattttatttgtctgaaaaattgctttagaaataaccattttatttgttctaatataaatggaaattccaaaccacgtgtcacgtgagaggttaggccccgcaaaatattattatttataaaaaataattacattttgtgtcaaaataaaaaattgccaaatgaggaataccatctactattaaattttgtactaaatttgactcaaaaaataagttaatattatatttgactttattggttatggttacaagttttatcatccgggattggaagctttgaattcggagagcagatatcggaagcttagtgtggatctagaaaaccctgtgcggaaggtcttgtaaaattcagaaggtgcttccagataagcttatactgtgtatggaatctttatcttggatagcttgttattaatccagagatacactcccaaacaacttaatgtcagtcttgaaggtccatctgggaaggaaagccatgtatgtatccagaaggcttttgtgtttataaagcttccaaattgttcgtactgaaagtgtgtttttcaagatgacaggggttattgttgctagtgatgagttggatcatttaaggcggtataaatatgccacgataatttaggagatatttttagcaacaatgcaaatctatatatagctttaaatctttataatctgtgagagaatcagaccagatttggttgtgtgaaaattgtgatagtgtaaggtagagtctaaactagagagagaaacttcttctcgtaacctctgagaagtttgggaatattcttgtagccttgtaaacactaatatcaatgaagatatgtatgttattgttccaaccgagatatagatcattgtagatggctcgaactcgttaaacttgttgttattattttttgttttaccacttaatttattacttgaattattgagatctcctaggatattatttcttgattgtgttgcgtgtttgttggtactataaactgaatcgtaagtcattgattgttccgttttgcacaataaactggtatcagagcaaggtttataatcatgactgtcacaaaatacgatgttgaaaaatttactgaaatgaatgactttggattatggagaatgaaaatgaaggctctattggttcatcaagggttgtatgaggctctataaggagagaagtctcttcctgatttgatgtctgaaaaagacaagaagagactcgtgcaaaagctcatagtgtgatcattttgaatcttggagataaggttctgagaaaggttgcaaaagacactattataaaagtgacttttcttatctgtgtatactgtctttaatacaatttctcaacagttcttaaaaccgttggctatgtgggtatcataaaaatacggaactaaaagatggtttataactattggacaaagtcattttaaataatggtttacaaatattggaaaaagtcactttagatgactatttataactattgacaaaagtattatatacattaaattgaattacttgatgtatattttttaaaacattaaatatatataataatattaattttttatcaaaaaataaatgatattaattaaaattaatatattttcatacttcacaatatacatacatgatatacaattcagaaaaaaaaaattaattcaaatttaaaataaattgtatatgaaaaataaataataaatataaatattacaacctaagtgaaatttattttcagctttcaagtcaaaaacaagcctccccttaatggcaaccctcaccaggcctggcgatggccttccttcagttgtctaggccaaaaacgagccccgacttcactccccttgacggaaaccctcaccaggcctggggatggccttcctccagtcgtccaagccaaatacaagccccgacttcactccccttgatggcaaccctcgccaggcccagcgatggccttcctctggccatccaagccaaaaacgagtctcgcctctttcttgtgccttccaatctcgaactcctaaaaaaatgagtatttccatcatggctctccttcccctctcgtgtcgtccaagccaaaaagagactcgcctctttctcatgccttccaatctcgaacaagcaatggccaaaatgtgttcatgtctctcctttctccttctctcatcgtctctttttatctcgactcatactagatgagccttgtttagtggcttcctccgcctttcgataatagagccacatataatgacggggttcaacgccctcaaaagcccaccataaaatcctttgtagctccatccttcataatatagtctttgagaaatgagaagagagggaggcaacaggttatttgttagggttagaaaataaaatgtgaataagatggagagagagagaaagagatttgtagggttttt

SEQ ID NO: 225882 - DNA, 5267 bp, Cannabis indica
tacttgaacaatgggtttatgttgaaggtgtcgcagaaggtttgggccatctcactgtagtgaatgagttcggatcgaagaaggccggcccagtcatcttggctgtggagttgtggccaggcttcggacatcaaacagtgtccttctgttttattcgactaagatttggatgttaggagggattattatcaacatatgataacacttcattcttctcccgcaagccaataattattaaaaagaatatataaatatgtatacacatcgtaatataccataagtataatatggattttgatcacaaccatttttacttaatccctaacttttctctctaatagccgaaaaagaaagccaaaacaaaagggtgctatcaaattcttaattggaaccaaattaagacgtgggcaatacaacgatgcacacattattgtgacatggtttactctaacgacaattatttaaaaccaatcaactttgaagataactatagtggagtcctcaaagttgaaggaattgtcaattaaactagggaaaactgagtacaattaagaactaaaaatattagcccagttcaataaatacaaattacaatagacaagaaaaggcagttcaagcctaacattcttatttattgacttaagcgcagatcaggggaaatggagaataataactcagaatctcacttttttttatcctcctaaaaactgatcgtaaaaaatgtcataagttcacactactcgatatgaagaattagcaaaacatgttaacatatatcgcttagtacctactaaatttcaatactaaaggcttttccaaggcaagtcgatacaataataggccctaccaaatcccctgccgcacagcctgcacaaagatgcccatttcaaaataggcatttagacacaaaacaatatggatatggtgcatctacaaagtaagcatattacagacaaaatatgcttacctatccattgaccagctgaagggcgaaataaaactgcaccaattccagctccaatagaagcaaaaactagtgatgaaccgcatttgattgtagtagaagaaagcttctttccaagaagtttaacttgttctgctggctcgacttcatcaccctcttctttcaaattcagcaagcgagtgataaatcggtaaaactcaatgacaacttgaacagtccatgatgctgcaactcctagaagatgccctgcttaacatatttccattcagaacacaaaaattcagacataaggctaaaaaataaaaactaaaaataaaatttaaagtcaacctctgaaagttgttttgccaactctgaaaaagaaaacataagcaggcatgcctctgctggccttgcgtgtggctgattttggaacatctgtcagaagttacattacatccattagtgtcacacaagatgttcttacattaattctatagattactattgtaatatatatgaatgaaactaccttttaagagtttccatgccattcgctgggaaacatgatggacagccattctttccaaaattcgtctagttgtgacaatagtagtctatgacaagatgaaaaatataagtcagatcctgtttaagctgtaacctttgaaaaactttattaggaagtatgaacagcgttttgcattttgatgttatcttcccagagagtccagcatcaaatcaaacatttagattttccaaaatctgctaaaagcatgtcacaatcttaaacagaagacaacatgaatcaatgaaaagtcaaaacagcttacctcacgacagatttgtattactgatttttttaagggagcaacatagtctacaggctgttcttcctgagattcctgcaggaagtcatcatcatccgcatccaaattcgtacgaggctccaaaagtggtaaatagaacattaataaagaccttaaggaggtcatcgctagtgtcctaagctcaaaagccgaaaatagaggctttaactgaattttgtactccttggtactgtatctaagagcatcattctgaaagaaattttcagaagcagttttgaaactagttgcgtaatcattagaaaactctgcaccagcatcacattgaacaattggtatcctgaaattactgttgcaacactaaacagtaagccattcagtacatggtttatggtacaaattgagccaaaacgaaaagcattccaaagcaaaaggcacttttatattggaagagaaaggatgtagctttccatccactagaatgtatctaatgttacgagcagtttaaatctggaaaaacatcaatcttgtacaagtaaacatgaaaacaagatcaaagacaattacataaaatcactacaacacgagtacacattggaaaagagagaaattaagaaagatgaaattacccaaacaaagctttgtaggcataaggtgttcccgcagccacagaggcggcggcagcagaggcagcggccgtggccgaaataaatccagaagagtgagctgtatataaacttgggtttttcctcaacagatccaaggctatagctattcccgccattctcaactaactaaatttacaacatatgtatggcacaatcagattcttatataatatgattgaagtgattcaaatcatcaacatcaacaccaaacccaaaaactgattcttaccaagtccattaatacatgaatttttaaacccagcaatattatcattatgtaaagcatgtaaactttacaatgtagtgcaataaaagctataaacatcagacacaaaaaatgcagcaataggaagttgacatagcttgttatatctatccaatattagttacattagaaggatcacaataatcataaagatctctttaatcaaacagaaaaatcataaagatctcattaaaacccagatccaacaaagaaagaaaatagttcaaagttatcaataaaaaaattaatcgagatatgaacaaaaattctatacacatacatcatccattggtcaatgtaattttaaattggacaaacataaacttcgtacatacatgaaagtgaattgaggcatctctacaaacacgtagcactatagcagaatggaataaccataaacatgaagaaaaaacaaaaccagcgaaatcatataagagatggagattttagcaaattttcaaaacaaccaatgataatcgaacaagcaaaaatttagaaatatctcaggtttcaagatccaagaaacaggtgagtctccaatgacagtagctgaagagtccaaggaaaaaaaaagaagcaacgaagctagtctggctttggagaatgagacggaatattctcttttaatttacaactagttcttgttcttgaacgtgcaaaggtgtacataatctacttatatatatacatctatatctaaaaatcagaatcggctcccatactgatacaacgaataaacacaaatcaattttcaaagtaactaacacaaaaaatcagaatcagatgatataagtaaaacactgagtgtgggtatactatatagcatatacagggaaatgaaattgagtgaaaaaatagaagaggttacctgaggaaggtgaactggtccgtccgagagaggaaaagaccttccgtcgccgtctccgtctccgtcgccgtctccgtgtgtgagtgagggcaagcggaatacagatcgtaatatcgtatgtttggcctgaatctgaacaatttatcaaaccaccaatccatcttcttacaaacgacaatgtttttttctttcaaagcaaaacgactacacatcgagaaaacgacaacgtttttttcgaataatttcaataaaacgacaaatttctgttttatttatttatttatttttttttcttttgatgaaataaaacttcatttaaggttaagaaaggggccaaagccttacaggccaagcggatgaaccgcacaaactcactaaatggcacagatatcgagtaatcacatcatcaaaatgagcaaaaagctcaaagctcacacaaaagcatctaaagggaaaaattccacaaaagtctaaggctaacgccacaaagaacataagatgtacaacatactaattaaactaaaatacaaaagacaagtaaataaataacatagaacaactccaaagaacttctccaaaaagtagacgaggctgcccgaaagcccaaaacagctaggccaaaagcaaagggtctctgccaacttcctacgagaaaggtccacactcagtctcccattgcaagttctgaacggtgaagatgttaagacaagggaagcacattcctatgggtaagacccgagtcccccctctacatctacaacacttagaaagctaaacaacatccattgtacaccagagccaagacgcctgaatagtattagtaacccacgagaaaacactgagatctaaaaaaagaggaagaaaaacaacactccaaagtcaaaacacatgcttgagaatgaccacaaccaagcagaatcctcgaaaacgaaatggtgagagccaagagaagccccaccaccagcggcaccactctgcccaaaaggacaaaaccaccaaaaacctctgaccaacggcaagaaccatctcaacagagacggatagcctctagtagcagcaatcagtcgcctaaaaaactaggtgccatagaaccggccttaaagagcgacacccaatacccacctgacccgccaacaccgaaacccaacaaaagggacttcctccacaacacgcagcatgccgagagtaagacttccgggcgccaccgacccatatctggccgacggcacccataggtgcaaaaggaaccctagaagacacttaaagagaggaagagactttaggaagaaaaccctaacagaatactcacaactatcgtaatttaacaaagtatttttgttttattttcgaataagatagtttaatcaaaatatagtaacattagagaatgtttacctaagtgactttagttctttattagaggatgttgcaagtttgtttttcaaattttcaagagtgtccctaatccatgtacgacgaacggtcaatatggctgcacatggattagcagtgtatgctcttcggatggataaacaaattgtttatctatagaactatctctttagtaaaaataataaataattttttattttataatctatttatagttgtattataattgttatgagattgttttcatttatagttggtatgagattgatttctcattactttttagttgtatttttattttttg

SEQ ID NO: 225883 - DNA, 1860 bp, Cannabis indica
gtgtatttgaatattacaggtagagaaatacatatagatatatacaggcgctaagttagttagaattagtaactaacttagcttagttcaagacaggcctaactaactaagctaagaaaggcgttttactaaattgtaactaacactaatgtcgtaatagcctccctcaagatggcgtatatatgttggagacacttatttcagatacaatgtgttaaatgatgaggtagtaaggcttttgtgaatatgtcagccaagttttgttgggactgtacatgagtagcttgaggatggcttgctgaattttctctctgatgaagtggcaatctatttcaacatgctttgcacgttcatggtagacaggattttcactgatgtgtatggctgcagtgttgtcacaatatagagacgcaggtctattgggagagatgccaaaatctttgaggagagcaatgatctaagtgactttagggattgcattagtcatggctcggtatttggcttcaacagaagatcgagagacaacttgttttttttttaattttcatgagaatagagcttgtccaagaaacacaatagccagatatggtacgccttgtatcctaccaagtcccccatctgcatcagtaaagaatgagagttgtacattggagaaggataggcttgtttcagcataggctgatatatttggagaagtatttgaagggaaaagagacattgtcctggagtgtgtttaaggtattgaagaacacggcgtgtagcttgaagatgtggcactcgaggacaagtgaaaaattggttgaggtgatttacaacatatgaaatgcttggcctagtgatggtgaggtaaataagtttaccaatgaggctcttgtaattggtaggatctggtaaaagttttcctttatccttgctgagttttaggttaggttctattagagtggaggctggtttagctccaaggtaacatgtgtcatttaataattaaagggtgaaagtttgttgtgatatagaaatgtcttgtttgtaactacctatttctaggccaagaaagaatctgagcgagccaatgtccttgagcttgaattttttgtccaagaattgtgtgaagtgagtgatgaccgactcattgttgctagctacaattatgtaatctacatagatcaacacaagagtattgttggtattcttttgatgaatagggagttgtgtaaggtattgataaaaccttcagtttggagtgtggtactaagctttttatatcaatgtctagaggcttgttcaaggccatagatactcttattgagtttacaaacagagttgagtggggcattgtatcttggtggacttttcatgtacacttcttcatggagatcaccatgaagaaatgcattgttgatgtcaagttggtggacattccaattgtacattgcagctagtgcaagaaaaaattttagtgtgttaaacttagctacaagggcataagtttgtacaaattctatgccttatttttgggtgaatcctttagctatactagacgagctttgaacctcttaacttctcttttttagttgtatttaactttgtatacccatttacctccaatggctttatggccaggggtagtttgattactgtccaagttttatttttctcaagagcttgagtttcattatccatggcttgtagccaatgtttgaattgggaggcttcagtataggaatagggttctagttgagagtatgctgcaagaacaataaccctgaattggggactaagttttgcataagaaatgaactcctcaatgggatgagttgttgatgcagtatgatagacatagtctttcaaatgaggaggtct

SEQ ID NO: 225884 - DNA, 2123 bp, Cannabis indica
agagagagagagagtgagtgagagacaggggaagagtgagtggtcaaatcgtcattgtaaaagctctaatgccttttgtgtgattgtgttattattgcgataataatttggtgctgaattccctctaaggttgcggaaacagagagaggtccatatgcatatttgtcattacatatttgaccattatggatgaatatctacataataacttgctcatcaccacttgaccaatacagtttattctgttctattcgattataattatattaaatattaattatagctagtctagttcaaattgtacttccttcataacctttttaactctgcagtccagctcgagtagataattgaatatataagttaacaaataattcaaaagtagtcgttaattaaggttacatatatatatatatgaaagggtttgaagaagtacttttaagttttatatatatagtaggaggcaaattaaatataatcacatatatatgatgataaaagtacgtactattggattgggggcgaacttaatatgataaataggtaaatctatattgtgatttgatggtataggcatgaagggatctgcatcagaaaatggaattgtagaaaaccgaggaaatggaaggctcttaagtgtgaaagcaacgggtgaatgagccaaagctaatcactcccatgcacacgtccctttctctctctctctctctctctattcaagctactaatataggatcaattcccaccgtacaatacattattattattttctttcctttatgatataacacaagtgacctaaagttcaacctctacaaatctaaaaaattataatttcctttcttagggtgtggggatccataatttcaaatttaacaatcaaattaagtctcaattaaaatgtaataacaataaaattgttattgtggattaataacatagcaggtacggattaccaaataatatatgtacaggagatattagaggagaggggtaggccatataaaaaggaacataaatattaatattaatattataattattagttattgcattttctgtgtctgtgtccatttatttctgatgagctagctagcttgtctcttaactatatgttaccataatagccaggtattgcagctcaaggatcaagaagaagatgagatgagatccaaaagaagtttttttaaagtgtccatcatcaaaatcccaatactacttctgatcgatgatcagtcaatcccatcagtcaaatcaaatcaaacaccaacaaagtgagagaaaaggagagagaaagagaaataaagaaagaaagaaagaaaagcaagaaaactgagatagaataatagataaagagatagatagagagagagagagagtgagagagaaagagagagagaaagagagttatcagaatcaagcaaaagaaaaaatgtcggcctcgtccgctgccttttcaccaccggaccacctctccccttccgaccagctctgttacgtttattgcaatttctgcgatactgtcctcgccgtaagcatatatatatgtataactcatatatatacatatatatatgaacaccattctgtttttctaaattaatattttgttttgattttgtataggttagtgttccttcggagagtttgtacaagattgtgacagtgagatgtggtcactgcagcaaccttctttcggtcaacatgcgtggaccgcttcttcctgctgcccccaatcaactccatttcggccatgctttcttcactgctcctcaacatcttctggtgatgatcaataattaacaatttatgtattattaattgggcttcaattccttgatttgtgtatttataccatttttcaaattatttaattaataaaatattgtgatttgttttttaattatgcacaggaggatattcggagcctcccatcgaataataatcttatgatgatgaataataataataattataatcatcatcatcagccaaaccctaacgatttgcttatgccaattcgcggaagagctgaagagatccctaaacctccggttgttaacagacgtgagatctaataattctatactttttacattaattatctaattttaggttttttt

SEQ ID NO: 225885 - DNA, 2189 bp, Cannabis indica
atgccctggaaaagacataacacatattcaaggtgtaagtataccttatcactgattatcatgccagtcttaatccagtgaactgacaaatcatgggaattaaacttttgaacatatagaattatgattatattccactgtgttgatcatactataatcatgaacaaatatatacatatttatatatgttatggacttaatcgaatttatacattaaacaatcacgaagtaaatcttgtgaaccatgcaacataaaatgcaatttctgatctttattaattagtaaatatgattatattcaaatgagttttatttagggcacaaaacccaacagaggtaccacaggaggaggatacaaagcgacataacccttgaagtcgagcccaactgcaaaacgaggtaaatgatgttgaatcccattctttttcctctcatagtcgtacacttagtgtttatactaggtctggctccatgaagacacgacaaggaaggagataccatgttcacaggggcaatctttgtgactgcctcaataaaaattttagggtgcgatcccaaacaccttgaaattgagatgagccccgtgatccccaagtgggcgatcaaggcataaataatgaaaataacccagctaacattgttcaccctcctaatgaccaactgtgactaccgtggtagtgatcctaactaaaatagcagcagttgctactgcaccagcgataactcaaaacaaccctatcgtgccaggggatattgatcagagtgttcttctacgagcattaaaaataattgagcagcagagaaagctttataaactccatgggacctctcctttcaatgaagaagtgtgacaggctcgactcccttagagattcagggtatctgaattgctaaagtataaaggtactactaatcccatagattatttagaaaaaaatagaaaaaaattaatacaattatcgaagtagaccagtgaccatagctagcaaaatgtcgcatccttgcggcaaccttggaggacaatgctcatgattggttcacccaattacttgaagcatttatcttgacttgggagacttttgtaaacctattcttgatgcacttccaggccacgatgacatacaaactgccttatacaactctggctaacatcaaacaggaagttggtgagtccttacaagattattttaaatgttttaacgctaaggtaaccaaagtagagaaggcccccgagtcttcgttggtgtgtatgttgattacaggtgtcttgccattaattcttggaaggagttacaagctcgatgaccagagtcgttggtggaattcttcgccatggctgagccgcataagagaattgagaactctttggagaaactggaaagagcgaaggaaaaatgcgagtcgtctgtacctcaatcgcgctatcgaagtcctagaggaaagaattccagaggtcgaagaccaagaagacgcaacccccaaaggcagcgaagtctgaaggttgccaagtccccttccaagaaggaaacatctccaaagagaaaaggaggaccgcgctttctcaattacaccgaattcgcagttcctcgcgatcgcatttatgcgatcgaggagaaaattggagtctttaaaaatccttcgccaatccgaggaaatcgtgataaaaggaatcggaaaaaattctgcaagtatcataaggacatcgaccataccactctggagtgctggttcctagaggatgaaatcgaagaattgattaggcgagggaaaatttagtaaatacaagaagaagggagaaacacatccgacgcggatgaaactaacgacataaacaatgcaagcggtttgagaactccccgcaacatcttgactattattgtagggccacatactggtggagattcgaagaagttgcaacagtgatatgccaaagaagcaagagaaaaattgctcaccaatgtaaacaatctaagtgagcaacctgagaagttttctaagaaggaatgtgatgacataaccatcatggagagtgacgccaggtgggtactgttggaaattattttaccaggatcttagatctactcactagtatgttgtttaacaccctaaatatgaactttctaaaacgataaataaaacaaatatagagttaagaaaaccttacattgatgcagcggaattaatgtctc

SEQ ID NO: 225886 - DNA, 2746 bp, Cannabis indica
ttatgttgtttgattaagacaacatcaatgggtggtcttaggggtaaggggtgttggaaatggaaagtgctggtaggcatttgttccaagattcgaatctctgcagactcgacaaccttggaggtcttctgaccgaacaacagaagtcacttcttatagtagaaggtcgaatcaacggttttaaggagagtttgaaaaaaaaattcaaggcttgttctcaatgacaagagagcaatgtggatgtgttcaatttcggaaaaggaagaggacatcaataacagaaccaactagtatttttcttttcattatatttgtgaatactgaatagaatgaccttttcattataggaagaggacatccctaatagattcattgtggttgagctacaatcatagttattggtgcattttaatatcgggttttacgcattttaacttaataaataatatagaaaatcattaattaattataacttataagacgtcatatcagtgtagtgttaggcacattaaggtgtcaaatagcaattagatctttaaatagattttgggaaatatattggcaacggtgaaagaactagctaaattaaagttaatctaccttgtcttgacaaaaatgaaatctttcatcttcctctagcaaactttaatcccaaggtaacatctttcaagggtatccccacatgggcagtcccaacccaactctcaagtacttagttagtaggccttactccacaacccctcttactctaactctatcaactctacttgttgaaagccataccttcttcttctatgaggttgccacaaaagtggcttgtgacttgtgagagtgtggagtcatttgtaggtgaggaagtggacgagaaaagttgtaaggtggtaggtgtaggggcaacggtgcccaacttcttaaaaaaaaaaattgattgtatataggctataacaacattgaatgtaccttgcattaaaggtgctcttataatccattacttcttttgccactaataccacaataaagagaattgttaaaaaatactattggtatgtaacatattctttggtgttatatcactattagtgtaattaagtatcaagttccatataattttaaaaaataatttttaagaaatatcgctaaccaatcgtagagtgtcacctacaaaaagtgttggacactactaatacccaataataatactaccataaaatacattttcttagttttttctcaatatcttaaagtgtaaagataattttgtaaatgctttattattaaagcttatagtagcctctagtcttttaccttaaacctgttctccattttgatgataaaggaatgtaaggctggttgactaagctagggataatatccttaccaagttccttaaaagcttccaccaattagagatgatgagtcaatatgtgtaggctataccctatagggatgaacaacccaatttattgagtttttttttagtataaaattatttagattttgggggataacctattgcatcaccatttgttaaatatgttaaattcaattaattaaaatttcaatcacccataataatgtcatattggggagctcaatgcactactatagttatctggttaaaaagaaatattattattacatatatatttttagaaaaataaataaacaaagttaagtcaatttacaattattgttttttcttaattattattgagttaattttttttactttaataagaatttatagatttttttgttttatttttgtcataatatttaatatatattatataaaatataatatatattatataaaataaatatttttttatacaactcacttatgttattagattggacaaaaacttggatgtaaatgctaaaaaaaaattgattgaggtcctaagagataatttatataaagattagaatccatgtgatatttactctattattattattatttatttggcttgtttataatgcgttgtatgattttgtactcaattataaaatacaaaaaagaataaatataatagtaagtataaccagctattgttgtatgtaccataaggtccaccacttgaacaaaatacaaagctctgtacatatttgcaacttggtaaaggggagaatacttttttcttgtccaaatctaattaaataaagcttcagcctttttctaaattagatttactaaaactaaatactttcccaaatctaaactagttcaatccttttattttattttaatatgttatgaatacttgatcttaactaaatctttccttatttgggattgtgaaggttatgctcactctaggttttcactaagcaataaatcaatttttaatgatatgaaagaattttttttttatcagaaattaatatttaggtgaattctttactattttcacttttattgatattaatttatgatgctaaaaataatattaaaatattcatttatacggattgattatttgaaatttatttttagcttcataaactatttcaaaaaggaaattataaatactttctaatatttaaatgccttattacgagtttctatcgtatttttatgaaataaaataccataattattcctgttctcttgtttttgtttcattgtcgaattcgagtaaataaaagaagaaataccttaatagaagagagccactaaagagaagaacaaaaatagtattatcttgattaaaagggcttagtgtagatttaatatgcatta

SEQ ID NO: 225887 - DNA, 4420 bp, Cannabis indica
acaaaaatctgcgttaacagtttggtgctttcattgagagccttggtgataaaaacttagaaaaatccctcctcataaacataatctacccatattcaatggttgataacaatcaaaacgacggtaatcgtcctgaagaaacattctatcgtcttggcaaagagcccatgggatctcaaagacccaacacatctgaaataccacagtcgaggaggaacgatggtaatgatgatccaaactcagagaggagaaataaggatgtcaataactctgccagatacgtgcctaggagtgaggatgcttatgatccaactagatatgtgccattggtagagttagagaatagacaactttgacaacgtttggctgaatctaactgacaaaatattgagttggagagagaagccccagcagctagcgctacataggggatagttcctcagagccaacctaatcatgcggtaaggagaccacgaggaagatctcgaggctccagaaccagaagacaagaaacaaactaagggaatcccccaaatacccaagaggaacaacttgggaataccagagatgttcctgtggaccaaacaaaacacccaaatcctaataacgcttagaatcaagaacatcgacgagatgttccacaaacttcccatggatttgctaaccaagggaatgaacgaactaacatgtcagaatcatctcacatgaatgaagaatcaaggcctcctcgacaagggaatcagggatttcctcgtgataatgagagaaatcctagaaatcaaccaaggataagtggtcttcctccgagacatcatcaacgtccatcccgagcggatagagacaatgtacacacgtacttaaatagaggatgtgtgtctaatctcatccaaagaagaaggtcagtgtgagatgaagcaagctcaagcacgagacaatcaaggtctcgagggcatagtcggtcgagtagacaaatgtgagacagaagtagatcttgacgctattatgctgactaagaaagcataagtaactcacaaagttattaatccgagagttacttgaagacaagatctgtaagtaactataaacaaaggcaacttgaccttcgtgagcacttaaatcaaagacagcttgaccttcgcgagcgtctaaaccaaaatgcccctaatttgcgtaatctactcaatcaaaatgcaaatcggcaaccagtggatcccatccaactacgaataattcaactagaggatgaattcagaaaatatcaagatggagaacatggaaagtttccaggatatgactcagacgaagaaaccgagccattccatccaaatatcttaaatttagaattttctcggggatttaagaacccacgtgtctcgcaatatgatgggaccacagacttgatcgctcatttaaacaaatttaacactattatgcaagcaagtaatgtttcaaataacttacgttgcattttattcccaacttccttaacaggtgccgcgagcagttggtttgataaattcacccatcattccatcacgtcctgggaacagttgtcgagagactttaaaaagaattttcaagctgcaagagaccattgacttgaagcatcgtccttgaccaacataaagcaacaacctaaggaatctcttaaggcgtacttgagtcgcttcagtacgactattacaaaagtcagaaacttgaatgatagtattcaactaacaacacttcaagcagggatcacaattgacttatctacagtaggaggtgagttatggagagtaatctctagggtcgccctgtgaggaacattaatgagttcaatgaaaaagcacaagtctttgtgcgtaaagagaaagcaaggactgaaatgaagctgtttaaaattggctcaggaagcaaatccagcatgagtacggtaacaacgagcacagtcacaacaaaagtagacaatcctagtggatcaaacacaaaaggaaaggatgacatgaaagaatcatccaagaacaaaacgaagtagaaaaaagatgacaagtacgtataaatttacttggtatacaccaaattaaatgaaactcgcgagaatatcttccttgctaatgaaaacaggattgcattttgcaaacctaagccaattaggcatgcgagacacaagcaagattcaactaagtactgtcgacaattgaaagatgaggtagaaaacttgatctcgcgaggatactttaggcaatatgtaagaaacaggagagcctaactagcctaacaatcctaataacccaaacaatcagagattgcaacctcctcccgttgagggcaaggatatcttggtaatttcgggaggaccacacctcgcgggaaatagtaacaatgcccaaaagaggtatataaatgaagtgaagaatgaacaatcagcgttcgctcctgaaccaccaattatcttctctaaagaagatacaaaatatgtgcgatatccacatggttatcccctcgtgataacagtccacctcgccaataaaagggtgaaaagagtgttaatagataatggaaattcagtcaatattttctacaaagacacattgaaaaagataggattagagaattccaagttaacactaagcatggtgagcctatgtagttttaatggcagcacttaacagattcatttcaaagtcaacagataaatgccttccattttttaatattttttgaggcaacaagaaatttgaatggccagaagaatgcgaggaagcatttgtcaacacccacagttttggccaaaccaataactgaagaaactttatacctttatttagttgtctcggagcatgccattagtgcagctttagtgcgagaagagggtaagaagcaccatcaacctgtttactatgtcagtaaaaggttacttggggcagagtcgagatacccacctttggaaaaacttgtactatgcttaattcatgcatctcgcaagttacagccatattttttggaacatccaattaaagtcttaaaaaatcaaccattaaggcaagttttatcaaaacctgatgcttcaggaagattgataaaatggtcgattgagttggaacaatttgacatagcttatcacccaagagtatcaatctaaggacaagctttggctgactttctaataaaaagaataaactcagaagaagaccctgatgttgagtgtgagacagaaacatggaatctatatgttgatggggcttcaaatgagaatggctcgggggtaggtgttacaataatgtcgccaaataactttaaattccactacgcactgagatttcagtttgatacttcgaacaattaggcagagtacgaggccttgttagcaggtttgagaacaaccgagacactaaaagttaaaaatataacatggtatagtgactcacagctaattgtaaaccaagtcttgggagaataccaagcgaaaggcctaaagatggctaaatatttagagaaagtttggaagaacttagaaaagtttgattattttaaacttgaacaaattccaagagaacaaaactctaatgtagatgcacttgcaaagctagcatcccaatttgatctcgataagttgaattttgtattggtggaagtcttagacgacccaaaatatgtgatgaggaaaaaattgagatgatagatacttcaccaacatggatgactccaattgtcaagtatctagtaagtggagagcttcctatgaacaaaaccgaggcacgtaaactcttataatcaatacctcgctatacggtggtcgaagggaaattatacagaaggggttattcaatgcctctcttacaatgtgtgttaccagcagaagcaaatgaaatattaaaagaaatagcttctgtggagatcatgcaggttgtcaaagcctttccaagaagattatccgtcaaggatattattggccaacaatcaacaaagacacacatgaatttcttaagagatgcgataaatgccaaaagttttcacatatacctcgcgtaccaccaactaaattaagaatgatgacctcaccatacccatttgcaatatagggaatagacctgattggatccttacccaaaaggcgaggaggagcaaagtatgcaattgtggcagttgacttcttcacaaaatggacagaggttgaacctctagtttccataacttgtaaaaaaagttctcgattttgttatcaagaacatcatttgcaggtttggcattctaatcaaaatagtatctcacaatggaactcagttggatggagaattattcactaagttctgtgaagaataaaattattagaagtttctcatcaatatcgaggtctcaggcaaatggacaagtagaagctgtaaataaaatcttaaaagatactattaagaagaagttagatgctgctaaaggaaga

SEQ ID NO: 225888 - DNA, 1861 bp, Cannabis indica
actacctcaaccatggtgcaattcggaagaacataggcaagaaaactcctctggacactgttatagaggaggtggactcccccgcctctagtctccaactaggtggggtaagagaagagattgttgtcaatgatgagaaccaaaaagaggacgctaaaaactttatgatggcattgatgatgactaaaaccctaaagacaaggaagagaaggatgacggcaaaggctatgtgaaggacatgtattacaaagatggttactactatgaccatgatccaaacttgcttcgagtgactaaagaactagaagctactcagatggagttagcaaaacaaacataactcactgaaaaaaatgaagaaaatgatggaacgtctccaaaataagttcaaggacttggcggagtctgacgatgacccttcggtggaagtattggctaaagaacatgctcttaggcaaactgagactaaaaccttgaatgctcgcaaggataaaggtaaatgcaaggtaagtgagcctccacaggagtctgctcctaaacctccttggaaagacataagtctgatcagccagcctttgaggacgcagaaggccactagtgctttcgagcctagacaccattttgctcctagaggcaaagtcgtgccaaaagggcaaagtacaatggtacctaagtccaaggggtggaagaaccaccctaatgattctgttaaccaggatggaaggacaaatgatgggcattctgagggcagctggtccactgtagacctttgtcgacgattggacgcaagaaaaaaaggtataaaagtgaaaaagcgaggccacctggaggtgatctcagaaaccaactaagtgaaaaaataaggggacatgatcttcccaaaagcgacacaaaaaggttagaggagcaaatagcagcgctagtcaataattagagcggggcccttttagactctgctttcaaaaaactttaagatgtcgcacattgagttgtatgaaggaatgacagatccgcgagcacacttagcaaaatacaataaaatgatgcaagtggcacgtgttagcgatgatgccaagtgtttgtgcttttccctaacactgaccaagtccgcaaaagactcatggaagcaactggctctaggatcgattgatagcttggaagacttatagtcaaccttccacaaacagttcattggtgtgcgtgataaggacatgggagtcggctcaccaatgtaaagtagtaacacaacgaaagcctgtaggcttttatccaaaggatgatggaggctactgccaaaactaaagttagttataacatgaagttgatggcccttcaatccagactagatgttggttctttgctatggggagaaatgcaaagaaagagagcaaacacgacttaaggcattatcaaccttgaggacgcttacgtacaagcctccgaagtccctctggctctagacccttccgtagctacacctagctttacacctcaagttccggctccaactttaactcttcctgggacttagttttctccaactatttacagacccactacatccggtctcgcacctacacagacccatttttttgggtacatggtagcacatatcggtgaagtatagttctcgggcagaagaagacagaggctccagaattaaatgtgagccatactcagaacaaaagagggggtaaaggcaataacagtaatgactctttaaagaattcaagaaggagtacgaccctaaatacactaagtataccagtttgatcgacacatgggaaaatgtttacagagcgacctgcaatatagtccactatagaaagcctctacggatgttgcacggaggaaggaatag

SEQ ID NO: 225889 - DNA, 1703 bp, Cannabis indica
gaaaatcaaatttcccttacattttatattttctaaaaggtctattctattcatgatttgatatgaagaccttaaacgttactccaagtgttaatgaaattaaaagtttcactttcagaaaccgagtaatggatttgtcaaaaatataattatgtaagtactaagagagagcagttggcaattggcaaatccttttctgtgtaattttatgaacaaagtaagatgcaaactcgccattaatatagataagttgtctgtgtctgcaaatattaaatatactttttaagttttttaagggatggtggtaatggcaccaatcttgaatcttggattaattaactttgctatgtcactctcactattattatggccataaattaaatttcacaaaagattttaatggttatgcatgcatttttcttctcattattattatacagaagcagggtccattgccattatttatttatttatttatttatttgctaaaataggcttgcttgttattttctttcctaaagcgtaaaagaaagatgatcaacaaataaaagagcacaaaatcaagtgttttatttttcttttctcttctttttaatcaataataataaatagaatggatcatgaatttagtacttttttcacttccccagaaaatttgtcatgcacactacttgtaatgggccttaaatataagtatcaatcaattggttgataattcatcaaaaaaaagatatttaccaaatttttaatttttttttcttttttactgttgggcagaatttttttaaaacttattttatactgtatactgtgttaagtttttacggttattctacggttattttttagttgtactactgttgtttttaattgttctgttatgttgttttaaagttgttttaagttattttataaaaagatagtatttttgtaaaaaattctgtatgatagtaaaattgtaaacttttattcaaaatctaatatttttgtaaaaaaaaaaaatcaattggttgatacaacataatccatttccactgctgttttgccacgcgttcttttgttgttgttatttctaatgacattttggattatctgtgtgtttctttttcaattaaattaagtgtctttttatcatagatagatacatcttcaccaaaaatttgctttaaagtaataatatgtcaaggatagatgatcattagatttgatgaaaaaactaaataaataggttaacaatgtattaactgaaaatattagcagccatgctgttttcataacatacctactctagaagaataaaatgtcattttcaagaatttaaactaaattttaatgacgttagtccccaacaaatgctcaactaatagattttcattttattcttatatccctttctaaaaaaaaaaaaaaaaaaaaaatcttcatcttatatacacgagcaagaggtcataatatttttccttctaggtgttaaagtcaaaaaaattacacataataatagggaaaattacaaaaatactggaatttgggttaacttttacaaaatactctcacacgaaaatcttttcaataatactgtgtttttataaaacaccagtagaacacaaaacagaagaactcaaaacaacagtagaacaactaaaaaataccattagaacaacagtgaaaacttaacacaatatactgcaatatgaagcttataa

SEQ ID NO: 225890 - DNA, 1257 bp, Cannabis indica
ttttttttaatttcttcatttcatacataataaatcagatccaaatgttctttttcatgatttttacgtcattttcattattttccaatcaatgatatctggcattttaattacatcattatcattactataatttaaagcttattattggttcgtgtcgaatcaatattgaaacttacactaccaatcttatcagcaattaattaataaagataaaatagaacactctgaacaagctccaattatttttctttggttaggttatgggtttttttttttatttttttaccagggaaatctgacaaaacaaatgaggaattagagtttaaattaaattaatattgattaactaataattgattattgcagtttctgacaaaacataaaacgagctcattgatgggtcctaatttggatgcaaaaagtcaatgctattgattttgggaagatcgaaagcatctaatcctctattctgtcttccactaatttatttggtttcttctcttgtttgttgtacctgttagttacctaatgccaaacccaaacaaatttgattttgcttgccctttaataaaattacatcacttctttttttaccaatataaatcaaaattctacactccttaccccctatataaatgatctttaccataattaatataaaattgtagaatttatttcgtaaaagttgtatgaaggtttttcttaattaaaaaaaaaatacaaaaagagaatttttgtagttataaatatttaaagttttgaataagtaaaaataatcaataaatttatactagttacaaacttaaaatttttaatatttatgacacaaataatactattttttatttgcagaatattttacaagattaaaaaagagtaatattaactcaactataaactcccaacaataataattagactacggttatgaccaattggcccacttatgatataacaacttgactattttcttcaaatccaaattcaaaggcagcagcagccactagccagaacaacccagctcatataataaattattactataatatttactgtaattgcctttgccatgttttgaatgtagactggaccataaataatacaaaatacaatacaattctacgttcacattcaatccaaacctccctaattattatttcacgctcacgtgcctcgcacgtgccgcttcatctcttggctaccaatatagtacagtgcctattattaacccttattataacatgagtgatctag

SEQ ID NO: 225891 - DNA, 1839 bp, Cannabis indica
aaagtgaagaagtggaggagtggaggagtacgacggttgattagacttgattgatggatggatgtcacttttcacttttccatttttaataaatttaaatttcaaaaaagtaaccggtagccattttttcatacctaattacccctacatgaaccccaaccgttggatcaaattaactacccatcaaacggttacagtacatcacggattgaaatccgtgtccgtacagtaacgggacgaaatccggtccctaaaaatatatataataaatgtatttttatatctcgtctttttaacacatgctctctcacaaattttaatttattattatttttttaagaaataaaatacaaactcttattctgtttttttattttttttattttttttactattctcactctaactattttaaactaattttctttatgttgtgaatgaacgcttcggcaagataacacattaaacacaataatgatcaatgaaaccaattcaagacattgcactaatgtaacaacaaacataaactagcaacaagaacagtaaacacacacaaagaacacaagaacttaacgaggttcgaacaagataatagcgaatcaccttgcctacatccccgtccagagaacaaccacaacaagggccttagataatctttattagctgatctttaatgagagattacaacaattcagttatacaacttgagaagcttgcttcagtaattgacctcttcttatggtgatgataacacacaatgtatcacaccaatacaaacactaatgggcactcgcaactcatctctctcactcactaaacaacatcagaattcactctttctctcaatctacttcccttgaaaaacagccaccatttaccgaaccaattaagccttaaaaaatagtagtgcatgagctggtgagtgtgactcaatcaccaactgacagttggttaattcgattatgcactccaggggtagtttaggtattttgatatttggccaacacacaacttatccagcttggccatatatcaaaaaatagtagcataaaaaatgttgtaactgatctggtcttaacattctcagcaagtgagaatgcttagcaagtttagatagagtctgaacttggcttgtggaactgctggattctctttagtactaatcttcttcacttgtatttctttccatgtaatgacctctctaatgaaatgtagcttgatatctatttattttgatctttcatggtatataggattcttcattaagtgtatggccctttgattatcacaatgtactgtgatatcttttgttttgaatccaagatcctcagagaaatcctttaaccaaattgtctctttaatggctttagttgcaaccatgtattctacctctgtggtagataaaactaccaccttttgcaaatttgatttctaacttatgcatccaccaaatgctgtgaatgcatacccagtaatggaccttctagtgtctatgcttccagcatagtctgaatcaacaaaccctgtaatctcagtgtcaaactttgcattgttcttgtatagtagttctacctttgttgtccctttcagataccttaaaatccacttcattgcatcccaatgtatcttccctggattagagataaatcaactcaccatactcaatgcataagccaaatctgacctattgcagaccatgcaatacatcaagctcccaacagagaaagcataggatacataatccatgtacatcatgtctcccaatattctcttagcttcacccaaggttcttcatatcgaattctaaactcagttgatcctttagcatgtttatggcct

SEQ ID NO: 225892 - DNA, 5261 bp, Cannabis indica
ttttttaagtgctagtatagtaaggagatttggtatagtaaacatgacttaacataatgattaattgtcaatagtatatatcaatttggaattacaataaacgtgatggatgagcgcataaaatataacacacaaaattttgtttaagttattccacgataaaacgctttgataattgatcgccaccttagggttggtattgagtcaatttcattaagcttatgagaaaattctcatctttattattttaaaacctaaatatctcatatttccttttcaaaatataaagtgccaattattgaccaagctaacaattaactactatgaagcttagttgcactttgtgattgtaaggcattatttaagatttcatgacttaacttagtgtgctgccttaagggttggtgtcacactaaaatatatcacttcctctatcttagtcaagagatcaaccttgagcaacagtgtagacacatacttcctttgggggacgaaatctaagtcgtcttaaagccagtctatattccatttgtgttgaccaataatggaggtcgtaagttacattgacatatattccttctcccactcactattttaggttaatgtgtttgttttattatgttttagaattaatacatattgactactttaaaattatgattaatttatttataataaaatgcttaaaatataaataaatttctcgtcataatcactaaatctgaattaactatttattaattcataatttaaaataattataaattaataggtaaatttttaattaccaacttaattctaaattaatcttatccaatttacatgcttttggtttcaaaaatggtaaacacataaatacataggacaatcctaatatatcatatttctactatgagatgcatgatgatgtaactgtgtgaatttttatgtatgacacatgttattcactactgcatgagcatattattaatcaataattaatgaaaatttatttaaaagtaataaataaacagtaattatgaattgggtaataattgagtatttttaattttacaacctttaaaattaaaaaataaattacaaaactaatatatatatcgcaacaagggcattttttataatttcgtaagatcgacgtaagcctccaaattaattaaaataattttcattaattattcttaaattgtgtttttaatataatatacattttaaacctttttaattaattaattcttaaacaactctttattcaacacagtataattaaaattaaaattttgttttaaaataataacatttattatttattttgagttaagataacttttgtcttaatttggttttaagtttgagtttgaatttcgaacctaaaattaactatatttgtttaataataatatgaatttaaaaaaataaatattctacaaaactttattattttgacttaattattaaaaataataaaattattttataatatattaagaaataattaggatagttattattttgaatttagaattgaaataataactatgatatttatttagaattcaaatctaaataaatatcttaaaataaatttaattatttatattaaataattagtagataatttatagagtatatactaaatatacactatatattatatatacattatgtatacataatatatgtatgctatatagctgaaatatacatacacttaaatagtcgggtaagagaaggattggccaccatagaccaccatggctggcggaactgaggagccaccatggccatggaggccatgaccgacctcgagtgtggtagtgggggaatgaccttgtcaaacccagccaagacccaaacgggtcgatgacaacgacagaaccccatgaccctaatgggtcgaaccctcttggcacgacgtcaaaaataagggtccatagctcaagtcagtggtgggaccaccgtggtgaggaccaaaggtcgtgtcgaaccgtttgagtgagggacgtgagtccctatctgtccatggctaagccatgcatgtatacatcacataggatgaggaagggcagaaaacctgagaccacttgggtggtttggcatggctcgggttccaccatgaacccgagctcacatgcatgtatttttgtccttcatggtccatggctgagattcttccatgaacccaagctcacatgcatgtgatgttcgatattcatggttgggtttcatgtttagaaaccgagctcacatgcaatgaacattacatgggtataatttttacgtaaaataatttcataaaataaattacataaaatttctatgcccctaaatttacatacattatttttttaaaataataacaacaaaaactacacctaattataccatataattcattattcatcacctctcatacattcacaataaaattatcatccatttaaatacatatcacatatatataattgcataaaactcacatataatttaatgtatacacattcatggaactgctcttgatactaattgttggttttatggtactaaatcaagtatgcaacgtaagggttttgtattatctcattattaatgtacctcgtgaagactattagggtatctttcaaaacttcctgtatgttgagagagaaaattattttctttttctcacttaattttaaaaattatagtgtaaagtgatgttttgatttgtgaaatcagactttccatttatagtagttaaatccctttaattaaatcatatttaattatttaaataaataaatatctataaccgaattcagttactaatatttatgaggaaatctctcaactacttgagagaatatctcaacaaccttgaaatatttgtaaccactttttaaattaaatatttatctaattaaattaattaacctaaaaaaacaaactccatagggacaagacatgctaggtgcctactcttgtctttcaagagaaggatgctatctcttatcccaataacttaatcttaacaaatcttatcttgataaattttgtcttaaaatttttggatttttttcctattaattaatttgaaaaaaatatttattcattacaaaaataaataattactattatacctattcaaaataattttttctaaacatcattgcactactctttatccctacccttgttagtattttaaggtggcaatttagaaaccatggacctataattctaagatatagtaaactaaattatttattgagtttcatcaaccaaataatcattgtttattaattccatgattactccattaaaaatatagaattgaactcttagtaattatagaattatatttacttagttttactgcaatgtctattgatataatcaatttcattgattagccctccatgtgttggttcgtaattagttttattcaaattaccgttgtaaccttctaattacttctttatcttttactaccattaattcactagtgaaagtataattttgatcccatctaaattttgttcacaacattccagatctagaattaatacttaaagcaaactagcattcgatccgttaggaatgtcaggattccataattataaattatattcccagccatccacattattagattcgcaaaacagaagttgtaagaatcatcttctctgggaaactttaacaagtgaatcaaagaaactaatgacatgaatagaatttcatgataacttagaattcaggccaatctactattgatcattgttatgattgtaattacgtctttatgataaacgacatgttaataaagatagctttattcatctcgattattgtcatatataatctatataatatacaacaccttcgctttgatgtcatactacatctgtaatccgaacagagattacttacaccaaagaacgagcatcattgaaccgcactagtaaccattgattaaagattccataactttaatatgttccttattattttattcatagctaagtggccttagtattctgtacaactacaagccacaatgtcatatatgaataaagaattttttagatatttaatataaataatttaataataatttaacattcatacatatatcaaatattcaactatttatttaataatcaaatttataggttttttagagcataaaccctaacataatattttaaaatatatgaaatataattataagataaataaattaattaattatagaaggataattaataaataaaaaaaaaaaaattattcatatggagaaggtataatcttgtaaggatctacaagagaattaaaatatacaatatgaatgaaactatttggtagtacattaaagtaaaaaggaatctttaatatagaaatactatgtatatgtgtgattatgtggatagatatgtagcaaaggtgttgtgtacaatttgattatgcatgactagtcattaatatctttcattaacgtaccatttaccatgaaagagttattcatatctcaacgattatcattagcagatcagcctgaatcctaagtatatatgaagtcttatttgtattcattgagttctttgattcactcgttaaagtttctcaaagaagatgattcttacaatttttgttttgagagcttaataacatgagtggctgggaacatgttatacaatagtggaatccaagctttcctaatggattgaatgttagttctcttatagtgttaattctgggagtgctaacagttggatccaaatctataataagttatagattaactgttcatattgaattaatggtacataagaaatcaagagataattagaagggtaaaatgataattttgaccaactctaattatgaactaataattggagagtgaactacatatattgattatataaatggactatattgtcaaagagtgcaattctatatttatagtggagcaataataaaattaataaattaaattattctattgatgatatcaataataatcaagtctttattggatcttcgaaatataggtctatggtttcggagtcacctctatacaacactgtacaggaaaagttttatttgatgaacaaatttcgagtgagaattaatttctatgtgaaataaattcttaaggaaaaaatagtaatttgtgaaattaatattttgcttatttatgacaattatgaattgtacaattaataatatttaactatttaattttatgagataaaactgtattaattagttaaatataatat

SEQ ID NO: 225893 - DNA, 2809 bp, Cannabis indica
cacaacctccctcaaattcgtatatttccaaactatcgaagaatcagtattagtaagactatgaaaaacgcatcaaaaagcagaaccaccgcccttggtttttccaagtaagatatctttggcttcattgattttcgatgcaaggtaatggctaccacctgcatctggatggtttgcaaccatcacccttctatgtgctgtcctaaccttctcagttggagttctttccctgtcataaaaacaagttttattgttattaactaatagcctaacctacaattagggagaaaataaaccaaaactaaaaaatatcatataaaaaatgtaacaatgtgcagactggaaggaacagcggcatcagtaggaaaaacatggttctaatgctccctaagttttttttctttttcattttgtgaaactggccccctctccttttcctactatatttgaaaaacagaagactataacaaataatacgtagatacctaaatggactatacgtagatacctaaatggactaccctcaatctggtgagagcaatccacttagctacccaccattcttggctataaaactgctcaagaggtaaacttgagacagtatgaactaatgccctttttttcttttgaaactaggctctttgtctaaccttacaatatttggagactaaaacagtaatagtaaatgctatgtaggtagagtttgagctaacccaatacttattgaactcatctctttgagccacagccacaaaataaagtaaattaatgagctcaagctcaaattatcactgaaataaccaattcgaaggatcatttcactaaatgaacttctaaacttccccaatccagcgcccaccgtccacaacagatcctgacttaataattaaccaaatcaaaataccctttcgaattgctccaatccaatattgtaatgttaacaaggacaccaccttagctattcttaatattctttgatttcctaatggctggtgtattactacacaacgaaaaaatcatgcaaaaatatgttgttctcaaattagaaatcaaaataacacactagtaattttcaagaacaaggagaaaatgcaaatgcttccctactccaagtactagagaaaataaaagtagcaattttcctaagacagaattctttacaccattttaaagaagtttgagcacagctacatcagacttggacactaaactcctatctcgctatttactctatggcaaacccattcatcagttcaccatggacatcacatatataacgaaaagtcataaagaaaggcatcgtgcagatgaaaattgtacctgactccaagtattaaagccgcctctcttcggttcataacgggttgaaaaccaccttcgtaaaatctgcgtagttttgctgagggtggtcttgctttgaaggcattccaagccagaatgctgtatctaccagcatatgctgcagcagcaactgcaaatcccgccatcattgctgaagtctgaaaccaaaatttacatattagccacctatttcggggcgaaaaagtgtaaactttacacacaagaaaacgatgatgatttcgtcaaggaagaaaaacatcgagaagctcagttaaacaacgaaatccctagaatttttaagcctaaaaagaaacaaaattcttcataaaagcaaaactcagaaaccaaataacacaaaatagaaaacccaaatagctaaaacaacatttcaagacgcaaattagaatcaacaaaaacccaaagcaatcatattaatttttcctcaccattttgtgatgatttgaaatttgaaactggtgaatccgataagtaaattcgggggtttttgggtctggtaatttaaattgcgtcgtcaattatttgtaaagggttttgtgaactttctggaagcacatttcttcctgccgaaggcggcaactaaattataataattatattattattaatattaataaaacaaagaaagtatttttacaaatttgggtaatattctatggcctatgctttttattaaaagtttgactaacatgtatattgtcaattttattatttaatacagacgaaattacatgaaaaaaaacaagtttgataaatataaatttttctactttttatgacttttttatttgatttttacatgttttcccaattttttaaaattaataagggtaactaatttattattacattcatttttaaaataatctatcatgagttatatttctcatgctatataatttattttttaaccgtgctttacataaatttatatattttcctgtctaatgaaattaaaataccaagacaccacttttcttcatgtattttaaattctagagcactagaacggcatctatttattaagtaagcaaccgtcaacactgctatttccccataacatagtacttagtccacattaaaacaataaacacatagcttcgttaagtaataagtatagttttttttatcctttctgccatgtaattaacctaacggttctatgtctttgtaatacacttttcctacaataggtgttaaataggtcattgcaaaattatagtccattgtcatttcttagggttttaacttttctatctgataaattttccaataatgttttccattcttgaaacttgttaaatgcattattcttatttttaaaagataaacacaaatcttcttaaaaaaaatcatcaacaatcgatagaaagtaaacaaactcctatgagtaagaattttttctggcccccacaaatcagaatgcacataatcaaaaatatgtttagat

SEQ ID NO: 225894 - DNA, 2154 bp, Cannabis indica
aacataaaatgttatttctgatctttattaataagtaaatctggttatattgaaatgagttttatttagggcacaaaacccaacagtaataatgttggcaataatcttagaatcacttcatgtaatgaccatatcatctacataagccagtatcagtgtagtagatgaggatgtgtgaagaataaatagtgacatgtcagacttggaggaagtgaatccgagttcaataagactattgtgcaatttatcaaacagtaataaattatatatacataaatatatctaagttttctaatggaacctaaatttgatatttttctttataattccagcttcaataataacaaaacgggttaaagtgggtcaacacgattttttacgagtcgagttacggttgagaaaattaaacaggagtcagaaaacgggttggtacgcctgactcgaaatatagaaatgggtcacataaaatatgacacaaacacgatacgataacacgttttgccacccctaatttttgacatatttacagatattttattcataaatttttttttttttatttttttagaaaaatataattataaaaatgtaaaatatatataatttaaatactttgtgtgaattttctatttaacttttttctctttttttttctttctcttttgaactatactatttagagtttttctttttttttttcttgtgttgtaatactagaggaaatacaaatttatgagttttatattttttttgtacaaaaatatgattttttttttttcaaaaatgttattttatgggaaaattgaaaagaaaaaaaaaagttgaaaactataggaaaatcaagggtataacaagataaatttatagtaatcagggggtaactaattatggagtaactaggaactttatattatttttttcatatttctttaactttttctaaaattttcatatagaataatttttttgagaaaaaaccatatttttacaaacttgtacttaaaaaccataaaaatacagaaaagccccttttatttagaatgttactattattatacgtcactttgaagctgggggaaaatatgtgcacctggtttgggcaacattttgggcttgatgtccctcgtttttgttgggattgttttgttttatattgagatttttataaaaaaactggactttgtgtaaaaatttacaattttactgtcatacgaatttttttttataaaaatactgtctttttataaaataactgtaaaacaattaaaaaattgtagaataactaaaaaataatcatagaacaacagtgaaaacctaacacagtatatagtattttttttaaaaaaaatacaagtatttttaaaaaaaaaatccaccacacattaaaaaaaaaagttaagaaattaattaataaatattgtgattaattactatacttcacatatatttttaaaaattttagtttcacaccaaatattatattctttaaattttaaaatgcattcaaatatagcagttttctaaaagttggttatttttctaaccacgttagaattctaacatttgtattaatctaataagtgtagctttatttcctctacctatttctatcataaattggaaatccccagtagtacttatcataaattaagaacactatggtcatatttggctaaagttaatactttttgtttttagcttcttagaaaattcttcatcatttatattaaaagaactttcatgagttaaaagttgacattcaatggttacccaagccagcaataaaagtgtttttagagtttcagatattcaaaagcaacttttaaaagtccaaccaactaagacctaaatcttaaattgattaattgaaaaatactttttttttatgtttctattaatcaaaaataccttcatattatattttattaaaatatactcacttttgtaagagggttacctagtataccctcactctctatttaagtctaatactaagttacattaaccaaagaggtttaatggggattagggatgtaaacggggcagggcgggtgcgggaatcgctcccccaccccatactcgcttcttaaattcaccctcatacccgtcctaatacccgtttaaattaaagtgggggcggggcgggtattaccc

SEQ ID NO: 225895 - DNA, 3420 bp, Cannabis indica
ctcaatcatagatgtaagactgtgaagaatccaattcaagtgaaggagaatcgggctcagatcttggtgatactctactacagaaagggtacaagggttagagatctgagccgaaggagtcatttaattccgctgcaaccaatgtgaggtttcttaaactttatatgtgtttaaattctattgttttagaaattcatatttaggatgttaaacaacatacatggtagtaaatctagatactggtaaaaacataatccaacaactgggtcctcgttttgaccctttagaaattccgtttggtccccaaaaatagttgaatcttaatatttttaaaaatcgagaatattccgaaagagttctcaaaaaaaaaatccttgaattggcccaggttgacaatgtcaacttgggcactcagccagcccaaagtatcaacctaggccctggacctttcttctagcactgcggaagtgttgtttctttcctaaaatccaaacccattctatttagggctttcttgaataggatgttcaaggatgctctgtcatcgataatcaccctagctaccatcatattagctatttgtaccctgacaactaaaggatcattgtgagggtagctaacatgataggaggtcgattctctgaaggttattggttcatatccgttgcattaagactttgaaggatgttctgcaacctccaagacttcaactcttggctcatgtcaaagtgatcttggacatctttctaaggctttcctcaaatttctagctaggtgaggccttccaatcacgatatatggcctgcctgcaattggcgtaggctggagaggtgcattgccccagctggagcttcaggtcgtacataccgctaaagagtagcacgtttttgttttgatgagaaattctatttcatcccgtaattgattgcattctttagtgtcatgaccgcaattatcgcggtaatggcagaattttttcatgcccttcttccttgactctttgaagggaaaaggtttctaatatgacattgttcactgtgtttccgtatagatctcttctcttggggccaagaggacggagtaagtggtgaagcaaggctcgtactcttgtaagggcctagccccggtcttaggcttctctttatagggggagttacctggcttaccaccattattgggtttcttccctctgtttgatcctcctttttcccattgccttatgcctcagtagcaggggcttcagagtttggtgacttcttctttccaccattcgagcccttacctcgggtgatccctttttctagtttgataaaaccattcactctatctaagaagtaattcatggtgtataccaccttaagacaaaggtcagaccatagaggactcatctccttgagtctagctacaattgccattacccttgcatcctcgctaagacttttggtcttagtggctgcctagtccttgaggggctcgtcttcctattacttgacatccaccaaattattgggtttgatctggcattgttgagaaggagcgaatttgctgccaatcattcactagatctttccatgagtcaattaatcaaggggagagcttaaggtaccactgctaacccaagcttgcagtgtggtagggaagattctgcaccgaacttcatcactcacaccttgcaaattagtctacacttaaaagtagtgaatttgagatggatcttccttgaaagtgtattgatgccaagaaggtttcttgaactttagagggatttgaagagctttaattcgttcagagagcaatgcgcgctgctctatgtcaactttgaattcaaatagcttaggagtcatgatccctttcgataaagctgccaagatgtcaaattctgctcggttgatcccatgggtggtggtctgcgtccaagtcagagcttctactacccaagtagggttttctctagaattttccatttccattgtccttttcttggttaagagatcatgcaggtctccttgtcttccaagttgatcttgtactctggtcaacttgggtcttgttgttttcttctgaccatggggtcatgaaggcaacacaacactggtgaagtctcgaaaatgaactctggatggtctcgtgataacccgctatgggagtgtttgttcagagcattgtagtggcaacttcattcaaagtagacttcagttagatcataattctgaagagaattgaattggttgctcaagttcaactcctctccatgtactcagggaaagtactcatatttttggccatcaatgtcaagggcaaagtaatggcacaattaaccccttttgtctcaaaagtattttcaagtatgaagtgattcattggtccatacccgttggatctcatagtctctgatttttaagtagtatctcctactacctcctttagtttgagtggcaggtccctttccccttacagggtctcagggcctagtgtcatgagattgtcgagaagcacttggtggaggagtctgttggttctcttagtgtcgcaaggtcgttcaacatcaggtggaagacccattggttggtgcccacaagctttagtcctttcgggctcttgctcgaaggtactctccttctgggagttctccacgcctagtgttttcttagtgcatgctcggttacgaggtgtggtagtggcattctgagcattaagggtttcaacttgagcactagtttccacgtgaccagttgatcgatgaggagtctctctcaccaactcaaaaagacccctacagggagtagttccatgatttgagtgataaggttctctaatccattgagacatgttagctctatgatgttctttctcaacgcgttggctttcaatgttcctccagttttccacgaaccaatattgaaattgttcatcttgattatcaatagagtcttgtaggtgttgttgcaagttagccacagtctggctgagctgggtgacctgaggattggcctcgtcaaggtcatcaattccactgaggctcctcaggtgagacctggacattggtgccaatctcaggagcatttggtggccttggaacaagagctgaggagccggtttcgaggcctgctcctggcacctgtagtgcaagagtagtctcagtgccaactccatcaactagcatgcacccaattgattggccagttgttgggattcctctatcaacacttgtagaatgtgttacaaccatctgggcagtacgtttcttgagttgtagctctcgattaaagcaccaaaatattgattcacaaatctagtctagacttctaagccacatttgctcgctagattgccaagaataaaaaagtacttaagtaattataagtgttatccaattttttgcactatgacgtggcagcacatgctagtgacacgtggacc

SEQ ID NO: 225896 - DNA, 3610 bp, Cannabis indica
taaatatttttaatttttttggtaaaagtttataaattttataatataaaaataattatatgtgagaaaataaataaataaatatatatatatattacgaggataaacatgaaaagcatgtgcgaataaaaaaaagtataaatttataggggcaaaaatataaaaaaaaataatttttggggggcaaaattaaaattattaaaaaatttctatacaaaattgcaatttagtaaaacttgagtgaggtcatatgtctccactggacacaatttagaatatgaacaatcattgcgtttgtaaaattaaatagaatcggagaaaagtctttaaattcaacaatgtcaatagttcgagagaagttttttgacttaaaacgttctgaaaatataatttgatatatgtaaaaattcagggaacaaaaaatactaattaaccattattaaaaaatgttcatggtgcaccctctttcggttaggctcataaaataaaaatataattttaacttatttttaccatagctttattatagttatttaggagtatttgtaaatttcagaaaatttagagcaacatagagtgtcaaactcagagtttaaacaatttattgcacatataaattttttttttgaatattggcggtaaaactacaagaactatacatgttgtaacacttaaccctacaaactaattttttgatggtaaaaccctctcattaccgaaatttttagaaactaaatattttaaatagataagcttaagaaagatataaatttaaggagaaggaaaccatatttttatgtgttttgagtgttaatcaactctagtctatgagtcaatgttattaagctaaaaattctccaaagtatttcttacaagtgtatatgtcctagttgaagaatcctaatgcttagttcttcttcccaaaaatcaatatctcactccctttgcctgaaaaagtaatgttctatttataggaaagaactgggtatgggcatacccggaccaggtaggattttagggtatcaaatagaccatctgatggagtaaaatacaatatgtttattgactttgggccagttgaatgaggctcaattcatgaggtgaagattttctgtacaagcagggaccattcaaaggtgttcgatgtcatgcgatgtcgtttttgtactaagaatgttagagaatacgacgttggacaaaaatgtgacaaaatctgatgtagatgacaaaatctaacacggtaaggccctgcgtgtgaaggattttgagttattttgaggtctggtctaacgccctattacttaagcatgctacaacgattatcttttattgtgcacgccattactaatcaaagagtttttcaaaaaccgtgtcaaatttaaacttttaactaaattttaaacttttataaatacataatcgtgcataaaaagctgggatcccatcttgaatgtgtacaatcatattcaaaatatgttttataaacatgtcactccgggactacaaaataaaagcccaagccgtcccaagatcaaactcttttaggtctaaccatcatgatatggacaaccatcctcaagctctggacttgctggtgctcaggctctgcctttccttaacatacacatgcaaacatatctgtgagtcaatagactcagtaagaaaagcacaaaacatataacataataccatcttgtatctagatgtccatacacctatttataattaaggctttagatgcatcaagaacgttcttaacaaaagtacgacccatgtaccacatgcactaagtactcgtctcgtactactgttggtagggctgaactgcaccttgagtaccactaagtgttgtatcacatgcattacatacttgtcccatactagtcttggtaatactgtatcgtacactttgaacattatatactgtactaatacactatgtaccgcaagcgcactagtgttattagtatccaaatcacataatacaacatgcatataatacacatacacatatacatatacatattttatgttagtcttacctcgtttcctgattcaagtgtgttggtcaacttgaatagaaattcacgcgttgaacggaggcccatatcacaatcacataaaacgggtaaataactactaaaaccttttacgggaacctaacacaaatctagaagttttcctatggcaatgacctaaatatcaaggaaacacaaaaaaacaagactttagaaaaactatcaggaaaaagggcagtttattttgtaaaaatggctaaatatttttttgggtaattttgccagttaaaatggtagactgtttctaagaaaatagtctgtcgttttctactccagaaaatcaccaagtctcaatttgagctcaaactaaccccaaacttgaaaccaagctcaggaaaacctatttaagcaacaataagcagaatccaagcaacaatagctagcaaaacacagagaatcaaaaaatgccattgttgagccaaacttgctcaaccactcacttagccaccaaaactagatcaactaaacaccaaaaaacctaaatttaacccagaaaaccactcttaaaagcttagggttcggaaagaacctataaccaaaatttacatgcttgaacttaaccaaaactctcaaaaagctttaaagaaaggagctagagtcattctttgggtatcaaatcttgaatgattgatgaattctacagaaattgatgaaggaaaggtttggattcctctggttttttttcataaaaataaaagagaggaagagagaggtgatgaagaggttttcttttattttttcttaaattggattattacttaaaaaaatcagattattactccaacataaaatcacaaaaggacaaagaatctaagggaaatgactatttttccccttaataacataatccaatagtttaatgatacccaagggtagtttgatcatttctaaatcgtgataatttctcgacacttttaaagtctaactatgttgctccgctactactaaaattctaaactatatgaaaacgtgtctctaatggtccaacgtcgcgttacactgctactgaacataaatacgaaaaataagaaattcacatatacatcataaatagcataatttgaatataaatctccgtaaatgcataaattatggttattactctactttcataattaaaccctaaaatttagataattttttatattaaaattgagcggtctttacacaaatatttccacaattaatctttagctaggagaaagaagaacactatcactgaacttaaaactaaagcgggacgaagaatttctactgaggtgaaaattgtggaagaaattgagcattatttcaaagaaaatttccaaactactaacctgactcatgactagatacaacatggggttgagaatgtggaagcccgtatgattgaagctgataatatgatgttaattatgtggaagcccgtatgattgaagctgataatatgatgttaattttctcatttaccaaagatgatattctatacgtggttaaggccattgggacaaccaatgatccaagttcgaatggttttcatgtaattttcttcc

SEQ ID NO: 225897 - DNA, 1898 bp, Cannabis indica
gtaaaaatgtaaatattttacaaaaaatggtgtcttatgtaattattccttcatgttttataaaaaaataaaacatttcgtgtcgtaccatgcaataattttatagggtaagtttggcattactccacaagcttggtagttttgtgtcatgtttgaatttgtgtcatgttttatttggctctaactgcttttttttaatagagcaatttgttttttatatggcctaaattcgtgctttatattttttcatttttattataattgatgagttaagtactagaatatatatttctattttatacttttaattaaggctatatatgatttatgcccctcgaattatgacttatgcattattgtgctccttaaacttttcaaccagttaataatgatccataaactattcaaagtgttataaattagtcattctatcaagttttatcacacgtgacaaactaaacgatgacatagttccatgtcaacgccacatgtataaaaaataattttttttttcaatttagttttacgtaattttcttaatcattaattgattcttagtttaatgatttttgaaaaatacatattttttttaaatttcaattatacacatgtcaccactactacatttatgggctttaaaggttatttttttccacattttttaaaaaagagaagctaaaaggtgtgttcatacccgcataattgaaaaattgacatttaaaggcagttcttttagtgaaaaccgtatgtatatatattgttaataccctttaaaggcggttttagaatcatgtgtttagggtgtaagttgagccatttatggcatcggttatttgaaaataaccgatgccatatcagtgcatgacacatggctattttatcatatggcatttgttatgtttaaataaccaacgaaataggattatataaattaaccttattcagcattctccttcactttgtcttcttcttcctcaacacgaagcaagcacaacaaccaacagccaccgtagaaataaacgccaagcaccatctaaaatccacatatccctctatttttgcaccatttgagcaattttttttaaagaaaaaaatcaatttttgatacctaaacacatataaccaaaaagttgctatttttctcatttttcactataaatcaaacttatagaaataaactagtggttgtaactccgaccattaattttagtggagaaaataatgaatctcaacgtccattaaggtatcaatatgatttttacttattttagtagtgtacattactttattttttatttttataaatttaattgttttatattattaatattgttgttgtgtatgtgcatggtggtcaaaatttttacgagattgatcgtcgtattgcgcttataaggtaaaattttaaaacttaatatatagtttatatgtatgtattttgtgtattcttaaatatgtgtgtatatatattttgtattgtatgtatacatattgtgtatattatttatgtaaatattgtaattgtactgtatattctaagtaatatatatatgtatatatagatgcattgtgaatgagaatgagataggtaagatttaattagtttagaaataaagttttataattttgttagtgtgagatataatttatttgttggaatatattttatcagattctagatttactaataagtatgttgattaacacactaatatgaattctctaaataatggagttaaagacataaagtttgagaaatcttacattagtggcaccagaataatatgtctccttttactcaaatctctaaccctgttcctttctgtcatagagttttaccaagatctgagcccgattctccttcaaatgtagaattcttcacagtcttacacactatg

SEQ ID NO: 225898 - DNA, 2674 bp, Cannabis indica
ccccctcaagatggatcatatatattgtgtatggccatcttggacaaatgggagttaagaagagtagaaggcagtggcttggtgaaggcatccgcgagttgaagcgtgctgctaacagggatcaaacggactgttgaattggcaatcttttctctaatgaaatggcaatcgagctcgatatgtttggtacgctcgtggaatgtagggttgttggcgatgtgaatggcggattggttgtcgcaatagatgaaagcgggtgatggttgtgcgatgtgtaagtctttgaggagatattggatccaagtgagttcacttgtggtggcggctaaggcacggtattctgcttcagcagaacttttggagacagttgcttgcttcttggttttccaggaaatgagacaatcgccaatgaagatgcagaagcccgtggttgagcggcgagtggtaggacaagtagcccaatcagagtcggagaagccacgaagatgtagagatgagttggtggagtaaaaaatgccttggcctggtgaaccttttaaatatcgaagcagatggtgtacagccatcaagtgtgtggtgcgggggctggacatgtattggctaagagaattgacggcaaatgtgatgtcgggccgtgatagagttaagtaaagaaggcgaccaatcagttgtctatactgagaaggattgtcaagaaggtcaccatcttgatcattgaggcgttctcttgggtccataggagcctttgcgggtttactgctggtgtaacccgtgtcatgaagtagctgtaaagtatactttcgctgagataagaaaagaccagtagttgctctagcaatttcgaaaccgaggaagtactttagaggacctaaggttttgagtttgaatcttgcttgaagagagtcttgtagagcatgtaaaatggaaaggttgggaccagcgaggatgatatcatcgacatagacaagaaggaccacaaaagtatctcgggttcctcttgtaaaaagagtgtaatcagcttgagattgggtgaacccttccttcaaaagagcttcagtgagctttttataccattgtcgggaagattgtcgaaggccataaatggatttatgaagcttgcaaaccaagttgtttccagtaacagatgagggaatggtgagaccttggggaatttgcatataaacttcttcgtctaaatctccatttagaaacgcattgttgatgtcgagttgtaaggtgtgccattgtttaattgtgacaatggctaggagaagtttgaaagtgaccattttggcaacgggggaaaatgtgtcaaaaaaatccaatcctctcttgttgggtgtagccttgtgcaactaaacgagctttgagtctctcaacgctaccatcactgttgtacttgattttatatacccaacgacacccgattgcacgtttgttgggtgggagaggaaccacggtccaggtgttatttgtgatgagagccaatagttcatcatccattgcttgaagccatctcttgaattgaacagcctgtttgtaattttgaggttcaaattctgcagtaacagcaagaataaaagctttgtaagtgtgagaaagtttagaataggaaagaaactttgatataggatagtttgtagaagttttgtcctgtatcaagttgtagcactcgaaatctttaaggtaactaggaggccgagaaacacgagtagattttcttggcaaagcagcaggttctggggtagagtcgacagtagcagctggtgtgggcataacaacgggtgctggtgtgggcacaaattctggtgctggaaggggctgctgctgtgtactggcagaaaattctgcagtatttggtgcttgttgtgcatcagaattttcctgcaagatcgggttagaagatacagtggtcgtttcttgcataggaaaatcatcaatatgtgtgtgagtgacttgtgtgctaggaacaacaagaggtaagaaaggatcaatattatggttagtagaatttagtttgtgaaaaggatagacatgttcatgaaaaatcacgttgcgtgaaataaaaatttgcctagaatttaaatcatacaatttgtaacctttgacgcctctaggatagcctaggaaaacacaagtccttgcccgtggttcaaatttagtccggtgagatgtaatggttgaagcaaaagcaagacatccgaaactcctcaagttgtcatattcaggtgacttaccaaataaaatctcatatggtgacttatttttgaggttcggagtaggggtgcgattgattaaaaagactgcagtgaggagacattcggtccagtatttgatgggcactcttgattgaaaaaaaagagctcttgcaacattaaggaggtgttgatgctttctttcagccaccgcgttttgttcgggtgtttcaatgcaagtaaaatcatgtaaaataccatgtttggcaaacaattctttaaaggttaattctggggcattgtcagatctaaaccttttgaagatgcaaccatattgagtttgtatatatgaaatgaattcaggtattatagcaagaacatcagatttttgcttgaggaggtaaacccaagtaaatcgtgagtgatcatcaactaaagtaagaaaaaatctatggttagaatgagaagtaatatgataa

SEQ ID NO: 225899 - DNA, 3542 bp, Cannabis indica
ataatcatttaatttaacaaattgtgaccaaaattaatcgaaacatatatttatgaaactgaaaaaactacaagcaaagcaggtatataggacagttatatcttacgtagtttggcctatgaaatcatcagtggaaaatgtgtccttgtctaggattttgaaggtgatcttgaagttatctccagaacctggataatctgctctgaagctgaatttttcattccatgatgggctgctaccttgtcctgcatccccacattttagagtttttaattaattaattaaaaactgtattaattcattacaaaaccaatataaacatacatgtattaattgacttggtcatagatgacatgaaaaactaacctcgggctacggtgctctttcgttcttggcctttgtattgaatcagcacataaggatccatgtcacctatcaaacataacaaagacacacatataacaccgataaaataataccttaaaagtaaaatgaaatgataattaagatgtgatcttcatgatgagatatatatatatgatagagatctatatatttataccaataaaatcggtgtctccaagaccctttgcgttcactagcatgacctccataattccagtagccatatcaagtcttgtcctctgagaatttaacgttttgaaaatgagattttgatgtttagtgttaaggtgaatagatgaaactatattctatgacaatatatatgaaagtatttataggattaagaaataagattctgaaatgaagtgcatagaactaatacaatacaatcaagtcccagtcaagtaagatatgcagcagccgccatggatttaaatatttaatgatgtaattgatctaggattaagattgtacaagtcaagtcctataccctattctattcctttgaccatttccaaacagcctaattgacttattataaagacaagtgacaattgagatgacattacataaattaaaggagacatgtttacaggtcaaaggtaggggtaatgtaaaatccgacggcttccaaataattataattttccagttttttttccatatattagaaagaatattcacttgattttctgattcacaatagccatcatttattttatttttattttttacaaaagccatcatagatttacttacttaaaagtagtgttttataagtttaaataaagcaaatccccactcatatgtatgtagcaatattagaaaaaactgctacttttagtgacaactgcaagtctcgattgcaaggccacaagtttaatatcacctgttacttttgtttttgctgccgccttcatcatgtgctggataaagttcttcaagctctctcccgcctgttgcttgacattagtgatggagcccattttcatgtcatgatcacgggcagtaataaattatttccttaaggtagactgcaactccttccaggaaaggattgatcgaggagccaatctcttccattaatctttagcatattcggtaagagtcagtgagaagtacagacattcagcatcctcgctaactcttgccatcatcttgttgtatttggctagatgagtcttaggattagtgcacccatcatatagctcaatttggggcatcttaaagttctctgggagtggagcttccgtgatccttctgacgcatggctccgggtcctcatcctttgagtccgtgagggccccactatatttccagaccagtttcatcagcacagtaatttgttcttccaacattttggtatcactgtccagtagatctcgtccacggaatttatcgtttaattggttcctaaggtcattaccacatggccttaccttctcgcctttttccttttcgtacttggcatctagatgccttctaagatccaccatggaccaactgtcgtcgcagtaatgtccccttgtcccaccatcctggtttactgaatcatttgggcaatttttccttcccttgggctttggtactttcgtaccagtccctttggcgctacaggacctttctgggcagaaggacgtccgagcccaaaggcatcagttgccttctgcacctaagaaggcctattggtcggatttgtgtttttctaaggaggtataggagcattagagttcttagggtcacctacctttgcctcccccatgtcttgtacaggagcagaggttctagcattgtaagggtttttcctggtgtttcttctgacacattcccccaagggtttatcgtcaagatcttcctcatctagatctccaaacttggcttaaatggaagccctcattctctccattctttgagaaaacttttcttgatggactagcttttacttggtttctagcaactcgttagacactcgaactatttcagggtcttgctcataatgatagccatctttgtagtacccatctttgacatactctccattgtcctcctcttcctcatcattctcaacatctccttcattatcgatgtggtcatgctagttgtgtagatcatcctcttgatttttaatgttggatgtatccccccttatcgcatcgctcgactggacatgctctggcgagaaggggtttacttcctccataacagtctcgaggatgcctagaagagtcttctaaggaaccgtctttcgtgtgaaaactatggtagcaataacactacaggttttttttatcttttttcacctctcaatgaaagcaccaaaatacttaccgagatttttggaaactaaatatttgagaactaaagaaataacaaaatgcgaaaatgaagagatggagattatttacgtggtttggctgttaaccttagtccatgagtcagtctattagtctcaaatggcgtatttgatgtgtttataatatttttgcaggaaatcctaactttgtactcttagtttctcttgaagaagaagaagacaaaaagtaatattggcagaattttagctatgtaggtcgtgatcctcccttcgtatgaaaatagaaaggtatttatagactaggtggcgagtatggacatgcccatgacccgcctagggtttctgctaaaagcccactaatggggtaaattacatgcaatatgagagctgactattgggtcctttgaaaacaattgtgcctatgcatgttacagctggacaattagggaccatttgtactatgtggatacgtgtcgctcaaaggtttatccttcaaaagtagagtccacgtgtcgcccaaagcttttacctttaatagaaggggtctataatatttgtctggaaaaaaggtggtggaagtgtacacactaccagtctggacacaggagacaaaatctgatcctgtgtcagaaaaagcataactgtcacttagtgacctggcttctaccaaaggtagacatctacgacactcctaggaggttgacatccgcacttttgagtacctgtccaggtatcatctaggttggcttccatatttggacctctccgtgtctgagagagataataggtcttctgcgtttgggaagctaggatagagcaaatt

SEQ ID NO: 225900 - DNA, 1793 bp, Cannabis indica
atatctctctttcattttgtccaaaattttctgatagtgccactactgtaaagcttcagacaagcgataaattttgcataaaaccagaaatacttcctgcaaaatcagcagaccagttatgctgaataatggtggcagcttcctcatctttcagccacattttttcgaatctgaaccgtgttttcctttgaggagtggtctggtttgaaccaataacaaggacattaacagctatggctctgtgatccgaggaatagtagttccaaatgagaagtaactataggttgaaaatgagaagtccatgaattattggtaaaacaccaatctaagcgctccttaatagtatccacattatgtcttcccttaatccaagtgaaaggatccccattaaattgttgctcattcaattaacatgagtccaaaaccgatctgaattcatccatttgattagcacttcttaaattccccccttgcttgttatgactataaaggatttcgttaaaatcccctatgaccatccaaggaagtaaaggagcaatgtctttcaatcttttaagaagagtccaagtgtgtcttcagttagtaagggtaggggcaccataaaaggctgtaaagtgccagcaaggaccattgtggaaagccatgtaacaatcaaaaacattaacattgaaattgtttaaggatacatcaacatcatctttccataataacatcaaaccaccactaagaccaactctagggacttctagaccattattaaaatttaaaagactacgaagacgagcaatagagttacaagctaatttagtttccataataaaaagtacagtgggggtttgctctttaacaagcaaacgaagcttacgaatagctttctggttccccaaaccacgagcattccaactaacgattttcgtggctgcctgcgggactgcataacagtcaccgctgaaaagtcttcatcaccaaccgaatccatgaaatcagtggaaacttgaaggtgctcattctcatcaactgacaaggttgattcaagatcattaacaatattccctctgcatcttttgagtgtttgtcggagagaaaggctgtcattctgacgtttagtttgaacattcggacaagagttttccttcccagaaaaattaatgactgtagtggcaggatgtgtaatggaagtagacaatagtggtgtgagtgcagaagtgaccattatttgcgttgttgggaaaagttagtagagttggcagtgtagggggtatggtggcaaaggcattgcaggttggaggaatggtagtaaaaggcatataaatggatgatagatctgtgaagttggagggggggccgtgagatacaatggatctggtgtcaatgcttgcagaggaagtgggacaaggtatggtagaagtatttaaaagggatggctgaaaacaaatagttggtggtttcacaattggagtctggacagtaaggttaggaacatgagaattcagattatcatgttcattagcatgagaagactctcctgtatgtaattgccttggttgtggatgaccacgcaggtgaagttgagggacagttgcagtgagactcttcttagcaagtcgtgtcagcaaaggccaagtatctcccttggcgaaatccgttcgataacgatcatatgaagaagtaggcagggccgaacctttaataaagggctggtattccaaggcaggttcttcaccattatctagtttctcaagaaaaatggaacacttgttatatggatgaccaattatcccacattccataca

SEQ ID NO: 225901 - DNA, 3869 bp, Cannabis indica
atttatgccacaaattactctttttatatattatatataagtgtatcttatgatgtaacaacactctaaaatatataatttattatctatataaacttcattttttttatataagaactttgttaatcatcaaccaactacaaaacaaagccaagaaaaaggtcagaacaattctttacaaattacaaagagccaaaaattcctcccaccatctctcattttccttggtaataaactacaaactatatactaaatttctctttttaatcacatctccagtattatttacattgtaagagtaatctttgaatatacaaatatttttattgctccatatataattattgaccttgcttctagccaacgacaataagttaaaataaaacgatcaaataagataaataataaaaagcaaaaacagtaagtaaagagaacaccataatttctaaaggtgagaatagtataatagcatactccctttttagttgtattgacttgagagacaaagaacaaagtgtcctctttctaaagctcttacaatggatctcttagtaattctctcttacatcgttctttctctcttgagtgttcttctgaattaaattttatctccctagatagtgagatcaaaccactatttataggggcttataagaatggtttcccttaatctataataaataaaataagaaactgagttaattccataattacaatacaaagaatgaaaaacttaggcttattacctttattctttgaactaatcccacgaatgtaagaattaccttcgtgtcttggaagcaaggatgtccatctctaaaaccgccaactcacatatcctttgtggcgcatgcaaattgatcacacgatcaaactttggtcggatgtctccttatggctctacttggacatcttgctatgtacggttgatatggttccttcaaccaatctttgggggctgctaggagtgtaaccttccccccatgtaggaaaatatgagacatgtgtcatccagctaactgacacgtaatagtgtaaaaaaaataggataacatttattgcctaagtctgtgcgggaccttcttggtcgcacgtggacttcattcggtcagagatcttgtccagatgggtgacgcatgtcttgacagttgaaattgatctgatgtgactttgattgagagttttttcgatgtctgagtattaaatacctcttgaaagcttacctcaaatcacgcatcgatggctgaatgacactgcatgtgtgatggttgtacttcttgtaatgagtactaatgttcacttttggggggaaatctaaatattcgaattttaaatgatttatcttctttttttggaggcctataaaaagggattaaagcttttgagcatccttttagccatttttactctcaaagaaccagaggaaaaattcctgtccaaattttctcccaaattttcaaaggaactagcccataattccattgatgctagcctccgagcaaattgagagagcttcaaacaatgagtaagtcgtttatcctttgcttttaaatgattgctaatgaatatatgcgttgttttttggattctttccatgaactttaactattcttgaattattcttgactaattgtagaatagatagttctaggtttcgaacattaaccaacgtttaactataacatttaactatgtgactgcatatcaattttgacctaaaatcgttcattccctactcgttcatgagattctataaattaccaagtaccgttcaaagttttgagcttctgggattaagaatttcaactttgagtgaaaccctttcttttcatccttaatctggtttggtcggcatatagaatttgtttttcatcctttcttgtcgcctatcttttgcaaatgaaccctggtaatttctaaggaggcaagcaccacattgacaaagacttgttctaacttctatacgaagaccacctttgactctgtgcaagttcatctttgtctagtgacgatctctcaaattctaggtttgaagactaagaagtgagtagtgagcacacaccatccctggagcttgaggtgcagcatcactggtatcctaaccaagtgcatggcaaaggatacaggcgttttatctatcaattgaagaaagattagatgcgctacctgcctagtaactggacatacaaagtccaatcttgtgtcgttgacactctgcccgaaggtcgtccaatctcaactgctgagggaacccctgtcactgagtttgctgtaattattgctcggcatacaactaaatgaaagccacttgctagacataaagcaatggcacggacaaaacaaacaatgaggaaaactccaaagaacaacccttattttcgccactctgttcactatagctagaatggcacaagcctgaccgtagtcgaggaagaaaatgctactgagggggacgttgaggtcctggaagttgaggacaaggggaaggttcgtcctgctactccatccgaggccgaagaagcagagcatgaagagggctcaagaaatactcaaacttcccttggacactcataatatttctcttttggttactgaggctaattttatcaagtataagctctatccgaaagacaatggacaaggtgttaactcaaacttttaggtctccttattttgatgattaacaaatattttattatcatttgttactaatggtttgttgattttgtagcacaattaaaaggaaaaaaaattctaaggcaaaatggtaattttaccaaaattctcaaaagtgacccgaagtagattcaacaagtatattaactacttcatacttgataagagtaaaagattcaacaagggatcaagaatttaagaccctattcaaaagaggacttcaaaaagctaaaagtcaaaagtcaacccaaaagtcaaagtcaactctcagggaaaaagtcaactttggatcaaaacatgcaaataaagctaggaagttcatctacatcaagactacacacaattaaatggtatgcgttactttagtgttgttaaagtgatttgcatagcacactagggtttataagttcaaattttggcccactcactaacttgtgcgaaaagttttctcacccaatggttcaaaaattttttgattgactttctaaatcacatttcatttaactaagagaacaaagttggaagttctgaaaatggataatcgagtaaagagttatgtgcattttagagccaaaaaatgcaagatttccccctgccttgttttcagcctttcactttccaaacgacaagccatttttcccaaaaacggtagtccatttagaaaatgacaggttgtttttcctaggattatttttgaaaatcgtgctaacggctatatttcaccccaacacaataaaaactcaatttttactcataaatatatgttggttgagcatttatatcatatacctaacatattcaagtgagattaatgagctcccaagtttaaaatctaacaaacacttttcacacaatttgagccaaaatttgtatttaattctctcaagtgtgcttaccaatcactctagatttctattgtatcatcatactaatagagtgaatttacttataatttcaaacacattcccatattgtgattgaggtgaggtatgcaccggtattgtaaacaacccagttaaagtgagattgtcactacaacaatccgagaaagaggttaatagtccttggcagtgcaaaactattgaaagagatttagaaacaccttggtgaaaatttcccgattgtaagggttagtcaagcccgttaacttggctcaatataactttaagttaggtccataggtttgaagacca

SEQ ID NO: 225902 - DNA, 2412 bp, Cannabis indica
tatgaaacgattattatcgttcgactcatggcttagtaagtgtaaattgataattgattaatacagtaattgttgattgtttgaattgcatgcttattttaaatgtgtaagctattagagaagcatgagaagtttgatataaagttgttaattatgtttatgcatgcgcggtaatgcttattagcattaattctagttgaaaaggattttaatcttgagaaaagaatggtcgcgagtgtactggaaggtgtacctaggtgatctagtaagaataactataagcttatcaggctcggagctagtactgtgggtatgaatcttccactaccataagactaggagcaaatgaatgccatgaagtaagagattgcctgagtggcaagatattagaatttacacagttgatcccgagcagcgtggtgatgcagaattacactaagttggaccgattggtagagttttgttttgaagaagtggctactaaggccgttagagaggctaaatccaatcaagggtggaaagagtatatcactcggaatgtagatataggggttaaatgattagaagttgtctagtttttatgctcaggtggttgagctaaccattactgttgagggtgcagggattaggttacactagaaatagtatgaggagatattcattgaaacaaacgtttggtgttggtttcgataagggtgttgaccctagtgaccataaaagaaagtctaagaattcattagttactggattgaacaagagatttcaaagaaatcaagaattcaacgtggaggaaacggaaattggtcgacttatctagaatgctgaggtgcaaaagacaccattagcgcaattgatcagttaaagcctactttttgtgtgggtgataagttatttgaaaagaagctgcttacggttgtagtagtgggaatggaaggatgtatttaagtagttatggtaccttttagtctactggagaactggttattttccagtatgtggtttaaacccttcccatattgtgagggtaaggaaatggttgtttgtttcagttgtgctgaatttagagaaatctaatattatactagggttgaactaatttgaaaggtataatgcagccatcgattaaaaagaaagatggtaattctagaatcagaaaatgaggcttcattgttcttgggcaagttgaagggttctaaaatgcatcaatctcgacatttagggaagaaagtacactatgggatggatgtatcaatctttggcagtatggtgagtgatacaagaggaatatcagtggaaccggagctcgatcttgtggtccaagagtttctatattttttctagaggagctaccaggattactaccgaagaggaaaattgatttttatactggaagtataaacttacacttaaaattttgtattgaatggtaaccaaagatttcaagaattgaaagttcagttataggggatgcggggcttaacattgctagaccaagtacctcattttagagtacgccgattttgatttgtgaagaaaaaggatgaaattttatgagggtcaattgaccactaggggtttaataaaataacggtgaagaataagtatcctttattaaggatagatgctatattgatcgattatgggaaagggtctccttctctaagatcgatctttgatctagttattaccagttgaagactcgacagaaggatatccccaaaatagcttctcatacccaatgattttatagttgtcttcattaatggtatttcggtcatgatattgaattgacagtaattgttttgtactgaaagttgggcacattgtttgtatggtgaaaatatgaagtctatacagaacacaaaagcctcaaatactatttcttttaggagaatttagataggaggaagtggcagttagagttgatttaaattctaacggtgtgattttctaccactttgggaagtaaattagtagtgaatactttaaaccaaagagatcttaccaaaggttactggaaatgtaatcagaacaaggattgagatcataattggagaacttgttaatattaaattgtagttcaatttattggaaaggaataaaatcgcccagcagagtgactccgaactttagaagtacaaggataggtttggaaccggatagacaaaggacttttgattttgtttgaaggaaattttatgatataaaccagattagtgtatcagtcagataaggatgtagaatggaaggttctaaataagttacattgtacatcatattctttatactcgggagtaacaaagatgtatactatcagttattagagtattgttaatgtggtactgatgcagtttaaagattcaagtttgtatattatttatataatggatggaagagctatgctgattcaaa

SEQ ID NO: 225903 - DNA, 1366 bp, Cannabis indica
cgaacccggacccggacccggtccccggacttcggacccgtactcggatccagacccagacgttcggacccggactacaaacccaaacccagacttgggacccgaactcggatctggactcggaatccaacccggtcccgaactcagacccggatcccgactcggatcccgaaacaagatctagatccgaacccaaataatactatacaatacaatacaacacattaatacaagtcaatactaactatagtattgtattaaataatactaatataatacaatacaatataattcaatacaatacgacgtaccaaacgagttcaaaaatatttaaattaaagataatttgcaatatatattgacattgggtggctggtcaatggaaaatcggtcaaaaaagagaataaaatattactttagaacttagaagacagaatgactcaggctataaataaaatattatataaaaatgaggaagatgagaggtgtctgttgtcagttaatttgagcattaaaatataataaacagaaaatgagaataataataataaaatagcaccgaagacggcaaatttaatatttaattaagagagagagagtcacacagaggggcaatgctccaaacgtgtcgaacgcgaggaacgagggaatgcaccttcagctccacgtcagcatgaacacgtgtcgcagagacagttaagggaacctgagatattgtgcaagcgtcaactgatgttgaaatgtggtcttacacgtgtcgaaatctccatcgttacgtagacgctttcattgcacaactggaggcaactggaatgaagtgaacggtgaacggtgcgaaccacctctctaactgtactcactgtacctttcatttgcctttctctcacgctccaaactccaaacccacacccaagggcaaactaatcatttatcattgactattatttatttatttctaattttaggcgcaacaataaagttatgttgtttctcctctgcatctttagagcaatagagcactcactgtcgttatcaatctatcatcactgaaatttgtgcgaaattataatcaatgcacaagatttaaaatttcattgaaatttctattaagtttggtaaagaaaaatatatatatttaacttattatttataattatgctctataaaataagtaaaagaaaaataattatttaatattttattaaatatacaaaaatattattattttttattgtttaattaataatgatatggtaaataaataatataaaatttagtaaatattaataaatcataataaatagtagaattatagtaaataaaaaaaaataatttattatgagttaaatttagaaatttttacatg

SEQ ID NO: 225904 - DNA, 2604 bp, Cannabis indica
gacataaaaatgcattcaggaatcgaaaataacagcataaataattatttaaatatctataaataattttccataattagatcataattaactgctaatttccaaattaaactaagcggtctttacaaacaatgtgatagtgcaagagattatccacaccttcaacaggaaacgtggaaaggagggcttgtttcccatcaatattgaccttacaaaagcctatgacaaacttagctggcaatttgtggaccatgtgttgagatgttttggggtcccggagaaattctgtaattgggtgtcccaatgtataacaacgacctctctcaatgtctgtctgaatgggggtcaggtgggtagaattttcccctcgtgcgggatccgtcaaggtgaccctttatccccttatttgttcatttgggcagcggaaatcctctctagacttatccatgatgatttgcgtattggtagtatcaaaggtatcaatctgagtcgaggtggccctactatttctcacatcttttttgcggatgaccttatccttgttggtagggctaatgttggggaagccagaggtatgtggaattgtctagagaagttctgtgagtggtcggggcaatgtgtcaataaaatgaaaacaactatcttcttcaacaagaataagatggaccacataaaagaggagatcaaagtggccctcggcattggtggcccggtgggtgtccccaaatacttaggcctccccctgttccgttctagaggcaaggatgcagattttaatttcattgtggaaaacctggcgtccaagctccactggtggaaatcgaaaaccttatccaaggcgggaagggccactcttattaaatttgtgggcttgtcaatgcttgtttatgccatgcaatctaccaagatttctaaccatttgagctctagaattgatggtatggtgcgcgatttttggtggggttttaaaaaagataatcatggaattcatttgagggtgtgggacaagttgtgcctccctaaatctcggcgtggccttgggtttaggaaatcgaaggaaatgaaccaagcctttctagcaaaatggggttggaagctgcttacagggtgccaatcattatgttgtagaattcttgaagctaaatacctaaggggacagaatattctcaggtgcaaggccaaaacttcagactcctggttctggaagagtgtggtgaaacctaatgatatccttaggagaggggcctgtaaagttatcactgagggacatgaaaattttggaagacccctggattgcacatggcgacacattctacccacaattggctaataatcacttgtgtccttatcacttttgtgttggaacttttgacggattcaggtcgctgggacacaattaaactggagaacttgtttactcctgagactgtggtttccatcctgaaggggggtaacccgccagggcaagggaaagaccgctggatttggacgaaggaaggatctgggcatttcttgagcaaattggcatacttaatccaggctcttcaaaggtctcgtcactgtgaggttgtccctttcctttggaataaactatggaacagtaggatcttggaacgccacaaagtgatgtggtggagcatcctctctaatgccctcctggtaagggcagttttacttaaacggtttcatatagcggacagtatgtgcccaatttgtggagttgaagaagaatccatcgagcacctgctccttcactgcgacctagcttaccacttatggcgatcttctccttgggggatttttcatgttactggaagtggtatccgtatgtaggactgggtgaaatttttgtggaatataaacagcaggaatatcaacactgatgaggtcttttatgcctctattgtaatcgacacaatttagcaggtccggaatgacaaggtacataataacagaatggataatgtgaatcaatgtattgattttatttctcactcttatgcagattacagagattccattattcccatctccccccgactcccccgctggctggaaccctcccccaagactggatcaaattaaattgtgatgctaaggttggaagggagcacatgtgcgtagtagtggttgctagagattacttgagaaggctgatttgggtgtttacggccaagatggacttctccgatgccctgtgtggtgaagctgttgcagtttgtttggcgctataagtcgcaaaggagaaaggtcactagttttggtggaaagcaattcaaagatagtgatcaacaccctcaacagtttggatccccgatgggaaattgaaaactactctttattttgtaaaagtattgctccttccttcatttcttgcttattttgttttacgactagatcgtgtaactttatggcccataacgtggcccattgggcttatacccataactactatggttgtattgatgtcgcttctattcctaagaacatttgttgtaacgactgtgagatctaatgtcttatgaatgaacgtttcttttcaaaaaaaaaaaaaatgtgcatcaattatttttcctttaattttatttattcttttttgtgaac

SEQ ID NO: 225905 - DNA, 1485 bp, Cannabis indica
aaaaaaagtaaaaagaaaaatataagaacaaaataatcgactgattatgataaattcttatattatatcattttatttttcaaacagagtttttaaataattagttttattgagaaaaagatgatatcattattctatcaaaatataaaaaatatgataatatgatataagattatataataactactcaaaaataaataacattaaataataattaatatttataaaaattaaacaacaataactggaaatttttcttaaaaaataaataaaagaataattaaaaataaaataactgctgcaaattaacagagatcaaaatcaacgatacaccccaaccaccacaccaccataaattccacaaccaccgttgaccaccacggccaccatcgcaaaaccaccaactacaccagatctgaaactaacacaccaccacaatgccaaaataaaaaaaaaaactcaatcatcaccgctaattccaaacctacacaccaccacaattcccaaatcgaaagattaagggatccaaatatattctataaaattgactcaaagtctatgtacatcaagaagtatgagaaaaccaatatatacaacaactggttcatataaatgttcaaaaagatagtaaatgagatggaaatattaaaattcaacacaactctaatatattaatataatatttatcaatcaacataataaaacaaaaagtaaaaaaaaataaaagatacttatcaataatatttatcgttgaaagcatgtgatcgttgctttaattgaagtgattggaatattgatacccatatctagtaatttaatcattggggagactcaatctttgatatttgagtaaaatagtatttgcatagggtaaagaaattatcattgatagtcacattcttaatagcaacaactgaaaccccaggattatgttcgatcactctattcgaaccactgcccattcaaaatttcaaaactcatgccgagccaccaatgtcgaccagccaaaagatagattcaagaattgagatctacgaacaaacatagggtgaagagacaaatgtcgagatagtgaatgaagatgaataaagagatctcaagataaaggggtaaagattgagatcaagaaagaaatagaaagaaagaggtttagtctctggggctgtcactgacagtggtgctcgtggtgtgtgcatgtgaacaacaacgaaagattgttaggaacggtgaaatggttcaattctcagaagggttacggcttcataatcccttccaatggcggccaagacttgttccttcaccgctccggcatccgatcccaccgctccgacggtcatggtggtggtttccaaatcctcacttaatgtgcgaccgtagagtttctcattcgtccacataaaacaatcgtaccaataggtcgtagattgttaccggacctaaccagcgacctcttctaaatatatgctattattaatattatttatt

SEQ ID NO: 225906 - DNA, 2069 bp, Cannabis indica
taatatgaaaatgtaaaatcgtcaacgacatattatgaaaatgtaaaattgtcgacgtaatatttatcagatatatattttaatttaataattattatgtaaaatcgttgatgtattatttataagatttcaacatgtggtagtattagacactactacataataacaatataattacataaaaatgaaaaggatgatgaggacgaggaccaacctattacaacggactttgtctttaacaactggttggcaacttccacgccactttgatggaataggtccgatcccttcatattcatcaaaactcttcgattcagaccaaacacctgtgaaatcaacacatttaccattaacaaaatgttattagtctcatttattatgacatacataaattgtcgttaatagtaattattgacaactatatatagtttaacgctaatagtaatcattaatataacaacgatattttttagtatcgttgcttgcatagatttacaaaaagaagtatcaacacaatcaacacacttatgaaataatatttcataagaaaatatttatgtaataatttgatagattttgttttttttaatatataacaccaaattgtatcaatatgaaacttcattaaggaagcatgaaaatataatagagaatattaaataaatggttaccactatccaagtttccaataatcacatcttcacccaattgtgttttgctccaaatagattgataagggataacaccttttctttccaatcttagaaattcccatgaatgagttgtgtgaaatttctttactcctttgctcagaaagactgatatcacatctggatgctctatacatacataagaattaatgttataaagttagacaatttaatatgtataaatatttatatatatacacaatatattattttaaattatatattttataaatattacaaatttaactatctatttgttaaataataattaataaatgtattttttttttaaataatactctgagcttaatttttgtcaaaataaaacttaataataatctaatttagaagtttatgaccagattgatggttaagtttttttttatcttttcgtgctagaaatcggcttcaaattggttaagtttttaaaatgacgaaaattgtggtcagggtattattttatatcattttggaaaatagaaggtgatttattgtttaacaaaataaatgatctacaaaaaatcttacttttagtcacaaaaaaatttgtaactaaaagtaagaaagttgtgactaaacataaatcaacattgctatgttgtgactaaaaggtctgtagctaaagatattagtcacaaaaattacaatttgtgtgactacatgtgcttttagtcacaatacttattgtgactaaaagtaaataagtgacaacttgtatctaaatactatgttttggtcacaaatagtttttgttgtgactaaaaattacatttagtcataaaaaagttatattgtgattaaaagtttgtcactaaaagtagctatttttttgtagtgtatttatatctatatataggaaactcgtaaattttggtattacttttgcttttactataagagtttttttctatttttgaaatccaaaattataatatttttttatatgacattgtatagtgttgttatataacaaatatcttacttattttttttaaaatattttatatgatttacaatgtcaaagctaaataagttcaaaataatcagttgcacgcgtataaaaaaaaaacacaaatacgtctgcaacttattgtttgaatcctatagtacatattaaaaattcttgaaaaaagagagagagaatgaggattgcctactatattataatatagttatcattaattaagaaaaaaaattgagttataatattcttcatcatatactaaaaataaaaataccttattatatttgaaataaaagattgcagcatataaataaaaataagctaacttctaatttgtgcagcttctgtctcatcaagaattgcagcaaagccattaatatgtctattgtatgagt

SEQ ID NO: 225907 - DNA, 3668 bp, Cannabis indica
gttttccttgcatgattttaggataagggttctgtggagctatacagtatttgaattcatattctatagttgaattattgttatttgatggcttggatatgtatttggataaggtttgagttttagagctcaaacattgatctttaatggtgattgagtttttggggatgattctggtttttattgcttggagtatgtttgttgtgatctatttagcaggtctggaaggtttggtggcatttggaatcgatttgagctgttggtagtgttttgggtgtttcctacactgaaccagtcaactggtttaatgggacctatgggaaccaaaatttttgttggtccccaggaaaccccacataatctatctttcggttagggaaccggtctgccggttgcgaatttttagggaaccctagtttttccctttttccatgttatccatcaatagagaaacttttagtttcaattttatgtccctgaaaagtgatttagcgtgtcactcatcagttttataatattgtgatttaggggcctgtaaatcgtcaagcagcagttccactcgggttgaccggtacacttaaattcagaaacaaggtaaaattagtatagtgatatgcatttatgtttacatgtttagcgtacatgttattaagcttattagattacatcgatagtgatatcaatatacgtagagttatatttgatactaataaatgtatgtttgaatcagatactgatcaatgctatcacatccatacggctagagtatcactacagtaccgagtataggctgatattatggttgataggttgtcgtacaaacattctaaactcagtaccatgttggagacgtggatagggttatggttaggtgtataggcgcctaattataattcaggttataattatgattatgattgtgcttttcttactgagtctgtcgactcacagttattatttgcatgtgtaggtaagggcaaggctaaggttgaggagttgtgagagcgagtgggtaaagaatgtacatgtcgatacggttaggttagagcgtacgatctttgagacatctgattatattatgtatagtcgctaggtgacaacttttttattaagtattttgaatcagttgcaaatattttaaactcgagatcccgaatatatataaaaaagttagtatattttaatattattagtaaagttttaattattcacggtttttaataaactcattaattagtaacaagttgcacagttaatataaaatcacgataacacgcctaaaatagtagggtgttacaatttggtatcagagtcgccaggttgtattctgaagatcgatacgacatgtacaatcatattagcgataagctcgactcacggttcagtaagcctttattgctttagtagtttattttattagtatgttataagaaaagcctaataggaagcatgtttgtagcatgatagctgaataggcgcatgttttaatttctaaaataagcagtaattagtaaattattcttgatcgtgatccgaccaagctagctcttggttttccaggctgttctaatagaatggacgctaggaaaaacatgactagtcagggtaactcgatcggattcagtggttgtcagggagttgagattcccccgtatatacgtggccaaggcagaggccctaaaggcagggcacgaggttggggagatgttaactcgtcgcaggctacccaagattgggaaaacaagtttgtagcaatgcaagccataattaatgaacaacaagaagaaattgaacgtctgaggcaatagggtgctcttgtaatgcctgctctagagatgcaggtggcgcctgcccctgttgtgtaggtagggctgattgttgcagtgaattggacagaaccactgtatgaaaggttctgcaagcaagcacctctagtctttctgagaggtcccaatgtgatcaatgtcgagcagtggctgccagttattacatgaatcttgaatttcatgggtgtcaccgacaacgacagagtggcctgtgccacattccaattcgaagaagatgccctagtttggtgggacacggtgtccctgactcgggatattactaccattacctgggacgagtttcaggaattttttaatgtaaagtattataatgaggcagtcaaaactgaaaagcggaaagaatttacccacctgactcagaaggagaatatgagcattaccgagtacacaacttagtttaatcgattggctaggttggcctcaggaattgtgccaaccaacttaagcaagagagaaaagtatctagatggattgaacccaaaaattaaacttgaccttataattaccactgatgttaacaccacctatgctaatatggggagaaaggcactgcgagctgagggcgcagttgtgtgcacccaagagtccaaagggactcaggtttttggtgggggcactactcttcctacctctggttatggtaggggtggtagtgacttgaccattgatcagaaaagaaaggcaccctttgcacccagtggctcaaatcacaataagaggttttgagggaactagggtcaacacaactggcagggtggttccaaaacctggtatacctatccagaatgtcccaattataagaagcatcatctgggtgagtgtagagggtgaggatatttccagtgtggttttcttggacactataagagagactgtccgtagctcaagaaagaagaatagaaggcagcagtaaagcccgcttcagctagggtgtttgctcttactcaagctgatgcagaagctagcccctcggttgttacaggttagctcttggtcaataactcttacttctctgtattatttgactctgaggccacccatttctatgtggcgtccagaacttttaataaattgggtagaccgtatgatagctatgataaaaggttaagaacactactacttagcggagaattagttatctccaaaaggtgggttaggtctatgccaatcacaattgaggatagagagttgagtattgatttagtggaattgggtttagcagattttgacatcatacttataatggattttttgtccaagtactctgctagtattgattgtaaatggaagatggtgatcttccaacgcgagggcgaggaaccgtttgtcattgtgggactagttcaaggatctcagattccagtgatctcggtattcgaagctagagatttgttacaagaaggattattagggtttctggcagtggtattggataccacacggcttgagacattttggctagaggatattagggtggttcaggaagttttagatatttttcctgatgaacttttgggtttaccatcgcagcaaaaaatagattttgttattgatttagcacctgaagtagaaccagattctaaggcaccatacaaaatggctccagttgagcttaaagaattgaaaatttagcttcaggggatgcttgacctagggttttcacgacctagtgtgtcaccctagggagctgatgtgttatttattaagaagaaagacggatccctacatatgtgcattgactactaggaacttaataaactgactattaaaaataaatatcctttacctaggatcgatcacctgttcgatcagcttcaggga

SEQ ID NO: 225908 - DNA, 1521 bp, Cannabis indica
ttctacaattgagagaggaactttacactcaaccttataatcaaatcaactggaaaaatgcgcgccatcaatgttctaaggtatgtaattagttgacacgcacataaaaaaaatgttaaagatcgaccaccttaaaatgcctaaccctttatatacagagtcgaccctgagatagggtatgttttaggtgaaaagaaaattattaggccctttataaaaaaataatctatagtattttcaaaaaccacctaaacaatatgtatatttttcaaaggatatttgtttggccctctaggttaggtgggccatagatgcaggtttagcccaacccgaagcaggttatatattattattagtgtaattgaatatcaagtctcacttaaaataatttatatttgttcaaagtgacttaatacgtaagtatgtgtgcgtacacatcaaacaaacatatcttatacattttattggttaacatttatctctatctttataagttaatgctttttataactttattattgtaggaggatctttattatccacctcattggatacaaaattttttgtgggatagtctttacctatgcactgagcctcttttaagtcgttggccgttgaaaaaaattataagagaacaagctcttcaagtaacaatgaaacatattcattacgaagatgagaatagtcgatacattactattggatgtgttgaaaaggtgataaaaatattcaagcatacatcgagatattatttattatgatcatgttttaaaaataaacatacattacattataacattatgtcaatatgttaaacatgcattaaagttataacactaccatggtgttatttttctgtttttgacacttttagaaattataatctaatattttttggtaataaacatacattaaagttataacattctaatcaatatgttcgaaattaatttgaataatttatgatagtgaaatcagagttcaaataattttttttaccatgcttatacaaaaaattacatttgcttgattatttgaatattaattttaactctggaaattattcaaaatttctagaatattggcaagatacttactataattataatattggcaagatacttattataattatgattataatgtacgttagttcatatatatgtatggaaaactttatgttataattttttcatatacaaaaaaaataaaaaaataacaatgaagtgatggtatttttaaggtctttacttaagattcttctataatttataaagttactcaaactctttattcaagacaggtgttatgtatgctcgcttgttgggttgaagatccaaatggaatgtatttcaaaaagcatcttgctagggttccggacttcatatggattggtgaagatggattgaagatacaagtgagtattattaataaagaccttagttaaaaactaatcaaaacatcccaaatgagaagaacttgtctaaacccaattatgataggcaaatctttactatgagt

SEQ ID NO: 225909 - DNA, 2103 bp, Cannabis indica
cctgtattttctaaaatagtacaaataggaccctgaattgattttttgtcaaaataaaatataattataattcgatcgaaaagtgttatgacaaaactatttacattttctgtatctgtacgtattaaaaattgtcttcaagttggttatattatattgggtcagtcgcacttaaatttttgtaactcgatctttacattagttgaataaaatataacgtaaactgaccaaaccgaccgacgtacacccctagttgaaagtgtctatagtataactgatgtgtttttattagaccaaaatgaccaaactaatcttacaaaataaaaaattagtcatattgactttacaaaactaaaactatagtcatactaactttacaaaactaaaactagcaatactagttgaacaaaactactaactttacataaccaaaactagccatattggccttttacaaaatcaaaactagccacaataactgtacaaaataaaactagtcacattggccttacaaaactaattaaaactacaactattaatgggtgcatgtagaagcaccatatgaactatatatgccatttgacttttcttttcttttcttttctttttttaaagaaaatttacaatttattaagataaattcactgttacaaaagaacttgaaaattgtggacaagcatccgtccatccatacacactctcttaacctagtaacagaggttgccaatgtatggataacgccattcacagaccgcaaaatagcactaaaaaaattaccaccaacaacaactaataaaaaataaaaatttatctaaaagaattaaatgaaatacatcatctgagtgaggattattaacccaaccaagagctacagtaaaatcactcattacaaaaaagaaactatctttagtgataattttttagtcataacataatttttttgtgactaaatgtgacttttagtcacaacaaaaggttacttgtgactaaaacatattatttagatacaaattgtcattaatttacttttttctaagaaaagtgtttatatataaataatatcagttagaccacacggtcattacaaaatagttattcagggatagaggaaatcggaatacaactaaacctctggtgggagaacgtccatctagccacattatgggctgcaaaattacaatttttactaatatgttcaaaaatacaaccaacaaaaaaaagaagagaatttaacacaaaatgagacatagttctcaagctcccagcgggactccttcccattgagagcattgatcactaccctcgaatcactctcaatcacgataaactttgagcctcgatccttagccgtctccagggccaaacaacaagtcggcgcttccccacaaagtgcatcaaaaaattccagtttagatgtaataacccagatcaccttgccaaaatgatcccttgcgaccaccgcagcacacatgctgtctagtcccactctaacatcacaattcagtttcagccaatcttgggggggacgccagacatcctccgtattcgaagaggggcaagcaaataagcatggtgatctgcaaaagataaacgaatagagttaatacatttcttaatatcaacaggacaattattgtatacattgtcattgcgcgtccgccagatagtgtcaataattaatgaagcataaaggaagacttcctcagagttaatgtctttgattttgagatcccacaagaatttaacccagtcccacatccgaaccccattatcacaaattgggaagatacccgaaggagaggaccgccacaggtgaaaagccacattacaggaaagggaaaggtgttccatagattcaacttcaattccacaaagagggcagctatcatccccaattggaaaccttttactaatttacttttagttgtgactaaaaatatatttagtcacaataaattgtgaattttgtgaataatacttttagccatgaattttttgatcacatcatatgaatcatacttagtcacaacttttttacttttagtcacaaattttgttatgagtaaaaatgtttataatgactattaataatggagatactaa

SEQ ID NO: 225910 - DNA, 1932 bp, Cannabis indica
gtaataataataatttgtatatatgtgtaagtatttttgtgagtttggatgttatgatcataatatacaagaatattatcttatctttaatgaacgaagaaactatacaatgtgttgttatctctctctctctctctctctctcttaattagtgtagtttctgcttgtattatgtcattgttttctcaattttggatgtacctgcaaaagtgcaaatgcaaatacaagcatagatttcaacacaaatacagtttgccttgccaccctcgttttttatgctattgtaagaattgtttgagctgaatttacacgattttatttaatcttacagtttgcttgtcagcctttttgctaaaaaaatgttcttggaagaattgtttgagttgaatttacattagttttttaattacttttatttggcattttttttacaagtaccctcataacataacttctctctggtaattccagtgaaatagaaactcgcagctgtttgtgtacaccacaaaattgtataatatggcaatcgagaccgatggaacaaatggctctcttattttgctgaagcaaggagctgaagctgtgagtagtaaattgatgaaaatacttatagtttgtttaaagaactatgtaaaatgagatccaaatacatgtcatgatgcttggcttcttttcacacgtttagtgaatattaacactggcaatttttctctttttatgcttctgaacgtaccattctggctgtttgcagagaatttttgaatcagcttttgtgggaaggaggtcgattatcaaggaacgcttttcaaagaagtataggcatccatctttggatttaaaacttactctcaaacgcttgaatgcagttagtttctttttcttttctctctcttattattttcagtgtactactctctttcgtgttgttcggatcgcctgagcatcacaaagctcttgcgaatcagtactcggagttcaaccagtgctttgaacgaagccttgaggcttatgaacgaggctctggatttgtatgagaagggactgcacgcagcgagaactcgggaatgcatgctcgagcttaaggaattgaaatcgaagactctccgattcatctcagcagttcatctgcagatgggtgagtttgagagtgttattaagtgtgtgaaggtgttgagagaaggtgacaatgaggtctcaattccagctctctctctgtttgagttaatgcctcaatggtaatgtagttgttttgatatcattcaatcttgaaaatgaataacttgatcggcggaatctggccattttgaaaggaaccgagccacagcaaggacgacattgagctgagggcgcaaaaccttaggagatccagcgacgagagcctcgggcactcagacactcacctcaccggctcactcattcttcagccgatactcagaagaaattgcaatgatttttgaacgagtttaggtcactatctatgtgggcaaaggttcgattttcttaatgtggattccaatttcttattttattttggaaaagttttgatgtataacattaattgatttaggtttcttatgaatttgtgttttagttgagcgccaatttgaaaattgagccttgaatgttaattatattggtttcattttgaggcacttcttgatatcatcttttcctttttgttttatttttattacaggtcctcatgttaatgctcataagcatcatgttgacaatgagcttaggatgctggagcgatttgtgtaatactgactagcctatgattttgtgtaatacacagggtaaaagctttgtcattaaatatgaaggttcagtcaagaatggagattctgattgctttgtcttagagcatgttgaacatgataggcctgaggtaattcttctacatctaagttgatttctctctctctctct

SEQ ID NO: 225911 - DNA, 1929 bp, Cannabis indica
tttgtaagttttttttaaaaaatgtcatatttagtgtaattaagtttttatgccatatatatcaaaacttacttttattttcccacatttttgtaaatagcccatatactatagacctattaatataaataaatatcgaattctacttatttatatttaaaattaatttaatttaaattatgttgaatctcctatttaattgcaacaataatatattacatgttgttgggcatctagtgtcttatagccattttttttcctttggatggtataagaggcaaaatgaggtttgttcacttgcttttataatgtttattttatttataatgagaaacatattgtttatattagattctttgtgtggtaaaagttgtaatctttaggattttggcttgactctcttccaagtctattcatagacccctctaaaattgacacattgtttcttcttcttttgtttcatagtgtttattttggctttaaccaatgcaaattgtagatgatcactttgcaaacctaaggcaaaattatcacaatgaaaatcaaaatcaattaatatataatatggttaaaagtgtttttaactataaaaatgtctcatatttgattaattttattaaataaattcacatgtattaaacatactaaataaatttcaatacaagttttgtatctatttattaatatgataaaattaaaatatttttattataacacactaataatggggaattttatattacatcccttattaagagagtgttagtatacttttatctgacttttggcattaaaaaataaatttaaatatttttttaagaccacctaaataatttatggatgtttgtccacttttgcgacataattacttaaattatacatttgtaattgttagctgacgtttggttaggaggaatgaaaatataagaatatgaatgaaattaaatgaaaatagaaatagaaatggaatggaataaaatttaaaatgcataaaaaaaatattaaattttttctcttgttatattggaacggtctttctttcctttttaaaatggaatagttattcaccaaaatggtggaaagagcattccattagaatgtcatttcaatactttaaaatacaaccaaacaaagaatagaatgaaaattgtttccatttcattccattttattacctccaaccgaacgctaccttaaaaatttaataatttttttaaaaaataatttttttaaaaatttaaaaattagatgacgcgtgtaattatgattaaaattaatcactactcaaataattatcataagaaaacgtgaattgaatgttttgtttaatctaatacatacatacattttccttttgttaagtgctaatcattttcattattattaatggcattaaaattaataatttaataattaaaagttgttagaaagataactaatgaaatctacaatattataattatagaaaaaaatatcacacagtcttggatgtgaaagttattcgagataatgacaatccaacattaattttctcattttgcatggcctttgatgagtatatactaaaattgttatttaaaataacttagtactaattaacaattaaaatccactattgtgtcaataaataaataaaactccactataagtaaaattaataaaaagattattactttgtaaataaagacaagggaaagacccacatagaaacaccttttttgaaatttatatatatatatatttatatatataacttatgacataatattagtgaccctcacacccaatataacttgcacatatacccttcttatttttaaaggcatacttttattcatgtgtgatcttctaaggggataaggaatcttgtcttgttcaacttctcctcttcttctatagatattgaccaaaaatttaagagtatacata

SEQ ID NO: 225912 - DNA, 1557 bp, Cannabis indica
aaaatcctaattagctaaaaaaaaaaaattattctaacttgttttttcttttattgttttctatgattataaaaagaaaaatataaatatatatactatagtgtactaaactgtgtttaaattctaatttagttattgcaaacaaagacaaattttggtgtatagtgggaaaaaaatgatcttttatattaggataaataacggtataagtacttaaagttttaaatttgtaagtggtataaactcaatgtttatttttagcggcataagcacttaatatttgtaaaactgtaattttcttccagttttgttaatagagactctgttttgaatttattaaaaaaatatttagaagtaactgatactacatatttttatctaaaccaaataatcggactttttatgtatcttgttttaaaaattaatgaacttttgttgagacggaaaagaaggagagagataagactaacgaaacctctctctctcaattaatgatccctattgaatgagcttttgcaatgctgactaagtcaaaaattaacaaaattgagtcattttcttgcatggacccgcagcaggtttgcctgcataccattaagactattaatgatttttctgcaataaaaaatctttcttgatacagcgtaaaagaatgtactgtaaaaggataacatcatgctatattttaattttatatcacttatttatatctctattaaaataatttaattaattacataataacttctcgcagtggagagagaagtacgtgttgacttgtggtctttagggaaattacagagaaaattatgatggaaaatacatgaataagatctagttagctagagaaattcattcattcattcataataatcttttagctatatatgtcaattattgtaattaaagactttccaaaaccacagcagccacaccatatataaagagcattattataatgtaggaatttttcaagccaagcccttttaatatttataattattatacatatgatcctaataaaaaaaatagcagtaaacatattttattttatgattttgttgtaatcgtactttttttttaactattaagttttaattcagaaatacgtggcaatatattattattcgactatttattaaattagttaaagaaatatattaccacgtgtttttgaactgacatttaacagatttaattgacacttaacaactaaaaaagagtacaaatataacaaaatcataagataaaatatttttatgctacttttttaattaaggtcatacatataataattacaaatattaaaagggtttcactacaagtatgcatataatgtatcagtggtgtctaatattatttacagatggtattttacaattaattaacgatattttatatataaatttttttattaaataaattatataaaatttaatacttaattataaaatagtattaaatagcattagtactttttatcactctatatatcattaaacgcacatgaatttctataatatttttttaatggtgctaaacatccacttgcacatg

SEQ ID NO: 225913 - DNA, 2444 bp, Cannabis indica
gtgctggtcaacctgagtggaacaatagcttgacgcttacaggaccctaaatcacaatatttaattctgatgagagacacgctaaaacacttccaggggacttaaaatcaaaactataaatgttcctatcgatgaataatatgaaaataccctaaatattccaaaactggaaaaattaaggttcacaaaattgtcccaaccggtagaccggttccccagcaagaattccggtttagtatagggaaccccaaaatcatccccaacacctcaaattaaccccaaaatcttcaataacctctaaaatacctgtatataccataatgaacccaattcaatcaataaacttcaataacaaactcagaaaatcaaaacaccattaaaagtaccaagttgagttttctaacctcaacattgctcaaaccacaccacaacctaccaactcagtttaaatcaaccatcataaaacctaatctaactccaggacacgaaatcaagcaagttacacattcacaactcctaaagtctcaaaatcaaacaactaaagttatgaaaacaaggaatagctaggttagaaagatataccttagattgaaacacctagattctactgtacttccttgaataacaaatgaaattctttcccttccttgctggttcttgacaatttgaaagagagagagaggttctagatttttctatgcatatgtttatctaaataaaagatcaattaactaaagagtttattaaacctgaataataaagctcacaaaagacaagagacaccttaacatgttgaccaatttgcccgtgacatataaaacaaataccaaaatgaaacccaagggtagtttggttactttcaaaaccccgacaattcccgatacttctaatgcctaacaatgatgccctactaataaacttctcaaccatataaaatgtgactctctaatggcccaacgctgcgctccactgcaaactgtaatgcctgactttttaaacatactaatttgaaaataatctaattataatatatttatataacctcgtaaattgagatcccaagttttaaaaaaaatcacttgttgaaaatacatatattgtatataaagttacatgatatttttttttacaaactacagggcaactacaaaaatatagctcaaaatgctgaaagaccgtaactctccaggttgcactgccgcgatatgtacaatccttgccaatgcccaactcactgctcctccatcttggctttacccttacttacacaaggtagcaactgatgagtcgaccgactcagtaagatatgcataaaatatacataaacaatgcaacaccggctttatgcttaagccgtcttgagcccaaatgctaagctcaccaaatggttaagaacattctcaatgaaagtacgaccactgtaccatatgcactagagtaccgactccgtactcgtgttggtaaggccattattgtacttccgggagtaactgagtgttgtaccacatgcactctatacccctggtactcgtgttggtaacactataatcaccctaaaactctacactatactaacacccttataactacatatttaacagtgctagtagtgtaaataaataataacatacatacattcacatatgtatactttatgctatcttacctcgtttccgtgctcaagtgtgtcggtcagtttgagtggaactgcaactcgacgctttacagggtcctaaatcataacattcaaaatttcgatgagacacgctaagacacttcccggggatttaaaatcaaaactagaaatattcccatcgatgaataacatgataattccctaaaggggaaaaactaggtagatcggtagaccggttcccaactagaattccagtggggttttttggggaccaaccggtcgaccggttgctataggtattctggaaggttttaggaagtttgggattgttttgaggtgttggggacatttttggtgcttcaaacctccattagactcttacacttacgaaataatgacttttatacacgagtacgccactctgattgcttcatgtaataattccttttattttccattgtagatttttctactatattattgcttaggcctattataattactattatttattagtgataaaaacaaaagtctgaccttttactttaacatattttgttaatctaattcaattaattatgtgtttcctatctcacgcactagtccataatgactaaaaaaatgctaattaattgtcataatctttttggccaactaccctattagttaagacagttctatttaatctaaagcacaataaccacccatcaataatatgaaatatgatattaactaaccattaaagtaataaccattgatgtagcccagtaacgaagcatcccaaagccagagagagagagagagagag

SEQ ID NO: 225914 - DNA, 2144 bp, Cannabis indica
tggtatgttttttattataattgtaaacataaaaataaacatagccaatattaccatatatataataatcaataattattaccatatatatattataaaagaaattgaaaaaaagtttttaattatatataaaaatgtatgagaaaatgataataagtttttttgcacatattttgtaattaattaaaataatgtatacaaaattataaaatgctcttttatatacctaaaatagggtcgggcgagttgggagtaatactacccatcccatatttaacccaaatatatatactttctaaacatctcatataattttttacttattatttattacatattaaaattaattgctataaatacaagattgactactattttgcctaatttattattgtaataaaagctttttaatatataatatatatatgaactactgtctatatcaaatatcaattttgatttcatatcttatggttttcttgttttcttttttttgggcaaaatttggttactttaaatttattatttttttttttatattttgactatcattatattattttctttttattattattgttttaattttaatgggtacccaattaatgtgtccccatacctaatgggaattaagcggggcggggatggggggcataaataggaaatagggacggggttgggaggtatattatctgctcactacccacccaatatatttaccctatatatctataaatggacttttttcagttttaaccaaaaaagataacaatattacaaaaatacttctagctggctaaataaacgaatatacagtccaaataaaaaaaaaattacacaaataccttttacacataccttcaacccataatctatgcttcctaggcaaccatcgggcaaccacgcaacaacccaatgcaaccgaaacgaagatctaatcagaaaaagaactaccattaacttcgaccagcttaccttagaagacgaccagaattaatcaaaacattggttgtttcgaattcatgaaaaagaaaagtgcagaaaaactaatacgaaactaaaattcaacaagaaatttagtttaatttgtataaaactaatgtcctaacttcaatttttcagatccatgaaatgcagatttcaaaaagctgaactgaagttcccaaacaatccaactcaagtataataaaaaaaaattacatcaatactatagtaaaataaatatcctggtgtatttttgttgttttctaaattaactaatggtgaatttgttcatagtaaatcacgaagatacatgtagatatagttacatacgtggaaacgctgttctgatttttactgttttataatagttgcattacagttgcataaatattttgctaacagttatttctccacatattattattgaggtacaagtaattatcaatcagtgaaaaaaaaatactgacaaatagctttttacatatacacattcacattttacattaattttttagttgcaattaaattacacgttagttcgctcgcaatatatataaatgttgcatcaacaacaacccactatccatgcttcttaggattaaaaacctttgtctgatgcaaccttcggtcaaccatctagcaactttcgtttaatccaaccttcggtcaaccacacccagcaactttcgtgtaatgcaaccttcaacaaatcactcagcaactttcgtctaattgtgtaagtgatagtataagaggtattttgataattaagagcacatatagtgtataaatattatctacatcttataaaaatatttttataaataaagtatcgatttgtacttttcatataatagttccttaacacaaaacatttcctatatttttaaatatcatgcatatacatatttgtttctcctttctttcgggagatatttgaaaactataatgtgcttatgttcagtaaattggaaagcaaataacctcctactgtcaattaatttctttacgaacacttaactaccttacatatttgttagagattttattacaatggaagaaaatcaagatattacaactctattgtaatacaatacaaggaccaacaaagagattaaataaatgttacaacaacataatatacaatatatatacactat

SEQ ID NO: 225915 - DNA, 2952 bp, Cannabis indica
atggggtgtaccaaaaatccaatacatccaacatccaatcgaacttattagtattttcatttagtttgaattattaattaaattttatatggttatacgtaaaatatatatgtatatttaaaaattaacattaaaattttactcttacatactggacttaaaatattggatggatctaatccaaaaaatactaggcctacaatattgaataaacctaaattaaaccaataaatatatatgaaatacatccaacggatagaaccgatccaatccaacatccaatggatgttggatcgattggatgactgaaattaattggatcggatcggatgacaatattttgagtcatcatctgcttctcattcttctaggaaaatcactgacaatccactctttcaacatcttaatcttattaaagagccattacagtctaatcacgatcacgattttgactctaacgattcaaccaattttcataagacaatggcttaaaataggatgttgaaagagttggccacaccagattttaaccaacaaccattgtgcatccactatccacccttagatgttaactttgaattgaaatcgggcctcacccacttattatctctttccatgggttgcgcaatgaagatcccaacaagcatttaaaggagtttcatattgtctgttctagtatgaaacctccttcagtgtctgaagaacaaattaagttgtgggctttccctttctccttaaaggatgcaactaaagagtcccaccaggtactattaaaacatggaatggtataaaaattgtattcttggagcgttactttacagcctctaaagttggaagcattaggaaagaaatttatggtattaggcaagttacaggggagtcattgtatgagtattgggaacggttcaagcatttatgtgctacctaccctcaccatcaaataagtgaacaactcctcatctattactcttatgaaggcttactatgtatggataggagtatgattgatgcatctagtagaggtacactagtagacaagactcatgcagtagccaagagcttaatttcaaatatggctgccaattcacaatagtttggcaatcatggagaccttattccatcatcatgctgggttaatgaagtgagaaatcccgttgagaaccaacttagtcaataattagctcaattaacattcgtgatacaataacttgctttaggctaacaagtgaggtcatgtaaaatttgtcaaattgtggggaattcaactaatacttgtcctacactatttgagggagcgaatgaggatgtgaatgttgtaggtgattttcatggtcaactatgttagatgtactatgaacctttttcacaaacttataatcctagttggtgagatcatccaaatcttcgttatggcaatcaaaaaatgctccacagtctacacctataaaacttggtttcaacattcaaaagcagtcccaacataattttgtatgtaggtcaactcaagcaccataagttgcatcaccaccaaatgctaaaccctttactaaaatttaattaatgccttagccacgaatactctacaattttagccgacaactaaagcctcattgaaaagcttggagaatcaagtgggctaactagcatcatcatataatatattggaagctcatatttctaataaatttccttcaaaaccttagaggaatcgcaaggagaatggaagtgtggtaactttgagaagtggaaagaaatacgatccacccacccctctaacaccaaatattttggcacctaagacataagttgatagctcaattgatgaagatgtgtctccaaagccaactaaccctccacaactaaagcctaattttgtcacttcactgccattccccaagcagattgaagaaaactaaaatagaagaggttaacaaggaaattcttgatacattatgtaaagtggaggtgaatattcctcttcttgacgctattaaacaagtgccacactatgcaaaaattttgaaagaattatgcactaataagtataagttgaggggtaataaaaaggttattgtgggggagaaagtttctactgttcatcaaaagaagcttccaccacagtgaaggatcctggtactttcactattccttgcactattggtaataaaaggattgagaactgtatgttggatttgagatcgtctataaatggcattcctttttccatctacaatcattttaatctcggtccacttgaagaaacttgaataattattcatcttgatgataggtcaaatgcttatgctagaggtgtcataatatatgtgctagtaaaaggcaatgaattggtgtttccagcttacttttatgttcttgatatggaagatgaacccattccatgctccactctaatctttttgtgaagaccattcatgaaaactgtaaggaccaagattgatgtgcatgaagttactttgactatagaatttgatgggaagataatctaattcaacatctttgaagctatgaggtatccaagtgatgtacaagttgtttattctcttaatgtgttggatgttttttctaaacgtgtcttagattttcataatgaagattgcttagaagttgtaataagagagtatcttgtgtttaatgatgaatatttttttgatgacatcatagatgtcataatcgcactcaatagtggttttgacaagatttataaaaaggtttcattctttgacttatcaatttaaattgagaaattacaaccatctattctacaagctcctatacttgaattgaagacactcccagagcatcttaaatatgtttacttggggaagaacgggacactatcagttataattgttagagatctaaaccaagtgtaagagaaaagtttacagagttctcgaaattacaaaactgctatcgggtggtctatcactc

SEQ ID NO: 225916 - DNA, 1484 bp, Cannabis indica
ttaatcaacatacttgtgagtagatctaagatcctggtaaaataaattccaacaccataaactacggttctttaacttataagaccccactattaaacattcaaaacctttaggccaatacattgactcgtcgactaggatttattaacactcgaaccacgtagaaatctccatctctgttacttaactacttatttaagttcttaagctcttctttaatttagtttctaaaaatctcaataaatatttttggtgcttccattgagagttgaagaaagatttgaagttgccttacatctgtaaaaatggtggctacccaaaagactatcgttgagaacccctcctttatggcaggatattgtcatggatgatgctattgcgctccctccaaggcacaccaagccgagcaatgtgagggacggagaagcgtctaaagctggcgaccgaacggttgaaacaacccaacatcaggacaatttgttgagaaaaacccaaaagacgaggaagaggaggaaaatgacgacggtgaaatcaaagatggatattagaaagacggatattattatgaacaagaccccgaggtggtttgagtatctagtgagttagctgaaaatcaacagaagctagcagaacaagaagctttctctcaacgaatggagaaaatgatggcacaactgcaagccaattttagtgatatagaaagagactctgaggaagatgatccaagtgagcatgttaacagggaaaaaggagcaaaccctactgatgttggaacctcagctcctacaaaggataagggaaaggcaaaggtaggcaagcctcaaactaaaactatcccattacctcctaaatacaacatgaacataaccaaccgacccttccagacaaagaaggctaccaacgcctctaggcttggatgcccttctactccgcgaggcccaattgtgcataacaataagcttggtactcaagtgcaaaggcctaccgttaaaggaaggaaaaattgccatggtgattttgttaaccaagatgatgggatagaagaaatttttcctgaagacagttggtctacaattgacctccggagatgccttgatgccaagcatgaaaaagccaaaggagaaaaggcgagacctcgcaggaataatctctgaaaccacatcaacgatagaattcgcagacgtgagcttccagatagttataccaagagattggaagagcaaatttctgatttgacaaaactggtccgaaaacagagtggagccattttttgacttagaagacaaagatctagaaccatgtttcaagtgaaccattgacgccccactaccaaaaaatttgaagatgccacaaatggagttatacgatggaaggacggaccccagggctcatctgtccaaatacaaccgtctgatggaagtggaaagagttagtgattgattagagctcaaatttatacatttgactattgggttttatgccct

SEQ ID NO: 225917 - DNA, 1423 bp, Cannabis indica
atataaaattttctacaatatatatatgtccatacagcaaaaaagaaatatgacatgttttaaaagactattgtgattttagttttataattattcaatatgataattttcatagttattttcaattttttgttggtatgttatatgtacaatgaaatgagttatcattccattaattttagaaaatatatttatattcaggatatcagtcatttatttttgtattattttgaaaaacctcatctctctcacagtttaccaagtcttgtattatttttattttaaaaattagtaaataatataatatattagtcatttatctttgtattttatgaatacatggtacgatatcagccattcatcaattaaatctattttctaatgagatttgatagtgttattattttcgaacttagatcataatgtttttccctcaaaaaaaaaaaaaataaaaaacatgaacttctaaaagaacaaagatttgtggtcgcattgattattgataactctatggtatagagttatttcttattcttttaaactgaaattattgtgagaagagtagtgaaaaatatatttgtctgcttaattttaattagttttagttttattttcgatttaataagttaactcttaagtcttgtaaaaaaatttatttttagttatgtttatttaattaaatgtgcttgtttgttgttgaaaaagaagaattaaatttttagaaaaaaggaaaggaggcaaggagtgggaacaaaagctgaaacagggctaaattgcagaagcattgctgaagcaataatacagcgaattcagcatttagaccagcttgatgttgtggaggaagaggactaaacctagtgggccaaagtgcaaaaagattgagcttctatttttagggtgtcatttttgtaccctatttatccaacaactaaaaggaggagaccaagtaaaccttcttcttctacatgatgcagctgccattttcaaagaagaattgattgcagaagaaaagtacagcagaggaaggaaagagagggggaaccaagcttttgtgtttgattttcttttactctcccttattatttttctttcttctcttcttttcttgtttcttttacttagatattaaaacttgttgaattgtaaacaaagggcagcaactatggagaaatagtttttagtttgaattttatttttttacttgaatatgagctagactttttgaggcttgaatgactatgaacttctatgttgggtatgattaatttttaagcttattttagcatttttgtctttgttcattcaagtgagcttgtcattttatttgattgttatttattggccatcagtaacaatttgttaagctagatcttattccggaagggctaagatctagtagataaacttggatggagcaagagaa

SEQ ID NO: 225918 - DNA, 5472 bp, Cannabis indica
gtttaaaattgtcaagaaaaattgggtatttctcacaattttaaacactcgtgatatattctcgacggtttttaagcgtgctttaaaaattacaatttttttttcaaaggagaattgtcgacggttaaaaatcgtggcctatactataggccaccgtttaaaaccgttgcctatagtgttatttccgaaggtttttaagcgtgccttaaaaattgcaatttttttaatagagaattactgacggttaaaaaccgtgggctatagtataggccttcgtttaaaattgttgcctatagtgttatagacctcggtttttaatcgttagcaattagttcaaatctaatttttttcaaataatgcgttttttctcgctccaatataaagtattttaagtctatttttttttctttcaaatctatacatttttaaaatgtcggtctctctctctttatagagttctccctctctttttctcatagacgacggtccacgagctccatcactcgtctctcgtctctcgctcccttactttctctttcacgaggtccaccatagataaaatctcgttcaagctccaccatggtcggccacggccacgagctccaccacgagaaccactgacactcctgtctctctctctctctcaatctctctctcatccaaagacagatgcgcgaccacgagccaccacgagcaccgatcagtcttctctctctcatccactctttcttgtaacttctttatttattttttttttattttgagatttttttattttttagtatttttttatttcacatatcgtcatagatctcgactattcagagatcttaaggccaaataaaaatcccatattggttttgaggagaataaaggcaatgattattttgggcaaatccactatagcaacagtttaatactgtcgactatcctataagccacattctaaaactgtcgcctttagtataggcaacaattttaaactgtaacatacattctcgactatagccgacggtttcaaactgtcgagaattcttttatactgacatttttccacagtcgcttattctacccagtattcgcgatgctcctataggtgacaattttatagaccgtcagatattctttacccgacagtgtaaaactgttggaaattctgagttttttagtagtgagtactagatctagagacaacacctgtcattagggcaacaaattgcttctttggtgaccaagataccaaagtttcacctaaaattattacacaaaagccaacaactgaacatctatcattagggaaacacgctcaatcaacatcagagataccagtaataattaatctattattactgctaagagtgcagtgccctttagatatctcaacacccatttaactccactccaatggacaaaagtaggcatctgcaggagctgactaagattgtttacatcattagcaatgtttggtcgagtatgggacaaatagtgcagtacacctatcacacttcgatacatagttatattatgcattagttctgttgggattttatgccccaaataaaactcaattttattgtaatcttatttactttcaataaagatcagaaatcatatattgatcttgtcatatgctttgttcacataatttatacatgattaaaggtttaatatataagttctactgaatcccaaacatatagttattcacaattacaacatcacagtggaaagtgattgtgattatatgctttaaactatttagttccatgatttattagtgcactgaatttacgctgacgtgataatcagcaatgttatttacttacacttgtataagtggaatgtcctttccaggacattaagaaagtaaactagtatcgaatgtatcggctatacatcagactggatcgatattgatagtggaaaatatatcataaacttaccgttatatattttctaagtcaatgtaactagttgatcttaggtcaattgatctcaatcatgagatggttaacttctagcttaattgtactattagggttgtttcacttgttcatttaagctgaccaataggatcagcccaatacttatatcttgggaacttggttgttcaattgagtgatagcgttaatcatagatatagaatttataacttctaatagaagtaaaatgatagtttccttagagcttgactaaacgcgtttaaatgattgatgccttatttcggtaattatattagtttctcgaaatatcatttgcaagtagctaagtgtttcaaggataaaatacgttgaagggtaaaacggtaatttagtccctattcaatatagaccatttatagaggattgttgattatttagaatgaaataatagataactaaaagcgtatctattcttggtgtatagagcattctatgtaatcaagcgtgcaattttgaatctatagtggagtgaggatgaactaataagatagaaaatttacttggtaaaattcaaatctacttattaggagcttggttacattggcccatggctccctaactaactgggataatattaatttgtagtctcaactaatttatttatttaatcaattaggattctaaataatgactatctcttatttatgaattttactaaggaaggacataattgagaagaaaaaagaatccagggtttgtttattaattaagagaccttgaagggtctaattaataaatatatttaaatggtaattttgtttaataattaattataattattaaataaaaaaagttagcatttaagtaattagaatagataaatgatatttttgaagatagaaaagattgtctcacttttgaaagcaaaagtgttaaaattcaaacccatgggccttgatgttgagatcggtcaagggttgaatttttaagcaatatattcttttatttagcttgtttattctaaaacctaaccctagtatctccctataaatataatataatggtcttggattcaaaaactaatgactctctctgtctgacaaaagtgaatcaaaagaaagctattattattgtattcattatttttgaaattttcttagtttcttactcaaaatttcatgctccttggtgttgagagattacccacatatgtcaaagcaatactcagcatagtgaggaagactgtgatgaacaccttcgaaggacaagaagatccaggttcagatcttgatcatactctacaatagaaaggatcaagggttagagatcttaatagaaggagtcatattattcctaccatcattgtaaggattgttttatttcttatatatttattatcgttttaagaatttcatatttagggtgttagattatagaattataatcaacatacatgttagtaaatccagatcttggtaaaataagtttccaataggtccttaatcagatagagacattggcttccctactgtaatttgtgttggacatggctttaaatttggcatatttactttctgcagtagctcttcaatgtaccttgtttgagtcaaatagtatccaaaagcatccttgtgaacttctattttgagaaagtaaggtgatggccctaaatccttcagtgtgaacttcttatttagagctacaatgaaactatttactttctcaattttgttacctgtcattataatgtcattaacatatatttgtgcaaggatagttttttttttattgttgtgagaaagaagagtggtgtgtctgcttttaagtgcataaagttccagtctattattgtattattggattggtcaaaccatgctctgggagcttattttagcccatacaatcttttctagttttcacgcatagtcttctttcccttttttcttcaaaatcttggggttgcaccatagagacatcttcttctttaagaacaccatttaagaatacattattgatgtctaattatctaatatcccaatttctcgatgcaagacaatccttactgtagaaggcttgattacagggctaaatgtctcaccaaaatccacccatacctttgatgaaaaccttggaaacaagtcaaggtttctgcttcttttattccaattacttctatggctgaagtagacaagttcgtagatgattacagatcccgcggaggaaccggtccaagaagctggaggcacaaagccaattgtagtggttgattcatctcattgggagatagatcagtacaagaacaaaattcaaaagttcttgatactttggtcttacaaagagaacacaagtcttagaagtattcctggcctattttggaacaagctagcactaaagaacgagtctctgtgttattatgtggatggattcaggacttgaagttgggtgcacgtcgaattcggagtgcaccttcctctctagagctaattcacacgtattcgaatgaaagtaaggcaagcaccattccaactcacccccttcttatataaattgctggtgagatgaaactgttagggtttatgccttaaaaagcttataaaaatatttctaattattaataaagagttgaacattttgatataatgtatgaatgttgaattattaatatttattattaaataatttctttatacatattagaaaattccttattcatttatgaggctgtggcttgtagatgtatagaaaactaagatcactcagctatgaataaaacggtcaccaacatattaaagttatggaatctttaatcaatggttgctagtatgtttcattgatgcctgttcttcagtgcaagtaattttggttcgaattactgatgtagtatgacatcaaagtgaaggtattgaatatgatagacattatatatgacaatgaccgatatgtttaaagttgtttttatcaaactataaagacctaattcatattataatgatgatcaatattagttcgacctaaatcctgagtaatcatgaacttctattcatgttgctagtttctttgattcactcgctaaagtttctgaaagaagatgattcttacgacttttattttgggaatctaataatgtggagaacatgatctacaattaggggtcaccagcaagggctaggatgtaggtctagttttttcttttgtcttaaatattctgccatcattgtgttggggattattttaccaggatctagatttactaccatgtatgtggtttaacatcctaaatatgaatttttaaaacaatggaatttaaacacatataaagttcaagaaaccttacattggttgcagcggaattaaatgactccttccactcagatctctaactcttgtatcctttttgtagcagagtatcaccaagattatttgagcccgattctccttcaattgattggcttcttcatagtcttacacactatgattgagtaccagcttgctatgtgtgggtatgtactctatcactataagagttcaaatattgaagagaaagagagag

SEQ ID NO: 225919 - DNA, 2517 bp, Cannabis indica
tagtgtgtaagactgtgaagaatccaaacaactgaaggagtgtcgggttcagatcttggtgatactctgctacagagaggatacaaaggttagagatctgagcggaaggagtcatttaattccgctgtaaccaatgtaaagtttctcatactttttatgtgcttaattttaaatcgttttagaagttcatatttaggatgttaaaaatatacttgttagtaaatttaagtcttggtaaaataaactccaacagtacatagaccaggaagccatcgacatgtgtaatccaactgttagaacccaaaggttcattgcattccataataaaggtatggaagacgaaatgttaccccccccccccccttttccaaatttcccaaatgtccataatgatctggaaaagaagactttaagccttcgcaactctcaagttctggaagctaagaggtaaatgttattcgtatttataaaaggaagacatgtggcatattcaagatagagatgattaactgaagcctgaaggcaggcccaacttaggtaacaggtcgaaaccgtacatagagatggatcgcaagcccatcaggactataagtcactcgcatcctgatccgaaccgttctggattaaggagacatcacggacataaagggagactctctagatgagttattgtcttttagaagggcactctaagagacgtcacaaaaggttaagctgatgtggcaattctctaacaccgaatcctataattttaaggctttgtcccctacgtcaaactataagagtgcgcacaccaccaaagggagcatatcctttgtttgacgaccaatactctgacatctaagtacgcagaggtaacacacgcatgccacctgtcgacatcaaatggttcccaaccgtacggaagatcacaaccccacgggttaggtctcaatccgtgagccctaagtcaatgtattataagtatttaccctaatagtgagtcatattacatgcaaaccctagcgagtccaggtacacccttacccggatcctaacttataaatactacatctgtaaagaccgcctaagtttaatgttatggattattgaataattaggatttatgcatgagatttaattaatatttgtgaaatacatattttggaaatatattttatatcatatatgtttattatgctatcttatgtaaattatttaatttttgtttatgttcggaagctgtggaaagcgacgttgggccattagagagtcttactttgggtattaaagcattttattatttttcggggcatcatcgttacatttaatagtgttggtttttgtcgggttagttcttaactaaaatgcccttgttaattattatgctattctattttcttttcaaaatctttgatgtttatttaaaggaaaaagaaattaaattaattaattaaaagggattatgtgattaactcttttgtcctatttgtttcagcccttttgttaaagtattttaattaaagtgtgtatttactctttattttgaaaagagaataaaaagccctaactttgccactctctcaagcttttctctctttctctctttcgatttttgtaaaagggcaacaaggaatttttgagtctgtattttgtagttgcatgctcgcaagttttttaaaaaaatgttatatgtacatattagtagtaaaaatacttttaaattgtattttgatactcgggatcccgatccatataattataaagatataatatattaatgttatcttttgagtttagtaaatatttaaatgcgggcgttacaacataatcccttcttgcaaagggttggaaatgcattactcaaacactatagcaaaaaactaaggttcttaagcttgtcaagaatattggtgtaatacttcaaggctacttagtccaatacaattgacttgtagactatgattcattaatatccaaaccactttaaaatcttcatctccatttgatcttattttattatattgagtttccgaaaaattcagtaaacaattattaatattgatatttatactgctatcatctatttttggttttatttcattgagtattgttattaggcacacgtagtgcctattcatgcctaatatcattatgaggtggcattctacaagtggttacataatttctctaataattattaaataaaaatatatagtaccatatacaaatatttagtactaataacaataactaaaatgtgtgggatgccatataaattaactaataatgatattatgttttggcacatggtgttggacatcattaatattctttagcatttatgaggagaaaatagagcatcaagtgttattgacttgaaaacttagccaataaaaaaagagattatttcataaatacacaaagataacaaaaaatttataaaaatacagttgtacaaaattttaaatattttaataatttttatgattttatttacagaaaatacgattttttatgttaaactcttgttaattt

SEQ ID NO: 225920 - DNA, 2421 bp, Cannabis indica
agggagcctatacttaaggcctaaggaaagtgaatagtctcactctttcacgttactctcataaaccctaagtcctgcaacattcacaactctctctctaaaatggagaacacctctcccattgcagtaacccctgttgacatgctcgttcccccattgtcaactactgttgatcctgcagtcgcccctctagttgagtctagtatgcctaatctctgtcgtgacattgttccttacaaattggaggttggtgcatctattcgccctgcgatccttgagtcgactccgtctctgccttcacctccagtcattcagaaaccttgaacgtttcatggtaaggctcctccactttataaaaggattagcgcaccaactgtgtctaaacgagaaactcgttcatcctcgagtctacattccccttcatcacctgttcaggctccatctttgcctaaatcaaaacccataggacctcctcgtcctccatataaggtctatattccttctcaaaccagtgaaagggttcagccaaaaagaaagtcttcccgtgataccacgtacaaaccacctgaaaaaaaaaataaagacaaaacccagtccagttccatctctagtctcgtctcccaaacagtcgtccaaaggctctaaaaaatccaaacttcctaaagcccccatatcaactgtcgacccagcctctgtacaatgctttgttgatgcctccaaagcatctgtttatcaaagatggtttggtagtcgtgagctttggttagaacaagtggtcatattagaagattttcctgaactgcatgagcttttaaaactttggaaatggataaacacggtcactaacttgtctgctcctcatcccattttagttcgagaattctatgccaacctagataggactgttattgctgagggtcatccacggtgtgtgagtgcatttgttaggggtcatcgagttccattttgtccattgactattgcatgcatgttgaaagttgagtccatcaggaaaccaacatatgggaaacaattcaatctagatcaaactttgatgggtagagtgctaactggcagggatcactatatttgggacaaacaggaaatttaagtcacttatctgactgccttctataggattcttcatcgggtagctttgtacaattggttccctaattctgatttgtcatcagttacacttgagattgtcaagtttctgtatgctgtaggaactcatttgtccattgatcttccatctctcatatttgaaaggatactttaagcttcagaaactactggcactcgtaacaagctaccctttccaagccttgttcaacgagttcttatggctgctcacccgcctcttacaacgcatgactatcaagttcaaaatcctgttctcagtaagagctttctctctgtggttaataggcagccctcatcaaccactccttctgcatccaaagtgagtaaaggcaagtctcctatgttcaaagggctttcggattccagctggcaggtacaaatgttttcttagtttcaatcttttgccaaacgatataagaaggatcaaaagcgtcagcttgcatttgaggcctccatgtaccaaatggttcgcactatcaagtctactcttttgtaccattatcctggggtttctctgcctcacatttctctgcctgagtttcatcgagatttgtttagagcatcctctgatacgtctggaagtaacgcacatgtgcagggggagctgtctgtatttgcccctgtcaccagtctagcccaaccggatctgcatcctccagctgactcgtctccagtaaccattgcaacacccttggtgtcgactgggccaccttcccagggggagtctggcaaagaacaagatcaagcagctcatattcaatgaagggggagatatttgtatttttttttatttatggttgctatgtttatatttctaaagacatttttttggtgcattaattttgtgattgctgtttcttttgtggtctttagttttttttttttttgagtcattgaatataatctgtgaagggggagaatgtaagtgtcgttattttgtgacagattattttagtacaatgtctagtcatgtctggaggttcagtctattatatctgcacttgcgaactgttaagtctgttatcattaggtgttagttagtgccaggtggactgttttgttgggtataaatagtcggtttcattctgtaaacagattatccattaaatcaaatcagttggtcaatttagttttcatcgtgggagttagagtcgtatcttgctgttcttgttgttgtttctacaggtctgattgtatagcttgaagatggtcatctatggcggaaagatcagatcctgaagtttctgagttcaaactgaagggagttcagtgtca

SEQ ID NO: 225921 - DNA, 4182 bp, Cannabis indica
tgttggatgtattggatttttaaggcactccatccaacatctgatctgatccaaatggagatataaaaaataacatccaatccaatccgatcacaattggatatccaatgtttggcggtcagttgtgattggatcggtcggttgttattggatttgatcgatttatgcacacccctaattggaggtgtagctaaagagtggtgaagcacctcaaaggaggtttttaatgcaataactaaagttataggagctttgctcatgtgcaaagaagtccttatagcttcagttattacacataagcctaaaatatatacaaattcaattattaaataataatcgaagccgcaaggtttttttagttaatttttttttatttttatttaaaatgatgataacttatttgagcaagattgaaaagactaaagttatagtcagctcaaagcatgtacaaaaatgcaagtccctagaaaagggaatgcaaaaaccaatgcacttgctcgactagccagcaacatcttcacaaccaaggcaaaattagtacttgtgtagttcttaaaaggaccaagcatcgctattttaaaataaatagacatgttagatgatagtccaacatggatgacacccatagcaacatgcctccaaaaaaaactcttgctaggaaacaataatgaagcaagaaaaatgaggaagaaaggtgctaggtttctaatcctggacagggttatatatagaagtggtatctcaatgccacctctaagctgtgttaccaagaaataagttagacggctgccgatagaagtgcatgaaggcttctgtggtaatcaagttgtggagcaaagccaactgaggaagtcttcgccaaaaagaaccacacattgctaccagaattccttgatgaaatagaagaataaagagaccaagccaacctcaagttgcatgcctatcaacagaatgtttctagatacttcaacaaacaagtcaaggaaagaaaaatcttcgtaagagacttggtgttctgaagaatattctttaataccaaagaccctacatcaggagtgtctgggccaaactaaaaaggtccgcaccaaattacttagataacgagtaaaggtgcatacaagcttggcatgtataattagaggatgagttagttctcttaccaagatgccagaatggagaacatcgctaagagtactaccaatagcaaacttttaaaaacactactctttagggctaagtttccatcactcttcagtgatggcctttgcatgatatgacttgcaaaggtagccaaaaattaaagagctatatgaccatcactcttcaatgattgcccttacgcggtatgccgcgtaggattcagctaaaacatggtttcaaaaccaaactttgatttgtaagcttttgttacacaaaaaaatgtatgttgcacaacaacaacacatatataagagtaattaatgaaaaaacagtgtttcggttcaatattgtgtcaaataacttgctaacaagataacttcttaaagttaatttatttttttagttccatatgcgtacaaacaagaccctccaagaaaacacataggcaaaggtttagagtacttgatgattgcaagtgaccaagagaccataagtctgtttgatcacttggggcacccacaccgtacaacatcgaacaaccacaactaaacttaagcaaaatttaaagctttgttaagcaaaaaattgaaagctaagtaagtgtgaatggcatactttagattagacataatctacctggtcagctacatgtctaacaaaagaagttaaagccagaattaacgactgcttggtcagtctcctattcaaaaataaatggccctaaggccatacaagaataaaaatatcatttgttcaaaagtaaaggtcctaaaggccatacaagaacaaaagatgaagtaagcaaaataaaagcataaaaacaaacaacaaagttgtaatgaccgcatgttagattatagattagtaaaggcaattaatattaattattgatattttataattacatatgattttacatttgtcgtgggccttatttttagaaatgggcattagagttataatttttcaatttcagatattttattaaactgtaagtgtattatttatgttaaatatgaattatgtaattttgatgatttttgcttggcgacgatggaaaatgcgatggatggccgttagagtcacatgggtaagtttagaacctaattcttagtgagacaaatatttaagatatttaaaatgtcaggttcaagaggagttatggtttcggaccatttactcctaggctaatattgcttaaattggaagtaagaagggtgtttttggtattttgctttttgggattaggtggcttgatcctaggttggaaagtggccactagcaaaaataggattaattttattagttatcctttttcatcaataaattaaagaaattaaagaaaaacaaaaggaagttcatccttttttctctctctctttgcttggctcccacaaaccagaagaatccaaccccaagctttcaatttttctagaatttcagcaaggtttcaaggtgtatcaagtggaggtaaaccttagtaacctttaccctcgagttttcaagcttgttagttgaattataatatgtaaattgtcgaatttggtgttgctcgaattatggttagtatttgttagtttcctactggttattaatgttgttttaggtgtgaatcttgtggtttcgatgcctaattcttgtgttgagaaagtttgagttttaagaactcaaacttgactcattaatggtggatttggattctgtgtttgttggttgctattagtacttgaattttgttgttggatgttgttataggtgatctgaaaggtttggtgaagtttcggtacaaattgagcaagttttggaattttgggggttttctagtataaactagttaactgtttctacagattctattgaaccagtttactggatatgtaggatcctagaaaaatccattttgccaatttatgtcatttttagagctttagtttctgtgtttccttgatcattagggcattgtcatgtcaattatcgataacaaatcttgtagttgtgagtttaggtccttagatcaggttttagtgtgttatttatccatttacgtgaatgtgacataaggcatccatctagcgtgtgattttccgttaaggttggtcagcacacttaaatttaaaaatgaggtaacactagcatagaacgtatttatatatgaatatgtatatgtgtgatatatgcatactatttgtgatttgtatactaccaacactagtatggtagcggtacttagtgtattagtaaattgtataatgtcaacgagtacaatacggtgttaccaacactagtaaggttgagtacggagtgtatgtggtacaacacttagtggtactcgaggtaaggtgcaaaccctaccaacactcgtacagtagcggtacgtagtgtatgtggtacagtggccttaccttagtaaagaaggttcttacttatttgataaatcttgtggataggtttttgggcgcctagatgcaagtcggtattatattatatgttatatacttttcttactgagtatgttgacttatagatattacttttgtgtgtaggtaaaggaaaggcaaaagctgaataggagtgagttctgagctcgggggatgattgtacatgtcgagacggtgcgacttggagtgttcaatcttgggaggacttcagttttattttatagtcgctatgaaacatgtctgtcaaagtattttgattatgattgtaaaagtttaaacacgtgatcccaatttatgtgaatatatatatttataaagtttaatagtttaaataaaaaatttaattttgcttgatttttaaggaaaaagctttgattagcaaaggtggcacaataattagaaaatcacgtagcgtgcctaagtatcagggtgttacaattttggtatcatagccgccaagtttatctactgaagatatcaagacatgtacaataatcatcagtgaaaagctccactcacagttcagtaagcctttacttttttagtaatttatgtgattattgtaatggccgctttagtaattcggattagtaaaggcaattag

SEQ ID NO: 225922 - DNA, 1837 bp, Cannabis indica
ttttcttttttttttttcagcctaattaattatctctcatgtcagtaaaagtactactgagaaactcaaagcaataagtagcaaactttaactctattcaaagaaaaaggagaagaagatcaaaccccaaaagcccaagaaaaatgaaaacctttctatctaattatatatataaatatagcaaatattatatatatagattgatcttttaccatgatcctcctcctccaccaccaccacctcctcctaataagccagtccaatacccagttgggtttccttgccctttaatctggtgatgatgatgatgatgatgatcatgaataatattaacttcatcagcagcagtagtaccattgcttgaaactgtttgtttcaagtccccaaagggaaataagatagtcccaccattattttcatgattttgatcatgatcttgaaccatcccattataactatgaccagtagtagtagtagtactatacctattcccaagcccaagtccatgatgatcaagaacattattactactactaccacagaaaccaaggttattactagacttatactcatgatcttgaaaaggaaagccagatgggtacatcagtagctgcctagtactactaccatttacacccaaagaagaaggaggaggatgaaccttattagattggaaaccgagattaagatcttggccagtacctgcttgatcatgatgattattattattactattattataggatgatgacaacattaagttttgtggggtgagattaatagtagcagtgttgatcatcatcatatgatcattattaatattgttggaggtagtagtgtttgtagtgtttgtagtactaggtttcttgttcttccttgaaccacctcctactggaacgtttcttagagtaccaccttcagtccagtaccttcgacatgtcttgcagaagtatcttggttgagtgaggctgtagttgttgtagtaacagaattttgtgttggttgaattgcaccttggacagtttagctgttcttgaggccttgatcttttctgatctcctgatgatccattatcaatattactattcttgttgttgttgttgttcatatttgatcccattaattctcccataccaacaaatccactttcctatataataaaacataattataattagtagccacaacaattataaagaggattaattaacactatatactagttttagctctagctaaaaaaaaaggcatgtatagctagcctttttgttttgttttttatttctttggagaattaataaagcataaatatatttagtacaaagtcttattaataattaaatatataatattgcctttccttttccaattctttatcataagaaagggaggaaaaaaaaagtgcagtactgtttttcatgagtaaagaagaagatgtagactttttttttttttttatctttttgaaagaagccatgaaaatcttctctgaaattatacaataatctacaaacaaacaattataaagcaaaaagaaaaattctacaagagtacaattaatgcaagtactataattaataataataataataatacaaaatattgatgaactgaattgattaatttagagctagctagctataataatgaaaaggaagggaaaaacaaacatgaatattaattataaatatatatatgatgaaaccccacctcatgttgccattgagctgtagtatccatgaattaagaagatgaagagaaaaagggtaaggcaaagaaagacaagtgatgacttcagagagagagagagagagagagagagagagagagagagaga

SEQ ID NO: 225923 - DNA, 2170 bp, Cannabis indica
tatgtcatgtgtacaagagtgtacacataaacagtggcagtaaccatatagcatcttacatttgctaacagtttagtagtttgatagagttttatcgctaaaatttgatattgtagagttaagtacgagtgaaacaatagttaggagggtttagccgttaaaaactcaatatttcattgatattgacaaagtgtaatttgttttgtactgacaaagcaacaattatagatcttctccacacattataattgtagtcaaaatcttaggaaccaagcttgttattgtatgatctccatttgcaatgtaataaggatctctgctttgatcaaaatgtcgaggaccaagatcgtatcaagaacagagaatggattcgcattctcattgtatctattcgagctgcttgactttgagtaccaacacttttcttggctatgaacacaaaacaatcgagatagagacgaagagaagagcaacacacaactacagtggctctgataccatattagaaaaaagaatggaaaacacacgattcaaaaccaaaagaattatactttatatatcaactgagttgataagatgtaataacagaaaaataattacatgaaaagtgtacataacaaactctaactaactaatgtagctcacaatcctaactaactctattttacttattttgatacaaaattctacatttattttggttaatagaaaattcgttgttgcttgtacgaaggagataaactgtccaattgtgtcaagcatggaagccatgcatactcatcaaatgtatcgcaaatagagccatttaaataagaatcatcagaaaatggttatttaaaagtttatctcccaactaggaagctcttcccacgtgttattctttttttctttttatacagtaaactacaattcatatttttctcatcttttcatttttcactcactataattggtgtgaagaaaaatactaacctacttaaattgtcccacgctccgtgcaattttaattttaatccatactacatatggtgcactatggattgtatttttctcaaacaatacaacaatattacataaatacagggccgtctcaaatattttgaaggtcctgttctaatttaaaaaagtaggcctctaataaaaaaaatatatataatttataaataatatttttaaatatcatcatattatgaaaatatattttacataattaagcaccaaaattgttgttatttctaataaaacttcaagctaatatcgaatattatggaaaaaaaaattaaaagaaattaaggaaaaaccttttttttttatttggcataacacattagtggaagattggattaaaaaaaattctaagaagtcataatgggcctttttaaattgtgggccctgtgcattagcacttgttgcacagctaaatggccggccctgcataaatatatagatatgttgcgatataaaattttgttcctagtacatttttataaatagggtaaatgatagtataagtacctaaattttaatattataagcgatataaatttaataatttttttagcagtaagcatttaatgttagtaaaactgtctttttcatccaattttgtcaatacagacccaattaatgtgttaaacaaaagacgtataagggcaatattctaaatctttgagtctgaaaagaaatatgtggtatcaattatttttaaatttatttttaataaatttaaaacggaatttataagaacaaaactaaacactaattaattattgttttactaatattaagtacttatgctgttaaaaaaattattaaatttatgccacttacaaacattaattattgttttactaacattaagtatttaaacaaatagattggtgtggaacggtagttgaaactggttgtctatccgtagtacaagcaatcctgagtgagcttcctttgttatcatattttgagagtattatttctgattgtaaaatgttttagaacaattgtgtgatgtttctgttaattttgttaaacggtctgcaaatagagttgctcactctttggctcaagtattctattttgtcgatgatcgtactcttaggaatattgatgtttttactgatttgcttcatataatcatgaatgattgtagttaaataaagttgatgaatttctt

SEQ ID NO: 225924 - DNA, 1454 bp, Cannabis indica
ttataatgaccactactttgcctacgcattttgagttatggcaaaactaggaaaaagctgtagcactgatgccactcgtgcatagggaaattaagcctatttttgaaataatgaattacagtctttgttgttaaagcagaaaagaaacataaaattacattgcagttaaataatagcaaacacaatttatggtaagttaaaactttagggatgacatgtaatgtatatatatatatagttgactattttatgatagtaaatagagtctgtaggaaagcaagaatgagaagggtaagtgcaactaagactgaaataagtgcccagggatgattgaagtagtcacgattaagcactcttcgatatcttggccgtctatgtccgcaatatttatttatgtcattaataatatcaatataataatctttacacatggcatcattgctgattcgaatgaaaaatatgattgcatcgttcatctccatatatttttccatgatatcctcacttactaatatttccatgtctttggcactatcaatgagatggttcagaaataccatgtatgaagtgatcacttcattgccagaaaagagacattgttctaagcatattagattcccaaacaaagtctcagtgacaccatgaagacttagttggggaatttccaagataccatccttgaatttaatatctaaaatactagagatcttagtagtagcgatactactttttgccttcttcaacttaattcctgcctctcgtagacttgtagctgacatcattttccaatattctcctcttctaggtttttgttttgctatagttgaaggtgatatcaatgaatttctcaatagataagaatgtgcttgttttcacattcgtgaacctcttcacaattatttcctacatcggaagacaaccaccaaccactgaagaaattggtgacaagtgtagtcaaagggagcgcatcctttgatactaacactacttctggagtagtcacaatcttttgaaacaaacaatcaagcaccaaccaaggtatttggttttccaacaaaactaagtcgcatgagctgagttctctaataatgaagtgtaaaagatgaaagataaaaaaacatagtgtaaaaaagagagcacgtgaaaaaaataatattaagggcaacatagatatattacaatgtaatctgtcatttataaatagtactatagaaaattatttatatatgtccgtaccgcgctagttgctacacttcgttcccttgctgtggtttgcggagtgacaaaaatggtatagtcaatttcaatgctaattatgatagagaaatttgattttatatctttaaaaaactaaaaaattttattcttaaaccaaaactttttaaattaaaaaaactatgacttttgttttcaaaactccaaaaataccccctcataattcaaaccctttctct

SEQ ID NO: 225925 - DNA, 1873 bp, Cannabis indica
gtcaaattttactcgacaacaaacccttcttagcagtcagttgaggtgttttggtactcgagtctacgttcttgggcggaaggtcatccacctttgaccattttacaatagacttctggccagaggcatcacccgattgcttcttcaaagcgtgcaacatcctctgagacatggctgcacataaataaaataaggaggttagaataagtacgagctacgtaagtgcaaataagcttaaaaaactggataagtaccctgcacgtgggcaggagcaccctcccgaacaagcacagaaggagcatcatcatttgaagaatcctcctcctcctgctcgaccacaatggcctttccctttccagccaccagggcaaaagatcgagtaaccctctcagaaccatccctgatcctgatggaccgctcaatgggtgcttggccacttggaggagtcttcctcttcttcttcttcttgctcgaagcctcctgttcgggcacaacctcccttgttgcctccccagtctttggtacaaagctagtcagatagagtttatacttgacaaagttggtgtcaatggcatagaaagatatttcgttcatctgaaaggagttgaaaaattacctaagccctcttcctaagttccatcgtgaacagaggatgacagtaggatagaatgtgctggaaactagtatgattggtgtctatccccttgacaaaatagtagtcctccgcgaagccacctatttttgtcacctttgtatccatggtgcccgtcagccacgactcctcaatttgagagaagtagaaataccccgacctatttttcttggggcttgatttcaagtcaaacagccagttggtatcatgaggggatggctcaccccatccttgtgaggcatataacacgactaggacatatagatacttgaggcccttcggagtgaattgggttggactaatgtggtaatagtcggccatcttcttgaagtgtgggagcaaaggcagcattgcaccctgtttggtatgagctcgcgaccaagcacaataactctctccagggtcagtagcaagttagtccgaggagggaaggaagcattctacattccccaagagaccgccctcgaaaagattagttaatttcttcatggtcatcacaaatggcagagaaatccatcgatctccctttggacttttccttctcaaaagatgagcctcactatactcctcaacgacatagtcctaaccggcctctaggacgtcacctacttcagacactggttctctttcatcattgtaaccaccaaatggcagcacccgagctaccccttcttcctcatcactttcggcatgagaaggagtagcaggtcggaccttacccttgtcatccacttcttggacttcaatgtccccaacaatatcttccttgtcagtgtcagaacaggtcagttcttccctagccagagtggctaggcgggcaatgtgcaggtcggttgatgaagatttcctaacagtctatttggtttgcgccatcattcaacatttgggcggagttttatcaaaagtgtgtctggcgatggtcacaacaaaattactaaaaggttttcccacaacagtagggcttggatggccctcgggcaaagtgttgaccacgtttggatggaccatatacgtgcaattagcagaaaggtaacatctccaacctttcttaagtttccaaatgaagcgattgtatccctcacctcgaatgtgaagttggtgacctgatgacaggggagccggcgaccgaagccccggtgaacggcggccgtaactataacggtcctaaggtagtgaaattccttgtcgggtaagttccgacccgcacgaaaggcgtaacga

SEQ ID NO: 225926 - DNA, 2240 bp, Cannabis indica
tttttctctccctaattttgaatgacattaataaatatgattaggatttaaatccaattaatcctagtgtcataacaaaaacaagaaaatttcaaaatttttaagaaaaagataaaagataagtttttcctctttttctttgttaattaatttttgaaaatttacaaggaaaagcaagagaatctaaactccctaattttattaggaatgcttgaagagcaaaaataatagtctaagattatcaaaattgatgcccatttggtagcttttagagaaacggactcggttcacgtcatcaagtcaactccacacaagtgtaaagttgacttcagggcaaatgttaacccaaaaactttccctagtgatgtggaaatcaatatttgacatgtatcaagaaggatgatatcacacagctgagtagacccaagtcatagtaattaacctaagaagggaccccagccctgcgtccatgttgacttcgggagctccgagatggaagttcagactttaataattttaatccaacatactatcttttaatattatgtaccaggagacatggaacaatcaaatccaagtcatggtagctgaaattagatgaacatgcaacctgaaagccaacttgggcatctagggtttcacccaatctccaagttgacattctcaactagggtttcagtttttaggactgtcttagagcaaatgtgtcaaaatttacattgtgacgtcaactagacatacaaagacatattttaggcatcagaatcagagtcaaagcaagttcattttttagcaccaagagcactcggtggccaggcacctagcgcccaggttgacaatttgtcaatctgatgccttccaagtatcagaccaacgatttgacttttgtatcttctttgtgttcatcaaaaatggggaaataggtacttccagggaagaaatagcacttcctaggtgcgaaaagcaaggcccagcgcccaggttgtcacttggggctggcctagtgcccaggttgagattttgtaaacttggcccaatttttgatgatgtttttcgagaatctttcgagcatcttctctattttcaacaaagattaatattcaactatctttggggaccaaacagaacttccaaagggccaatagggggacccaacgccaaggttgacaagtcgtactaggcccagggcctaggttgacatggtgtcaacctaggctgtttgaaatcaagttctcaaaaaagtgatctgggaatttttttttgtcattagaaataatgaagattcaagcaaacttgggggccaaaccataatccctagatctttgaaacagggcctaacgcccaagttgacaatcgatctagtgcactggttttgatcacttaaatgacaaatctgattcaactattgaatttagaatggtgaaggtaggtgacctcttcctcaagttctagaacctgagatgtatcaaaacgacaacccgggtgctcaaaaatgaagtacatacccagcacccaggttgaaaaatggcgtggtgcgctaggttttgcttatccgattctaattctatttcaactgtctgtctagtttttcacaataactaagatgcataaagtcagagaagtcaaattcacaactttgtatttctcatttttaacatgggaaactcactcgaaaatgaagagtttcgagtccctcatttctgtaaaataacaacatcttcgagaactggtgaccagctttgccagaatactgaaacagactaagtgatgtcaaaatatcacttaggcatcataaaatacatccccttgatgttttttcacttacccgtcatccaagttgacatcatatgtcaacctgctgggtgctgagatgtcaacccgggcgctggatgtcaacttgcgttgggtgatgaacaatctttagtaaaatggtcataactcactcaatattgatttgattgatgcgataaaacttatttttcaaagctatttgaatgctctattaagtcatgtatcacacttcaatcgcatttctaaagctatcgaccctaaatttcatccaaatggagttacaaaaataagctctggcttacccagagcgggtcctctcatcgcgaccctgacttcgaaaattgatgatcaactccagaagttaatttttgacgttagatcatcatctacggtcagaaatagcgaacttgtagttgtcttctatttttgtgggcctccttcacctataa

SEQ ID NO: 225927 - DNA, 1708 bp, Cannabis indica
agcatggcctaggcggttggggatgtcaaacgcaacctattattgtgttatatagtacgttgggccctagagtcatcagagtttgtgatgtccagcttgagcattgtgtaatccttgatattgggtgaataacaaggttgggaaaagggtttcctgtataatgtgtgttcttatgcttgtgtatgcatttacttgataggaagagtgtgttgttgagtgacgctgggtaagagtgaaaccgtgagtgtgtgtgcatactaacgggttgttgggttggctgactagattggggtgaatctaggacatcgcagggaaaatttgagtctgagaatttagccttgtgacaactagtatcagagcaggaatcgtgttgggaaatagcagaaatcatggtgacgagtgctgaactttgttctcgagttgaaagactcgaatagttggttggttctcccaacgaagatgatggtgtcagtttgtttgttctcagtgaacaacattctgattaactggaatcccttgagatgctggctcgagatttgttgaaggaagcatcagatcaagttgcgggttgtggcatggccatgatggatatgcaaagagaattcgatgagaatatgaagggggtgatggacaaactatcggacctgtcaaattctgtgaggagagatttatggctctcgatgcggatgtagcagtaattaaaagggcgatagcaaatccgtcccaaggaactgaatcatcttctaagtccctgaactgaaagccttcaatggtagtcgaaactcgaaggaattagagaatttcctttgggacgtcaagcaatacttcaaggcatcgagaattctagatgcagatagagtgaccattacaagcatgtatcttcagggtgatgccgaattatggtggcgcactcgaatggaggaagatacatgatcgggaaggcccaatatcgagacttgggaagtgttgaagaaggagttgaaggatcagttccttccatgcaacatggatcgctcgtgagtccctaaagaaactcaagcacactggttcggtgagagagtatgtgaaagaatatcgttctttgttgctggatataaagaacatctccgaggaggacaagatattcaacttcttgtcgtgattgcagccatgggcacaagctgcattgaggaggcaagcaataacggatttaccctcggtgattgtggctgctgagaaattggtggattacagatataattcgaatctgtcatagggtgataattcaaagaaatccactggtgaaaagaaacataatcagaagccttcctcgtccaagggtgggcaaagttatgatggcaagaagaaagatggtgctggtgggaataaccagaaaggatcacagccgaatgccaagaaaggtgtggggtgtttcatctgcaatggtcctcacatggcgagggaatgtcctagtagggagaagttaaatgccctgatcggacaagacagaagaagcggcagcgagcaagaaacaacttctaggatgaatcccttacaacttctcaatgcgatcactacggagaaatcaagtttgttcaaaggcttgatgtatgtgaaagcatttgtcaatgggagagaagtcacgccatggttgactcgggggcaacaaataaatttgtggcgcaaaaagaagcaactagacttggtctggaattgatcggaagttcaa

SEQ ID NO: 225928 - DNA, 1859 bp, Cannabis indica
cttgaataataatcgccaagttctccaagatgaacgctacgtgggcgactacgaaatcttccaaaactctcacatccgcctcattatcccctccgataattccgatacgcccaccaccactaacgccgatgccgacattgacgccaacaccatcatgatcgacgttgatgatcaagactcccctcctccattatttttcaacaaaattattagactcaacttaaagattcctactccgaaaccccacgttgtccctgtggagatggacttaaacgacaccgtttcgtcattgaaagagaagattcaagagatagagccctctgtggtttcggccaaacgtgtggttctttactcatattcctcttcggggcttgtggagttgaaagagaaccgttgtttaagtgaatgtgaacttcgtgagaacgctgagatcgaggtgagtttgatgatgaggacgtcgacagtattaggggcgggttcaaagaataataataagttgaaactgacagtaagatccaagtgcgagagtaggaaggttatcgtggagatgagcccaagtgatgatgtggtggaactgaggaaggagttggacaagattagacagagaggggttcattttcctcttccctcagatggttactttttcatttacaagcaaactgtcatggacgaagataagtcctttcgatggcaccacgtctcccatggtgatactattgacattttcaatggtagcattaccggaggatcttgattaattcttcttcttaattacccaatacctactgcattaattgcctttaatttttatttatttttaattattcatatattagattctaccccctttaatttcccccattcattctctattaatccttcattgccatatcccaatcatcagtatttttatatgtatatatatatatataatgatagatatatggtgttcatatattggttcctaaaactgatggagattccaataatatgttatatgtaaatgttaaatcatcttgcatattttaacattcgatctataatattttgtctataattaacatttattaacagctattctatccagtactgatcatgtggaagaaagtgttcattattattatttaaaattgtttaattattaattatgtctgttacattatacagtttactctttcctatgaaaattaagttttcggaatttttttttttttaagaataagtaataagaacgagatttagtgcatctttattttagcaacatcccaataaacattactagcatattaagatgtaatgttaagatgtatagttgaagaaaatatatatatatatatatatgcatatatatatatttttgaattaaacagcagatttattaaaaaaaaaaactcattcaaaaataatagaacgccaacaatcctccaacatctttaacaataaaccaaactgtgaggacatgaagactttagactgcttggacgcacaccaaagctttcccttcttgaatgcatctaccatagtttcacgatgatctcgagctacacatcccactccaaaccggccctctaactcaaataaagccccatcaacattaactttaatcttgtttaacacaggtacaatccaacgctcacagttccgcctcccatcattcaaatgagaaaaaatatatatattagtatttaatcatttgatcttttttagatattaaataaataaatattcataattcttgaacttcacgtataaaatgtggataatattcggctcaacacaaagttatttgagtctaattaaaatttagaagaaaaaaagaaaggaattatttcacaaatacactaaaataacaaaaaaaa

SEQ ID NO: 225929 - DNA, 2108 bp, Cannabis indica
attattattattattttatattccgagatattttgtgggttttatggaagttacttgattaagatatattattgtgttgttatattatggtgggtgtagtttggatgcataaaattatatcatcacaatttttctaggttggatgtgttttctggaaatcttaaatatatgatatgtgtatacatatttatatatttctgtacaagacatacaagtatcaatattatatagtttatatttataagcagctgttttgagtggtatcttttaggtttctatacggtttcgctgaaagtttgttgcaaagaagttaaataattacatttcttttactgttctgttttctttttcctggttttgtggctttgaatgctatgggatttaattttctggggtataaatgtgtcactttctataccatgtgatgtggtctataaagtctatggttgtttctatctctggtaagtgagaaaaagtgtctttaagaaagtctccgggtggggagacaaactatcttgattatggtaggaaagggttagaaaattacagttttggagtaccaagttgacagagaatctactatactatgttgatgttacttgagaatctggtatcaaattctagtggtaccagaaatgggaaagaaagtcaattaaatcagaaatgactttgatttatggggtggagcaagaaaagtacaaaggagagaatctaagagaaatagttgtagtgagctaagccaaggatatcctagtttttggttcttgctttgatttagtcattcaaagctgatgacttggttcttattgttttgcaaattttaatgaggaatcaagaaagtttccgtgtggcctgttgggtgtgtttttcctctatatttggcatcgggttgtcaaatctataagttcagtcacacacttgcatataaaatataagacttcaagccattcacattttctttctcttgtttatttaatcagaaaatgtatgtttatacataagtatttgagcttaatacaggtttgagaaggctgaatttcgtacctactcgaacctccaccccttggtacaaggtagggagtgcctaccggcgggatctgtagcgggttcaacttgaaagtttttttttcttttttgaaaaaaaataataataaataatgagtcgatgaaagtttttctaataacaattgtataataaatttgatagaaatattgaaagaataatcttaattaatttattttgcatataaacgttgcgttcatgagattataaaaattattattttttattaatataattgaagtctttatgcttcccgtagaaaagaagtagcaaaatgaaatagatatgataaggcgatttaaaatttgcatgtaataaacaggtttacacgaatatcccatttattaaacgaattatgaattaattttggtagatacactcaatttgaaaatgacacaataatatcctatttaaaaataatgtacaattatatttataattatttagtcaaagatatacaaagttagaatatgagtcactacaaagcgacttataggagtgtcaataaaatagccgatccaatccaacctaatctgcaaaatgcggatatccgcaattgtgcggattggattggattggaaaattcaaaatccgcacttgtgcagattggatgttgtttgacatgtaaaagtaaccgatctaatccaattcacacatttttataaaaaaaaaattaaaaaattatatatataaataatattttaatgtaaagaaaataataatttaaaagtctaatgcatataaaacaattatatttcaaaacttaataaatcaaatgtatattctattcttatgtatatattttttctaaatacaatttaaaataaaagtaaacatttctttatacatacatttttttttcttcttttaaatttgttattttgtttattttaatgtgtttttgttgggctttgtgcgctaaataaaactctatttcaatgtattcttttctattcaattatcaataaagaaatagatttattttcattacttatttagtatgacttttagttcatgtgattatttatatatttatttgatttat

SEQ ID NO: 225930 - DNA, 1863 bp, Cannabis indica
aaaccgaaaaccaaatttcgattttttgtgtgtaaaaaacgaccaaaccgaccgttactcacccctacaaaaaactttaacaaaatatacctcccatgtgctctctaaacacaaccaaacaaacacaagaaaatgactaaaaactcaatatgttatatgtataaaaacaagtaccaacaggatgcaattgcaacaactatttttctttgcatttttaacatcgtgataaccctaatcccttagaatgcacactacaaaccctatttcgaaaagaagaaaaaagatgaaaaaagaaacataccataaaatgggacgtcgacccctagacgattctccttcgggtaccctttcttcttcctcgatgaacaaatccctttcttctccatttacagattctaattctttcttctcaaaatgccctagttcttgcaccaaaagtttctcaattttttggcttaccctaaatcttggtctatttgttcttacagacggtaaaaccttttacatcttttttctttttagtttttattcaataaagtgaaaggaaatgcatttcattatattttattatttttttttatatattttgtaatttctttttaaataaataaataaaaaattacaaagaaagagaaccctctatttaattttcgaaactattgtcaattacatttttaaccttcactcttatgctacatcaattaataaacgattaaatatttaaaaacctaataaaaggggacattactatattaattatatgttgggaagattttttaacgtccattatattttaggggtacaacttaatagtaaaataattttaggggggaaattttctaatcatttttattatttaccaataaaaaaattgaaccaatctaaaagatgaaaaacttaattaaaaaaaaaaaaaaaaggtttaataatattgtgtgttttgggcaaataattggatatactttcaaatccacaactcccataaataatttcatttttattgaatgatgaaatattgtcaagcccttgatcattcaaagaaaataaaattgtcaagcccttaaaagttgaaattcatgtacatatattttaaaaaatgaataccaataacacttcctaaaaaagaaaaacattggtgggtgagaactgagaatcaaaccaacttaattcatgtgaattaacttaaaataacaatttgccttagaataacatattctaaagaccattcttttcacatgatgaaccggtttatggaaatatataatgaccaattcttgttagacattcatcatcatgtttttgtttttgtttgtgctttaatatatccatcttaattatttttttcataacaaacaaacaatggtagttgtctgaatttgtccatttactcatgcaaacactttttacttacatagaaagtaatataacaagaaaaattataacataatagtatataaaaggtatttatctgaaattttaaaactcaagttatggcattacattcccaactgtaaatataaagttatattaaatttgaagaagaagcatcttacagatagcatataagcataaggcagtccatgtaggaaaagtagaaaaagttaaaagaacaggggaccatatcaaaagagttaaaacttaaaatatccttaaatggattttaataaattaggaggaagaaaaaaatatatatatttaaaacagtaccctatatattatatgtaattaagaatatcaaaaaaaaaaaaaattgtaggtaaatcaaacgatacaattaatcaaacactagaaaaaacacaattaattttaaacagattcaacaaatataatttaagaaactttttacagccaagagattatgtt

SEQ ID NO: 225931 - DNA, 4324 bp, Cannabis indica
tttttatttaatttccaaattaatcacaaacattcaatgataatctaatatcatgtaacaatgatggttacatacttaatgtaactattgaaaccttctcctatgacaatattcaaaatgatgattacatatttaatttaatgtaactattgaaactttctcctacaaaaatattcaattcttatttataaagagaagtatctttcaaactttttaagacttaaactctaacatttatctctcttaaatatgattttattacatttcattacattaatcaaaatccagataaacaaatatgtttgaaatgaaataaatggaggtggacttttgtagatattgtacagtagttttctgaaattgtcagacgacttgcatggacatggactggagtgggtccccttccaccaagttgatcagctcagccatttgttagtataaaaatgaaagtgaaattgtacttaatttcatcacagtacactattcacttctattttgtctgctttttctaagttttgaattttaattggtagaccttgtcaaactgaaaatagtgtcattttaagttgggaaatgcattttcatacaaaagcattgtcataataaaaactgatatcagtcctatatattctactctgaaataaaaagttcagaaagaaagaaaagaaactcaaaacatcatgcttgctttctctatctctcggtggtatctactttggtgcctcttttgctggactataacttgttttggagtattaccacaaagtttgccattgcaccccgatgaaggtacatataaatatataattaatgtttattacagcttttctgtttttttagatgatatattttcatttaaattagcgctattaatgacttatgaccctaagatgttgcccgttatttataatttttcttactatattgcgaacggtacttaatatttctaaatgtctcattgagattgatttactatacttttaaaaagttattatataaaattataatagactcgatacttaattatactaataacaatattaatacattagaaaatactagacaccattagtattttttaacatttctcaatataacaattacttaattgtagtctttcatttagattctattttattgcatgtcaaaatgacatgtgtcaaatatttcttattagttcacaaattaatattttcaaaatttattttaactcacataaaaatccgtttaaattagatatatattggctaaaatgtattattggtgtctactattctcctcgacatgtcatactgttattagtgtaattaagtatcgagtcttatataacttaagaaaataatttttacaaaatatcactaactaatcgtaaagcgtcacctatagaaagtattggacactactaatgtcaaataacattctttaaattaatataaagttataaaatatataaaatcaaataaataaaaataactaaaaaccacttttctctctctacccacctgtttcaacttccttcttcttctttttttcttctattccagatttgaagcaccttccatcttcatcttatctttctttttcttactttttcttagatcttaaccattccagatattaccaatgagctcccacatatgttttcatcccaatcttgatccgaaacagaacacatataggggatcgagaacgagatctaaaagggatttgattattttggtgtgatcttaagtgtggttattatcattattattattattattattattattattttggcatggttgtgagtagtgctgtaagttcgtatatgttgtgttggcccgatttgtatttatttgtgtttttcgaaaaatgagtcatgttgttcagtgtcacgaaaaatatgagttgtgccgtgtgttaagaattgatgatctatactctattactctgtatctcatcacagaggatctacactgccacatcagcaatattgatagagaatcaaggatattccctttctgttattttcttatcattgtaatcattgaagatcttttctgttatttgtctctcctgctgtatggtgccacttggcccaatcatagtgtctaaacatatgtagccctacctatataatgaatgaaatacctcagccatcatttgagctgagttttcctatttccctgcaattctaaactttatcttggtatcagagccatccataggcaaacgccaatgtcaaccggcctacctcagactcctacagcagcaaacaatgctgccaacaacagccctacccctgggtcaagccaagcaggtgtcacaactaatttcgcacaagctcagtcgagctatgtagcaaactatacacaacccttcagcacactaaaccagccctttcccctcaaactcgacagaaacaactattccctttggaaaacaatggtctcgacaataataaggggacatcgattggatgggttcattcaaggcacccgtgtgtgtccaccggagtttctccctgctgaagcaccagaaggacaagtcggatttgggtttcaactcaatcctcactacgagcagtggatcgtaagtgaccaactcttaatgggttggttatacagctcaatgacggaagccatagcaaccgaagtgatggggtgtacaacagctgctgctctttggaaagctcttgaaaacttgtatggagctcattccaagtccaaaatggacgatacccgcacagctattcagacaacaagaaaaggtaacacctctatggttgactatcttcgccaaaagaaagcatggtctgatgtacttactctagcaggggatccctaccccgaagctcatttgatttctaatgtgttgtctggtcttgatgctagttatttacctattgtattgcaaattgaggctaggccaagtaccacttggcaagaattgcaggagcttttactaagctttgatagcaagattgagcggctaaatatcctaaatgggaactccaaacttgctgctgcaccaacagccaatttggccaatagatctgacaatactggaaggagccgtggcaacaacactccacaaaaccagaactctgggcgttcaaacttttctggcagcaaccgtggcactggtcaccgtggaagaggcagaggacggtctaatagcagcagtaatagacccacctgccaagtttgtgggaagtttggacactcggctgccatctgctacaacagatacaatgatgcatacatgggttctgacccaaatgccaaccaatctcagcctaagaacccaccgtctgcctttactgctactccagaagttgtggacagcgatgtttggtatgcagatagcggggctagcagtcatgttacagcggatggaagtaacataagtcagaaaactgactatggtggtaaggataagttgattgtgggtgatggtcatcaaataactatttctcatattggttctagtcatatacctacagctgataaatccttaattttaaaagatgttttgcttgttccggagattgctaaaaatcttataagtgtatccaaacttgttactgacaatgatatacttattgagtttgactctgaattttgtttgtgaaggacaaagccacaaagaaggtgctgctcaaagggatgcttaaagatgggctctatcaactctcccaacttttccaagtcctttatcatcaaagtcagcctacatgtgtgtctcacagtcatgtgaaatcggttaatgttattcagcatagtttagcttaattccaagaatgatgtgtggcataggcgtctcggtcatccatctcttagagtacttaagttagtgttaaagtctagtaatgtaactgtctctcctgaattaaaaacaaacttttgtgatgcttgtcaatatggaaaatctcatgctttgccttttaaaaattccaacaatagggctgtcaaaatgctagacttaatccataccgatatatggggtccatccccaatatcgtctaacactaacttcaagttctatatccattttattgatgaccacagcagattcacttggctatatcctttaaaacacaaatccgatgcacttcaagcttttgtgcagttcaaaaactatgctgaaaaccaatttgaaaccaaaattaaatctgtgagaagtgactatggtggggaatatcaagcttttgagagtttggttaaagaacatggaatccatttccaacactcttgtcctcatacctcagcccaaaacggaagggctgagagaaaacaccgtcatattgtggaaatgggtctaactttgcttgcccaagcaa

SEQ ID NO: 225932 - DNA, 963 bp, Cannabis indica
aagttactcgtgactaaaatatatcatttaaatataacttgccactaatttagttttagttacaacaagtatggtgactaaaaacatatttagcgataataaattatattttggaactaatgcctgtagctacaaattttttaaccacaacataagaattaggaacgataattaataattaattacaaatttttcacctttagtcacaaattttgttgtagataataattagaattttttttagagcacacaagacaaaacatgtgaataacctaattaattgaagaagcgcatatacagtatatctaattttgtaaacaatataattggagtcttgtagatatagaagatgatcattcatatcgatgttgctactatacgaaggttctgaattgtatgcctatggattagcaccctactattatatatatatgggattatatttatatataatatatattccattttaaccacaagttgctcaagaagcttttcttttatttgttctttttttctctctcccacttttggacctaaagctttcctcgatcaatcgatcgatctttcagaaaaatgagaaaacatttgatctctgcgcatgcaatgccttttcataaatctgttatgtaaatatatatacatataatatttatatacacaaacaaaatgattctgaggtcccctcttcggctctactcaatctatggcacaaataattcacctgattaattatttggttacaccaatatgtgtatatagatttatgaggttatgagtatatgtatgtcaacttaaaaatatatacaactaattaaatgtgcatcaacattgctagtagatatcatggtgtttagtattattatgaggcagtagggccgaccttatgttaatttgggccttagcaaaaataaaaattggcgctcagtgaaaaagtgaagctaattggatttaaactctcaatct

SEQ ID NO: 225933 - DNA, 4665 bp, Cannabis indica
atcagtacttaagccaaacatacactcatcggtatccaatataactctatgtatactgataacactatttcaatgtaatctaataggcaataataagtatgcacactaaacatgtaatcacgtatgcatatcattatactatacttacctcgatttcaaactcaggtgtgctggtcaacctgagtggaactgctactcaatggtttacatgcccctaagtcacaacatatgcaaaattaatatgcaatacgctaaaccactttttggggacttcaacttgaaattataagtttctctatggataatagcgtgattaaaacctaactatcgagaaaacgttgaaagatggggtttcgagaaaaagtacccaaaaaacggtagctccccattataaaaacagtagactttttttctaggttactctgcctgggaaaacggtaggccattttcccataattggcctgctgtttctacagcagaaataggccaaaaccccaaatctcaatcattttgattctaggcaactccaaactatctagaacacctattcacatcataatataccaaaaccaagcaatagaatctcaacagccacatttattcaaaaatcaccattgttgaaccaagtttgagttcttaaagaaaaacttgctcaacaccacactcaataatcaaattccaaccaaacaagcttagacaaccttaaaataacctcaaaagactgcaacaaaactaatctaacctaaactgtaactagatcaacaaattgcatgtttaagcctaaccaaaacttactaaaatcaaagaagaaatagagttagagcttaccttaggatcaaaactctaaaaacttgttaaaaccctttgaattgaagaaaaaaaattaatttcccctagtttcctagctgaaccaaatcaagagaaggagagagagcgaaattccattttttctatttttgtcatttcttgattattcttattttttcctcttttttttccaactaaaggtgatcttagattatctatttctttagtggtcagcgataaaaatgaccaaaatgccctcactaaagttttaaatggaaaaactgcttatgagtaaaatatttcaaaaccataaccccatctaatcctgacattcaaaatatttaactagattgccccgctattctaaaaatactaaaccataataaagtgactctataggctatacattgtgttccactattaccgagcataaaaaaatataaaaaatgtaaaattaatatataatataaatagcacacctaaaattcaaatatatctccatacttataaaaataataactaaaagtctactattgaaattggatcctaattatctactaattctcttaataaaactaagcagtcattacaggcttattcttgttgagttttcaacacatgagcaagaacaattgagaaaaaaaaaattatttctttctttttctctccatgtttcaaaaatagcaacataaaagagtgtaaatctgatttctcaaattaggctcatatttgtagtagttaaattcttttaattaaattatcttatattgtttaaataaataaatatctataactgaattcaattactgatatttatgagagaattaactacttgagagaatatctcaacatccttaaaatatctataaccacttttcaaattagatatttatctaattaagttaattaaataattaattgaccccaaaagacaaactctacatggatagcataatgttatgggcacccaccattatttttaggacaaggttggtgtcttttgtcctaacaacttctgtcttgaaaaatcttgtattgacaaattttaccttaacaacttttgtcttttctctatttaattaatttgaaaaaaatattaatttattacaacaataaataatatctatttttccaatttaaaatagattttttttttcaaaaaaatttatactatttcttcttcctactcttgatagttttttaaggtggcaattcggggaccatggacttatatgtaatatcttggaaaataatatggtatttaattaaaaatattttattaaatatgtaattgtcttgataatgaaataagattatgatcttacttaagctaattagtgtgaatttaataaataattaaataagcgtaatttattaattatagagattttattagattatgtgggtatcgtagataccatttttaaaataaaatatttttgagcctgacgaccgtgggaactcggcggagtggtcagaaatgttatgacaaaaaagtatggatcaaattggaattataccggattagtttagaattttaagttgtcagtttggtggattagttagaattaccaaattacccctaagttttatacaacttgaatttgtaggtaaaggtagaatagtaatttcttatgtttgattttcttctctttgtcttctagtgctttagttagtctaagtctttagttaataaaatatatagtatatgctgaaaatgagtttaattaaggaatataattaagaaaaaaatccaagtgatcttctctccctctttctttcaaacaacctacaagctagagcaaaatccatccatttctagttgatattactccttaagacaacctagaagctttgaggtaagttctttgctatgtggattaagaattttcatgtttttaagttggttttagattaaggttttgtgatttcgtggctgtagggttaaattgagttgaggttgtgtttataggcctgttttagagtaggtttgagcttgggttaagtgattttaatggttgatatgtttggagtaagaaattttgaattttagggtccaatttaggttctaacatggtaacttgtgaaatttgatgaattgttgtgaattggtgaattgaataccttgtttttatgtttataaactattctggagctgttcgacaggtttgatcaggttttggctcgatttttggggtgaaaattaagaatcccttgcctgccagaactggtcgaccagtttattctggtatggtagaaccgatcaaccggttggtctgcaggggagattctagggtttctcctcaaaaatttggttttgggttgggggttttcaaggtctggtttagggtatttgggagttgtttagcttattttggagctattggaagttagggtttgtccggttacgggaattagggtttgttcttggagtttttgtttaaagtatttatcgaatttttttgtcgtgacataggacccgggatcgtcaaactttgtttccactcaggtcagcctggacgctgatactggattgaggtaagaaaagtattatgcaccgctaatggttaaatgagaaacaattatgattgttatagtcttgattatgatcgagatcctgatatgtgtttgttgtgcctcgattatgatcgagggttggaaacggtcattaccgttatgagtaattactcgttgaaaccgcggatagatttcatacttatcatgcgctttatcaggcaacaatagtgatatacatagctcgtgaattaagagtggtaaggatgctttatgaagcactgagattaggtgattatggtgatgtgtaattgtataagcaagttaaatacgtaatgtgcaggtaaagtgaaggacacagctgagcaaccatgagtttgagggttgtgcaatagtgtacatatcagccgcggtgccacgactctagtggacaagatcccccctttttggatgtattttgaagtgtgattttattttgtaaaattacttttgggaatagattgtaaaagtttttaactaagggggtccccgtatttaccagtagttatcttttataaaatttatgtgtttcttgattaaagttttaattacaccacactttcaaaaactattttataaaaaaagtaaaagattaattttgtaaaagcacacacgtggcatccctatgggacaggacgttacaacatgattctaagctctaataaactagattattcattgagtctcattaaccaaataataattccatgattactccactctaaatatggaattgaactctaagtaattaaaaaattatatttaccgagtttaactacagtgaccattgatataatcaattctagtgattaccctccatattttggttcataattagttttagtcaaattactattttacccttctaattactttcgtattctttagttccattaatttactagtggaagtatatttcaagatcccatctgaatttacgggtaactttccagtaccaaatttaatacataaagggaccaacatttgatccgttaggaaagtcaacattccaaagttgtaaatcatgttcacaaccatccactattagtttcccaaaaaaaagttgttagaatcatcttctctgaaaaagtttaacgagtgaatgaaagaaactaataacatgaacaagagttcttgattactcaagatttgggccgatctactattgatcattgttacaatatatattaggtctttatagtaaacaacaagttaataaagatagcttcattcatatcggtccttgtaacgtccccgcttcaagcctccattgggtccttacacccacggaatgaatggctctta

SEQ ID NO: 225934 - DNA, 2373 bp, Cannabis indica
gaagtttaagaaaagctcaacagtgataccatatcgaaaaagctcaaagagtcatatatttctcttcttaacaaacagaggatttatgattgcagccactccataaacactcaaagtctcatcgactacacattcaataccaatttttcatagaacgctttaacaagtatctcggtatactctcaaataacacaataaaaatcattaaggaaactttattatacagagaacaactttccaagcacaaacactaattcaaacactttgattctataccaagcacaaaaagggcaattagttcacatattacgtgttgacacacacatatataatctaaaagctgctgaccaccaattgttaagagtatatctcattcgatcatttcacatacgagtatatctcatagaattatactaatccaacgcataattcgtatctctattttgatttcaaatagtaaattcgtaactataaagtatatgactatatgaagtaaatcaaaagcaaagactatttttacacctacgatcataaatggaatcatccaatataaaatgatcaaatacactatcatataagaatccatataatcaaaacccgtgatacatagaaattaacagtaaccctcaaaagaagaccattagtcctaaaccaacaaactctacgaatatgcgtaaaaaattaaatataattaaacgaaaacaaaccccaaaagtcaaattttgaaacagaaaaccagcttaaacaataagaaaaatcttgagtgataacagaattttaagaaatataattaaataccggcatgaaaattgactattaccaagaacttaaacgagaagaataatgagattactcaccaaaagatgaaaaagcaaaagggcgaacaacccaagtattgtggaaaagccctgtaagagtttctgggaataatagaaaaaaacataaacaaaggaatttttgagagagaaacaaaaaagagtgacaaaatttgaagagagagagatggaaacagagtgtgttagttcataaaacagagaaaatataatgttgcttgtagctatagactcttgtgtatttttatatttaatgttttcttttcatggaaaagattaaaaataaaatattatatcggcttttatacggttttgaaaatgacaaaaatgtatgcaaatgattctccataaggccaatttgtttggttcataaaattgtaatttaacagcggtgaggaggggtgtttttgtaaatttataatgtcaagcttacataagagcagggacacgcgttggacttaggtttctgactgaaagtgagttatgttacgtggctttttaaaatatatatataagtaagactacgtttggataattgaattttactaaagtaaaattatgtgattgcatttggaaatttggtttgtttattcacgaaattacacaatcttttctgttcaaatatatattttttttaagtaacctgtgtatccatgtaaaattaatagcccaggatacaagtaagaaaatttcagaaaaccatataacatctttatcaaagtctaaaacatacttttgtttaggaaatggggagttgtgttggcctctcgtgccacatagctaacagtagctagggagagaaaataacaaactattagtatttgtcacaaagccctataaatggatatttgtactggtagaatagttaaaactgtctaccaaaactttacaatcagtttctatgtaatcaatgctaagtgaattctcaatacaccatttaagagcttattgaagagaaagtgtttccatcagaagaggagaaaaagctcttgtccaagaaagagacgcagcggcaagaatgactccattacaatctcgtaccataaatcatagacctattttgcaagctttgagatcttgtgatgcatcagtgtttaatttcaaatggacaggtggtggcgactcccactgggggctaggaaggctagcccgatgtgccaaggaagatgtaggggtctgagtatgaatcttgtattgttgtatgtaagtcgttgttcggtttaaaatcacttgtgggttggaaactttttgatgatataattgttcattcctgcagtgccataatttccataacaaataaagaaaaaaatagaaatcgctactcaagaaagtgttagagacaagatgcaacatatcaacagtagaaaagatgttatatttaataatatattcaaataagggagttaattttcatacctctggacagttaaacaccgaaaaacgagcatgtgctatagtctcctccgtcctcgtacgtagggttggtagactgggattgtggatgattcgtggtgttgaagcttagatccgagtgggaaag

SEQ ID NO: 225935 - DNA, 2177 bp, Cannabis indica
gtttcatatgatcaatctaaactttcgatctctgtttactgtttcagtcgtatgtaatgcttgtgggatcagaagcaggaagaaaagaagagctatttggggtttaaataaaggaagctcagatgatcgaaaggcaaaaagagcaagcaataacaatggcggcggcggcggtggtagtaataataacaacaacaagctcggcgatgggcttaaacaaagattattagctttgggaagagaagttttgatgcaaagatcaacggtcgagaggcaaagaaagaagttgggagaagaggaacaagcggctgtgttattgatggctctatcttatggctcagtttatgcttaagccttattagtattaattaataataattataatataattattattattattattatatatataataaagtttgattaaaaaatttcattcctaacctttctctttctctctctatatcctttttctttctctctctaccaagtgtcccatcctcttgttgcctgtccttttcgatggtgaagattattttttttttaaaattgttttttaattattaattagtttttttttttactgactggtttttgggatagtgagagtaattgttgtagttgtgttattaattgtacttgagcaagtgtaagaatttgaagattaattcttaaaagaaattttggctgacatgttatgagtagtactattagaatgaatgttgtttcatttatcttgtgttgttataataattattattaaattatatttgtatttgtgttataaattttctcgtgactagaagcaaaaatgattttgtctacatgccatttttttcaattttaataaagcaaaataaaataaaataaaatattgataacgatgtgatacaaaattgcatttaagagtggcagagaagggcgccaactaaaatagaattttaataaaagggggaaaaattataaataaaaaaaattaaaggattaaaatgaagataagaagaaaaaaaagagagggaaatggaaatattttcccgccttggattggtgagtgtacttttggtgtattatctttttgtagggttagtgttatttgtttatatactaattctcttttttaaggtcaaatagtggtgggttctactactaattctaaatctattttgctttgtcatttttggtagtgagataagagatttgaacaaaaagagtactttctaaagtacagttttaatcacagggtgaaaaaaaaaaggtgaaaaatagatggtatttgtatttggtttggtaactaaattagtatctttgtaaaagtttgacttgaaaaaataattgatatatttattttagggtaacttttaaaaatatatagtttttaatattttatttataattttaccatttaaaatttttatttgtaaaaatatgtttgttaagtttaaaaaatagtatagtacatttttttcagcataaagtaaaaaaaaaaataactaaaacacaaagagaaattaatctcacaacaaccataaatcatctataagtaattataaaataactagaaaaacaatattataacaacaagtataaataaactatatatataaaataatttattatttttgttgaaaagacatttttgtaaataaaatagtttaaataataaaaataaaattttagatatttttgtaatttttagtttattatgtaattttttctttaatttacaaacgtgccatcatattagtactagtgcactagattctaccggaattctacaattaagcatgtttgggttagtttttttttaataaaaaatcattattattattgaaaggagaatattcatttaaagattttaaagggtccaagttctacaggtcaagcaactaaacaaacaactgttagagatattattacaatggaagaaaatcaagatattacaactctattgtaatacaatacaaggaccaacaaagagattaaataaatgttacaacaacataatatacaacatatatacactatatatattatatataagaaatatagaagaagataagaacacatgtaatataatatatgtatatatataacaacagaataatatatatacactcactcacaaccttgagtgtagattagtagggatcaccatgacttgaacaaggtattacacc

SEQ ID NO: 225936 - DNA, 1841 bp, Cannabis indica
tttatcaatctaggcaccttccaagtgtctgatcgaagattcaaattttgcattgaatctttcttcaataaaaatagaaaaacatgtcctttgaaggaaaataataattccttggcataaataacagagcccatcgcctaggtttataatttgccaacctaggcaaaaaaaaattgagttttcaagaatttttttaagcatcatctccatattcaaaaaatattgatactaaaatatttatggggaccagacaatatttatgaatgggaaaagatgggacccagcacccaggttaacacttggggctaggccatacaccttggttgacattttgtcagcctaggctatttcaaataagattcagcaaaaagtgtttctggcattcttactgtcataaaaaataacattgattcaagtaatcttagggagaaaaccataaaccttaatccttggaaatatggcccaacagccaggttgatttgatgttgggcccacactgaagttaacaatcaacttgggacattgccttcaattgcttaaatgccaaatttaatgcggccatttaatttgacatggtcacaaacgggggatgagatcccagcatcctcatgttcaaaagccttgaaagtttcaaaaacagaatctcgagagctcagtttaaagggcctaaagcctaggttaacaaatggtctggttcgttgggttctacttatacaaatctaatgccatttcgatcgtctatatagttttccataagtacaatgatctatgaagtcaaaaaaagtcaaattcacaacttcaatttttcagcaaaatgactcactcggaaattagaagtttcgagtcttttgtttctgcaaaacagcaacatctctgggaactgaagaccagccttaccaaaatatataaatggactaaatagtgtcaaaatataacttaggcatcttaaatgacaccccttagacgtttctacacttgtatagtgtctaggttgacgttatatatccacctcgacaatgggatgtgaacttgggcgctaggacccaaattgccttcagtaaaacgaccataactcacttaatttttatgcgattgacacaagtaaacttgtgttttcaatctatttaagcagtctatcaagtcatgttacgagaataagcattgggtcacctgtagtgggacctgtcgggcaccaaaaattagctatcaccaccagaatctaattttcactgttagattttcatcaacagtggaaagaaaattatttaaaattttctcctatttttgtgcctccttcacctataatagtagagctcttttagcttatttttcacattaataaaactatccacaatgtcaatgcttctctctctaaagtttagagttttcgatacttagtgtattgttgtaattaccatctcgtgagaaataaaaactcaaagtagatgtagccccattactatcgttagatagggctgaactattataaattttgtgcgtctctataaattattttcttaagcttatcaatcattttgccaatctagcaagttgatgttgaccactttatagcgccaacaccatctaatatggggccttagaaacaggctctgcccccagtatcgattcaatctcaaaataaatttctcgctttggttgtaatcccggtaattcctttggaaatacatcttgaaattttcataccactagaatgtattcaggtcccattagtacctctctcgtggtatcaagctggctaaacaaccgatacatctatcccgtaataaatctcttaccttaagtgttgagatcattggaataggagatccttgaacctttta

SEQ ID NO: 225937 - DNA, 3071 bp, Cannabis indica
tttaaaaaaatagtcaaaaaccgcaccactcgcaccgcgaacaccttatcttatactttttagttttagtttccaagtaaaaagtaaaaatttaaccaaaggataccataatactattagtttaatattttttttggaagtgagtatgtactatggaccacataaagaatacctttggcctgtgggtaaggtttaattaactcacttaaaatattttattttttgaatttattttatgataatatttttcgtaatgctattaattttcaaaatttaaaaaaaaaaaaaaaccaatcaacagtatcataagctttactaagggcaatcttcatgatacatctagctgaaatgttcttcctattatagccttttaaaagatcttgaaatatcaaaatattgtgagcaagtaacctgtttttaataaaggctcctgattgttgtggactaatgaagggagaaatttggctaatctggagcaaagcatcttcgagatacatttgtacaaagtcttgcaacatgctattgatctgtagtcactagccgcctttggattctcaatttttgaaatcagcgagaggacaattttattcaaagagctcgagagatagccttcttggaagaattcaagcacagctagtgatatgtcatcacccacctgatcccataagcgtttgaaaaaacctgatccgaatccatcaagcccaggactcttagaagagtggatgctaaacaaagcctctctcacatctttcttatgaaatggcctaattaatttaatttattgttccacattcagagtttccccttgatcaatacaactagtatcaaaatcttttttagcagtgctcttactccccataaatctcttaaagtgagcaaggagatggtcaaacaatttctgataatcatcttctacttgtctacaatagtaaaagttgttaccctattttcaactcttcttttcctcatgctagcatgaaagtaactagagttctcatcattacatttcacccaagtgattttactttgctttgtttctcttgttgctgcagtaagttgtcagttgggttcattgcaagcatcttttgagctttgatgtaaatttccttagcctatttaaactcaacaataacatcttgcattgttcctctgctaaaccttctcaaagtctgtttaactcgaacaagcttctgcattatgccaacgagactagcttggttaagggaatttgtccaactcctccacactacttccttgaaaccatggtagtagagccaatggttatagaatctaaacggcttgaaccccacagtctccacatcattactttttattacacaaaaactgtgatctgaaatgaactcccatttaaagcatgcctctattttgggaaatgaaataagccaagtgttattagtgaacactcgatcaagcttagaaataatcttgtcaccagcctcatgtttattagaccaagaataatgaacccccaaacatttgagctcatccacttgaccacatgaaagccagttttgagcatcttcaatttctttagttgaaatttgctttcccccaactcggtcttggaagttaaacatagcattgaaatctttaaaaatgatccaaggatctctaaggtgacaaatattagaaatcttattccagagctcctttctatcgactaacaaattgtagccatagacaagagtagcaaaaaattcttgctgtagaccactgttatacctaaaattttgctacacttctgaggatgacacatgtcagatggtggagtataaccacctagtataattgttgttgaaggaatttttacaacaccgaagataaattataataataacaatatagaaaatatatgcgagtactcaacccagaatggcgagtattcaaattagggacacaaaatacttagcaaaaactggaaatacaaagaacacaagagagtatagtggttcaggcagatcatggtcttcttagtccactgttgcaaggatttctgttttgtccttatttcatgatggatcactcctttatatacaaagcaagtgtcctatgatttacacatggattaaattcattatcaatacgttcatacattgaattataataattaaactaaaaaacgtaaacataataaatgaagaacaatttctagcttaatttactaaatacaacaacatatgcgacttctatagtgcgacttggctattcatattcttgcataagctcgcagttaaatgcatgagactagtcgagtctaggatgtttgcatcctcgtgaagtcacttatatggacatcttataacaagctgatagaaccaagacatgcgagtctatatcggtttatcaaggttattgggtcaacgggaccagctcgtagaatagagaatcggtctctatgtttttgcaggaggatcacggggatactcgcatacaccctggtatatgcgagcttaaaaccgttccttggtcctacattatgggagccatacgaatgcaattagactcggtcatgttcgcatcatctcgctgagtctggttcaggcgaggttcgtactcgaagggtctctcattaacatctcagctctcctcgaggaaagtgaaaacacatgtctttttaataggagtccgatctcgagtttctaggtgataaaatctcactataacacatgtccctagtttcgcggttgacagatgaggtcatgagggaaactataatcgagaggcaggcgaagagatgtcacgaggtggtgacctttggttgtcccatcgagggtttcaaaaaatgacgactgtaattattacatttgatcctatttagggtgccacgtcacgaaactctttggatttcgtgtaggcgtgtccgtggataaccgttagatgggatgaccttgggcattccttttgccacgtgtcataatcccaattaatgagggattatggtatttaagcttcctaatacgaacccatttcatattttccctctcatttccattttcctcttcatctttctctgaaatttcaaagattcaaaacttcctccagattctatc

SEQ ID NO: 225938 - DNA, 4122 bp, Cannabis indica
gaagtaagagatagatggatttgtaattcccatgacaaaagagtaatacatcatctgcgaagctcaagtgattcaattgaagatccttgcatcattcatgaatctgaaagtcattcttctttccaatcttaaccataattcaggaaaggtattacatacccaaaacaaatcagagaggggacaaagggtctccttgtcttagacccctctttgcttcaaaacagccatgtaaagatccattaagaagaatactaaatcttggagtgcgaatacataccatgatttgtttgatgaagcttgtcgggaagtcaaaagctggtaacatctcctctagaaagtcccactttattgtgtcatatgcttttctcaaatctaatttcaacatgcaatttgccttggcatttttcctctcgtaatgccgaactagatcttggcatattggaatgttgtaggcaataaatctcccttgtacaaagtctccctgattttgagcaatgattgaggaaggatatcccttaagcgagaatagatcatctttgttacaattttttaaactacattacaacaagagataggtctgaaatcacttacattttcaggacagtttgacttcggaatcattgttattgtggtagtattgatctccttgagtagcttccctgtgttcggaaagatagaacaacttcggataaatcacttcccacaatgttccaattatcttaaaagaaatggttgttgaagccatctggacccagtgctttctgcccaagtattgagaatgctgccatcttcacttcttcatttgaatattgtttgctaagtagagctttctgatcagcatttaaaataggtccagccgagatgacacttctcaacacagtcctcctatcctccattttggtaaccaacagttttgtgtaaaaatcaagaaaagcatcactaactttagatggatcactaatccaatttccagccatatctttgatggagagaattctattctcttgtcttcttgctctaatgctggcatggaagattgaagtattagcgtcaccatcttttagctaatgtgccttggctttttgagcaagaaaggaaagatatttactatgagttttcttatattgctcattagccattctgacatcatgaatgagtttactgttaagaggatccctttgcaagctatcttgataggctttcaaaagactttggactttgatgtcttcggctgcaatgtccccaacctcagaccaattaaagactctaatctctttcttcaaaattttaagcttatcaattagcttaaacatgggagtgccttgtactctttctttccaggccttggaaatcaactccccaaagccttttgattgctgccaaaatctgaaaaatctaaaatgttttttcccaatcttcatgtgaggacagactgacaaaatcgcagggcaatgatcaaattgtcctttcgttaaaaagacagcttctgcatttacgtagtgctctaccatgcttgattcgccataattctgtctattttagagtaaattctgtcactttccccttgcttattattccaagtaaagtagctgcccgagtacttaacatcttccaacttgcattcaaatatacaatctttgaaacctgtcaacttagagcttttgactctatcccccactctttcttctagactcagtatgccgttaagtcccccaacactaaccaagggccatgtataccattggctaatgttatcatgtctgtccactatacctctcttcccttttcttcattaaaagcatacacaaatgaggcaaagaaccaattactccctcgtactgtctcaacttcaatgtgtattatttggctagtacaatagaggatattcacattaaacatcaatgaattccaactgatgatgattctacccttaggatgccacatgttattcgtagttagacaccaacccaaaaacatagttgtataaagagcttccaagtttggagctatttttgtttcaaggagaccaaccaaacctatttgtagagaagagattaatttcttaatctctttctatttattcaggttgttgacccccctgacaactcatgattctatccatggatgttagggggtcctccctccccctcttctttagtaacttcttcaactatttcctcatgacttccctcttcctcacagagtgcttgaaaagcattcggggatgttactgttactattggtatctccttggccttctcagttctcctcccattcctcactaactgaaagccttcctcatccatttccattgacttcggtggagctatagggggtttatcaactttcttaggctccactcttgctgttcttttttccctgtcttcttgcattctaaagtggaatgacctattccctgacaattacgacattgcaatggaatccattcatacaccaccgaaatctcaaccctgtgatcaagttcattcgtaaaagaaattttatcaggaaaatgttgatcaatttttatctcaattaacactcaggcataagagagcctttccttattttaagtaatctgatcgatctataatggctctcctatttggctaataattttgaacaaagctttcctcccccaatatttaagctctagttcatgaagttgtatccatgtcggggatgaagagacattctcttttttgaaatttgtggttgggttccaaggcttcatgatgatcggtttcttatcaaaaaataagtagcctcctgctaacacttggtctctatattcaagagtatgaaatctaataataaagactccatgacttagcaaccccactttatccactttgtctttccataaccttctagcaaaaccagtaaaggggccaattggtggattagcacctaacacatagcataccaaagatgagttccaataagaaacctcttcctcaatatcctctgcatcaattttgattccccctgtgttgttatcagtcctgttcccccccccccccctcccccaaaattttgaactcaggctctaaattaagtgattagagtgcaacaatttacctgagttcaaatcgggtaatggaccaaattttagaatgggaggagtgacagattgacctgaacggagcagcttaaatctcctttcagaagcttccaagaaatttgagaagtcctctcgtatgtcctgaacacgatgtgcccttagcagcgaagaccttggagagatgacatcttcgacggttcttcagcattcgcctccgattcttcctctgtgaaatatacttttgcaactccaaggatttcgtccatcgatttcatcttcaggggagtcaccgacgatgagggaccccattgtttcccagcctttccttccttcttcccctgagttttacttttcacctttgcaatagatctcgatctctgagataagagtttgcgaggcctccctcgacccgccatggcacaagtatgaactgaagtcgcaagccctagcagagctcaaatcgcagagtctctataaaaaaatacaattatttaaaaaaatataaacttttcaaactaagattatacccaaataactattttgaaatatatatttatataagtaatattttaatcaaataacataaaataaaatttattattttgacctaaaattacaaaattagaaagacataacaaaaaataaatgtgatgaaaaacaaatcttatattactctaaaaaaaatgtctattaaatataatttataatatatatgatctcaacaatatttaaaaaaaaatacacattcaatatattattattattgaatttttggccaaaaataaactaaaaaattcaaaaattatcccaaaatatttgtaaatattttttcaagtttttatagggttgtttgaagagtacccactatattaaactcaaaaatatagaaaagaataacaaaacatagccaccactactattttcggcaaaaaaaaaaaaaaaaccaaacaacaacaaaaattaaaatcttacacaaattaagctcccaaaaatttccaagtatccttagtgttgtatgaagcttatccaaaaaattttgaacctataacatccaaata

SEQ ID NO: 225939 - DNA, 1169 bp, Cannabis indica
ttttttttttttgacgtgttctgatatgtaagttaaaaaaaagttcatatgggattgaataaaataatctaatttaatttattaacacattggtgtttaattaagtttattaaaagaaatttattaaaaagagattctagtctagcattttataattattatgtataactgtccaaaccaaatgagcagagaacatttataatatagatatgacaaataatcttgccggagattatggattgaattcataattttaattactttgataattttttatattcactaagtaatctttctgaactcaagtggtcataggagatttgtaaattatatacattttttttcaaaaagaaaaaatttagataaggcagtatgtgtgaaagattatgtattaaaaatttattatgcaaatgcctatatatggaaaatttgttaagagcaatcacagcaagagctgtataataggggaaacttacaaaaatactggaatttgggttaacttttacaaaaatactgtcacacgaaaatttttacaaaaatactatgtttttataaaacaccagtaacacaaagcagaacagctcaaaacaacagtagaacatcaataaactactagtaaaacaccagggaaaacttaacacaatatactgcagtatgaaacttataaaaaaatacagtaccgcctggtaatatttttgtaaaaaaatgacaaaagttagtataacatgtaaatttcctgtaatagctcaattcgtaaaatatagcttaaagtatgaaaaatagtcttccattagctgctgtaaaatgaaggaccgatttagcttatttatagtgcttacaaaacaaaatgtatatgacaatgacataaaatatttaaaaatgaatcaaatgtattatttaaataattaagtgaaaaacaatataaaaaatttaaactaaataaaaaaaaaatataaaattttaatgatatattttaaaaaaatagaatagagaaactaatgagagtgcttcctaatttttattatgtactaggtgaatgtacgtgccgagccacgtattgctagtttcatttaagattttggtctttttaagattttgaatgtattttatttttaaagattacaaattttttgtttgaaaaaattcaatatttatatttgaaatattat

SEQ ID NO: 225940 - DNA, 2544 bp, Cannabis indica
aaatatccgtcagaaccataggttagcactccacgaacaaacttgaagaacaataaataatacaactaagctgaacctaaccatatcaagattaagataccataaacctaagatcaaccattaatattggcttagaaagatataacgctaagtttatgatatcttatccaagatcaatatctatcccttccaatgtatactccatacatccgatactagtaaactttgccaatgccctggaaaggacataacacttatccaaggtgtaagtataccttatcgccgattatcatgtcagtctaaatccattgaactgacaaatcatgggaattaaacttttgaacataaaatcataattatattgcactgtggtgacgaagacactataatcatgaacaaatatatacatatgtatatatgttctagacataatagaatttatacattaaacataaccatgaaataaatcatgtcaaccatgcaacataaaacgatttctgatctttcttaattagtaaatctgattatattgaaatgagttttagttagggcacaaaacccaacacttcttgtatgggatagttccctaagtggacatgtagatggcctcaggcttccccattcggagggggaagcaagtgatcttctcctccttatctttttagttttgtggcatggggaagtgttgtacttcccttttttaccactatttcttctagagttattgttgttgcgcttgcccctagtattcttgccactagaggtctgttcaaaagtgttagcgcctgcatgcacatttggcaagtcgtggggcacagggcaccctgagattgcctattactgacttgccctaactgggcttgtcaaacagcctcctccatcttgataatgttgtcagctctgtcaaggaactcttttatattgttagttgagatcttttggatatctttccaaaagtcacttagtggaaggatacacccaatattgtcgtatactggcgttctcatgaacctttggatataatccttgaaatcttctccttgttgatttttgaccttaacaaggtcttccagctgcaatggtattagccgtacggattagaactgtgtgtagaattctcaagaaaattcattccaagaattgaatcttcttggagctagcttaaagtaccattgttgagctatttctaacaaggttgccaggaaaatttgacatcgcacatcactagtgatcttttaaagatcgagttgcatcttgaagtacttaatgtgagctagtgggtgttcttgccaggtatacatcttccataccggcatcttgaacttgggtatgagcaaggcattgatatatgctaagaatagtgatcccgatgacctatccggttcaaggtctgaaggttttgggcctgctaggtaataaatctattatttacataattaattaatgggccaggtctggtcggccactactggaaaggtggtctggcattgtccagccaaaccccttatgggcagctgttcatggcaatccaaccctatgttgtgtagggtctggccacttgttctcccatgatttgttggtgtagtatgtgcattgacaaggggtagatcacaccagttgttggagtttggtggatctaggtatttgaagtgactagacttgcttcttaagtctcgaacttagccagttgaagattggcctctaggttactccctcgtagaggcctcgagatgtgagttcaccctactgctcagccagaggtgtacaactaagggtttggctagccagaggctggccaattaagggtgttgttaagcctgagatccttggctagcccctagactgctggttgctgagatctcactgttctcaccaacaaatatttgtggcaggacttgtcctcctttgggtaggggaaggtttgtcctggttcttggggaacttggttggaaaatttatcggtagaccctccgtatatgtcaactagtcttccttggagaggatctctaatgggatcctgacctcttccaatagttctctcattgaaatgccttatcaggctgccaacttctctataatggtggtccaactccgcctagtgagatcggaggatgtactcctggtcatccatccatctccaaaatctgcatctctattgtgcgattacatcatatctaatagtgtgtggttcttcaattttgccaacttgacatactgcctctctaagtctagcctactcgagatcttctcctaagtctacatggggctcaccaattcctggccccatctccccaacataataccggggaccaaatccagttgtggtgcctaggggttactccacatgggttcttccttcaccaggagacgccagtggagtgttttcccttggcagcatagatagcttatttagacctacaggaatggttgtgttgacctggcaagtttttgtggccaggttcgtggtgccctttcgaggtggcaggagtagccacatttgtcgagttcatagagattcaaattgtgactggaacatgaacatca

SEQ ID NO: 225941 - DNA, 3000 bp, Cannabis indica
tttatatgccttcattccaaggggataccctaggaaaatgcaagcagtagcccttagggagaacttacatctcccagctcctaataatgtggaagcataggacaaacatccaaaagcctttaaatgttgataactaggatctttagaattcaaaatctcaaaggggaatttatgtttaagattaggtgtgggagttctatttataagataagcagcagtgcttatgcaatctccccaatagggtaaaggaatgtgagattgaaaaagaatctctagcaacattcaataaatgctgatgctttctttccacaacagaattttgttgtggtctttgaacacaagaatgttagtgtatgatgcctaaggatgagaataatgcaggaaattgtaattctttggcattatcagatctaacacccttgatttgaacattgtattgggttttaataagctgtatgaaggctggtatggcaaattgagcatcagatttatttttgatgagatgaatccaagtaaatcttgaacaatcatcaactatagtgataaaatacctaaaaccttcaacagtaggagtgttgtatggtccccaaatatcaatgtgtattaggtcaatatagtgtttggacaaattatgattgctaatgataggcaattatctttgcttagcaagatgacatatagaacaatgaaagtcatgacaataggaatattgaaaatgtaaacttttattcaatggatgtttctttacacaagaagcatgacctagtctataatgccataggttcttatcacttattctaaaatctgaaatagaagaacaaacagtaggagccttgtgctcagatatgtaataaaggtttccaactctctcacccatcccaatcacttgattcttggtgatatcctgaataatgcattttgaggaagaaatagaaaggaatagttagcagagttggataaagcacaaacaaagatgagattatgatgaaactcagggacacacaacacattagtgagcatgatattttacagattgacactcccaacaaaagaaactctggtgttggaaccattaggtaagcctacatatttaattttactgtcagattgaatagaatgaaacaatgatggattggagcacacatgatgtgtggcaccagtatctatgatccaactaaaattaggaatagatttgatcttacctaaaatatttgacacaacaggctgatcagtttgtggagctggtggagctgtctcctgcaatttttgagttagcaaattcatgagtttctgacattgagtagcaagatccatctctccattggcattttctttgttgttatttcctactgtgaaattaacaatcgactttccttgctgattaccagattggttaggtgtttctctaagaaacctgccctatagtcgatgaccaggtggataaccatggatcctataacacttagctatagtatgtccaggcactccacagtgtgagaaaataggtcgagtatcagatgtattatcagacctgttattgcttcgatttccttgagtgcttctagtaaattgattggaattctcattagtagactaattgctttcaacttgagggatgataattcctctttgtttctctttttgaattatgcaagcaaaagccttattaacattcggaagaggatcttgaagaaggatttgagatctagcattcagatacgattcattaagttcaattaagaactggagtaccttatcttcatcctagtacttctgaattattttcattgctccacaaatacagactgattgtggtctgtattcctgaagtagatcccaaagtcctttaagccgtgtgtaataagttgtaacatcattagatccttgagttaaggtctgcatacttcttttaacttcaaaaattcttggagcaatctactaatggaacctttcttgtaattcacaccagatttgtgatgcatcttccatgtacatgatgctatcagcaatggtgggagatacagagttgaggatccacgatataacaacgctgttgcatctgatccatgactcgtaatcttcatcatctttatcaggttctggtaatttaccattgatgaattttatcgtttctcaccattaaagcaaccatcatagatctaccccaggagctataattctcagcattagtgataattttaggaaccaacgaagaagatgcattatcgccattggacaaaaaataaggacttcgtggatcggtagtaggaagcttattgctttcatccaaggaagaaaatcgattagaaccagctgcaactccattgttgctgttacttcgagtttgagttcctcctcctcgagccatggagaagtagaggaaacaaagaagaagaagaagagaagaggaagaagagctcaacaatcggttgactctgataccattttagtttcagaagagaaagaaataaagaattgtaaatgaatgaatgctcacttcattagaatgaaacagaggaggtacaacactttatatacacacacacacttcagcaacagcaaactaacataatacctaacaaactactttaactaataacagaatttgtaacaaactcaacaccttacaactaacactttaatatatatatacaataaaaaaaaacataaggctatatataatggtgtacacaaaagggtaagattacactaatactacttttcgtgtacttccatgaatcacacatttttacacactaaagtaagttattaattagcatttttatatgcagatatgtattgtaattatactgaacattctctatggtttcaacaaaatttgaatagcttaaaatactaaaaatataatataaaaataaatctttaatttcatgtgacaatattaaaagtttgaaattattttggtttaatgaacatctatcatattaaaaaaattgatccacaagtataaaaagtgtaccatttaccgcgataaagtat

SEQ ID NO: 225942 - DNA, 1170 bp, Cannabis indica
ttaatcgtgtaaggctaaataaaaaaaagaatcgttaaaccaagaatcgttaaaccaagaatttccgttagataggcacttttaatatataaagatatcaaaattaagggtacgatttaacacatgaacaatcattacataattagatgaaaattttttaattatcaacaatttcaataatttaagtaaatattaggacctgaaaagtttaaaaaacatcatgtgcatgtcaatgttaaaatttgtaataaattggaaaaatccaaagagaaaaagagaacgaaataaataaaatgaaaactggttaatcaaaaaagaaataaaatgaaacttttttcccttttgctgaataaatatgatgaaaacttagatcataaaacgctaaagtgatacgtgcctatgtggcaatcatataactataataatcatattataatttcccttttatcatttcggctacctaatttggttctagctaggtttagatccagcaaaatcaaataaacaaataattttgcaaataaataaataaataattgttagttatagttacaagttttgttattcgatattggaaaatgtgaattcaaaaagccctatgcagaaggtcttgtaaggtaattccaaataagcttgtaccgtgtatggaatgtctcttcaggatagcttgttattaatcccgaagtacactcctagacagcttattgtcagtcttgaaggtttattcgggaataaaatcttgtacgtattcgaaaggcttatgtgtttatagagcttccaaattgtccgtactgaaagtgtgttctcaagctgacgtggatattattgttggtgatgatgacctagatcatttaaggcggtataaatgcgccacaatgatttaggagatatttttggcaacaatgcaaatttatatatagttgtaaatctttgtaacctgtgtgagaattagactagatttgcttgagtaaaaattgtgatagtgtaaggttgacagagagagtctaaactagagagagaaacttcttcttgtaatctctgagaagtttatgaagatttttgtaaccttgtaaatactaatatcaataaagatatgactattgttgttccaaccgagatgtagagcattgtacatggctcaaaatcgttaaatccggttgtaatatccca

SEQ ID NO: 225943 - DNA, 1782 bp, Cannabis indica
  modified_base (34)..(34): a, c, t, g, unknown or other
gtcaattactgagtttcatgccaaactatgtganattttctaatgagtcttatgctcttggaaagtatactccaacaaaatgatggtcagaaagacattgaagctcctaacttagaagaactggttggatctctagcaaaactatgaaatgactttacagagatgggacaatggtaagaaaatcaaagacttagaaaaggacaaagctgagattggagtagcttttgttcagaaggaggaaattagcaaagattcagatctatctaaatgtttcatagatggaaactttgctcttttggctaagttttatgctcagtttctcaagaaaagttttaagaagaataattttagaagcgaagaaaattcttctagtaaaaattttcaactgccaacaagcatcctcagcaaaatgagattaagagtaaaggaattcaatgtcgagaatgtgaaggtttcgaccatatcctagtagaatgtgcaaacacattgaaggaaaagaaagttcttgctgttacttggagtgatagtgaaaaggaagaaacctgtgatgagtcaaatgaagaaaagtttgtgattgcttttatggctaaagaaaacatgtctgaaggatctgatgttgaagaatctacctctgaattagattttgatgttatagaaaaaaataaagcatatcaagaaatgtttgaacaatagagttacatggctaaaaaggtgaagaaattgcaagacataaacaaagaatcagcagccaataatatggacctagacgaaaaagttaaaaaactagttcatgagttgaagagtaaggaaagtgagatttacaagttgagtgctgaacttgttagagcaaaacaatctctaggatttttacctcccagtacaacaactcacaaccaaacatttcagctccaaaagcttatagagataaaacatctattacctacaaaatgttgtacaagaagggactagacttgtcaattgaagggccagttgagtttgcattaggtgccaaaccgtcatttgttattgctgttggtaacagtagcaaagatggatttgaagaagcatcagttgaagccagtgaagctaaaaaaccaaaaaggccatctactggaaagagtgcagacatttcaaaatgatttgtccgttacaagcacagaaacactaggggtaatcgtgatagatcactcgaattcttggatggctccaatccagaagtacctagaatcaggaatgcttcttgttgacagaacaactgcacgaaagatttaatatcaggccccgaggtacatgctcatagatggaaaactatacataaaagggttattaatgccatacttaagatgtatagctagaaccgagataaccactgttatacatgaaatacacgaaagattttatggagatcatacattcaaacctagtttgtataagaaaattatccaccaaggatacttttggccaactataaagaaggattatatcaaatgtctgaaaatgtgaacagtgttagtgttattccaaagttcccagagcttcaccaacaaccttgatgagcagtctgtggccttttgttgtttgaggaataaacttgataggatcacttccaactagaaaaggaggagtcaaatttaccattattgaggatgactacttcatcaagtggttagaagttgagcctatgaatatgctaacttccaagaagaccttagactttgtcatcaagaacattgtacatcgttatggtcttccacacaaaatagtgtctgataatagaaaata

SEQ ID NO: 225944 - DNA, 3097 bp, Cannabis indica
tctttctccacttcccgttttccctcatttgggattgtctcatggcttaaatcgaatttcactgggcttcccacctgatttttcgttctcccagtagctttctttcttcctttactagcacaaattctcttgctctgcctctgtttcgacgttgaaccactatctactccccctttgcttccagccgagtaacaggcaatttccaaagaaggcaaagaacatgatgatttctcagcatttgggctttggactataggaataacccattcagcagcctttctcttcttttgacccattataataggcccattagaagccaaggtaatatcattacaggtgatagtctgttgggccgaagcattcactcccttggaagggtccattatctcatttaccacctcaacaaggcctttgttaatggcccattcgactaaagtgggctcaggaaaagaatggggctttctagacttacatacctcttcatgtggtatttctaccatttggtctctggtgggctctatatcagccataaaactcatgatcactccttcatctcttttgtcattgttaattctgttcatgaggtgggcccaaggtctgagtccccttttctctccatgcatcgtactagtatttctcaaataggagcaaccatctaaactttggtttccaccaactttcttaagcttcagaattttcccttctaagattgctgctgcctcattgcttcccacttccccaacgttaatctgctgcattgtaccatggtctgcaaccatagaagggtcattatcattagccgaaatgactttcttgcccttgtccatctttgaactcgtcggagctctcgtcggtctactggtctccggtcttcctcttcgtagctgcggtaaagctgagtcgaaacagctgcgaataggaacccctgcctttatccacgccccatacaaaggaactgctttgccaataggagggaaagcaaattctgtaggtttttcacatttgaataaatggcctaccattccgcagttaaaacaaatggtcggaagcttatgatacttgaattgtatccactcctttctatccctcgaaatgttcaaataaaatccggccactagcttttgatcgattcttaagtcgaccatgaacttgagaaaccctctcctcgctattgtacttcttggagcacggtcgaagtctatgtagacgccaacctttcttgccactacatcattgttttcccacgtaagataaggggtgggaagcccatgagcttctacccaataccttgcttccgccatatttacttcttgccatataccattggctggccaatctctgatgtttaaaagcaacccgtttaccagccacggtctctgcttgaggataaagcttttgtcttcctcattatcaaagaaaaaaccccatataccatcacgggcacttagagtcttcattttccaatttccttttaaacgccatatcccccctagtatttccttaactttgctcttggacaggctccttcttccaaagatttttgctaacacgcctttcttaacgatatcatcactaagctcgaagtccgcttccagttccatggacatggaatccaagaactgttgtcgaactgcttccatctcagcatcttcttcattcactccgtcaagagtatcttcgtgagtccccgtcagtgggcttgccaccacctctccatctaagatcggttccgtcatctccacttcccttgaaccacccgtaggatgattctctgtcgtctcagaacacattcctctatcttcctggccacccttctccataaggaataactgaactaaccacgaacaatatcgcagatgcctctgtagtactaagaaatcttagaaagttgatatctcaacacctcaccatgggagcaaaaaaagttctataatacttgctaaaagtttgttagttttgttattattaacactagctcgtcttagttatattattatttaactcttgtgccatttgagttcatttatcttgcattactggaaagttgtcttctatgttgtttatgattgccagcaatgtctattattcaaattactctaaatgattacatatatggctagatacagtatatattatgtatggtcatacggttcactatcaattatatcttggtatttcattcttttcatatatgttttctttctataatgtaacaatttgcttcctactttgttaatgaataaattattctttccaaaataattatcatggctttgtgttctatgttcgtactagattttttttgagttttattatgatcaatcccattgatgagaaaaaaccatagcgagtccttgtatgattgtatcacatcccttaagaggagaatcttatttttacaaaagttgacttgaatcatatggattatattgactttggtaccaaaagctcataatttgtattcttaacaagtcaactcaaataacttatgaaataagcacatttaaattagaaattttaatacttaggatggacacttggagaatttcctagtgattaagattcaattaccatgctctattttctcattattaagagatgtttgttctagtgggaggtaattaatatagttcctggctgttaattaaattggcaggagcgcaagataatgacccagtctaagaccagttctttcgtggacatgattgatcttagataaacaaagtgagctgttataatcacagatttgatatattaacaaatgaactttcttaatttatcttcttttgtgcccttctgcttctatattatttatattttgtatatgtattccaaaatgccacatcagaaatcaatagaaaatgaaaatttacaagttgaattcatgagaaagtatctttatccattcgaagtttctattttaagaaatgtggagcttgttttagcctttagtataccaataatataaaaatgaggctttttaacttgaagaaaaatcatggaataaataatgttgttagaagtaaagtggtacaaatatgacagaactggatcaaaattatttacaacagatctagtattttttattattattatt

SEQ ID NO: 225945 - DNA, 2697 bp, Cannabis indica
aatgtgaccttaaggactattgctgctatcttttgtggttggggactaatctgcatcatagtgaactttttagggacttttaccccaaatttccctaaaaaaaaataaaaaaatccttctctctctctaaacttgagcttagctccaatggcggtcatggctactctcagcaaagttctatttttttgagcttcacttccgccatttcaatcctctatctccaagaattatcccaagcccttgtatgttttgtttatacccaaagaaataacgtcgccaaacccaaactctctcgcactctccccccgccaattccctacagctctcttctctccagtttgtaaagttcgtgccttttgcttctgggagagacaaaatccactgagaccgaagaaaaaggagaagttgttcttaaaactcaagttaaggttttcttttctaaaaaaaataccctataatccctctttccacacattttcttttcttcttcttggttgtgggagactcgccattaatggcagcgagctaacattggttgtgagaggggagattcggtgagtcactaatagtggcggaatagaaaaacacaagggagtggagatctagttcttcctcaacttttcatggtcgttgaagctagaaatagccctcgtctcctattgtgggagactcgctattaatggcagtaagatggtggttcctcgagttttcatggccgatcgaagaggacggcacgctgaccaccgttgactatgtacgatgttagtgatgaaggagacaacgacttggctgctccccattgttgtgaattgagctttgagaaattagggtaaaaatgtgtgaaaagagggatcttttctttgggtattgaagaagaagaagaagaaactaaaaagaacaagtaaaaagtaaaatgtaattttttaattattgttttatattttttaaatgattttttataatatttaaataattaacattatgtagacaactaaaaatgtgccatgtgtaaatttttacactgtggcatgtcctacttggcacttaacagaggcttgtggacagaattgtaaagagtaaaataaagtatgagtttggtaggttttgtcatcaaaaaatcaattatgtagttaagtgttacaaatcgtatagttcgggtaatttttcagccaatattcttttttttttttttttgcagcaaaaatatctaatgcatacttctattggtatcgattaataaccactctaagagagttgataattactaaagaaaatagcagtaaaagtatgtaaatatgtgtatggatcgggctagcccatattttgaaaaaaattcgtaaaagtatgtgtcgtatcgtgccaacccataaagagatatgggccgtgtcgtgtcgtgttgtgtcatgccaatattttaaaagattagcccctcatgatccataagtctatattttcgtgtcgtgctcggacttgtgtcatgcattgctcaagctgacctatttttcataaatgggtcaacctattttcttatatgggctcaaatttagggtccggttttctattatttttttacagttaataaattaatcactaaattatatatattttctattgtttgaattgtttttatataattttcaacaatactttgttagaatattattcatatggaaataaattatttatctgatttataaaatataattaattatatttttcaaaatattttaattatggtaaattaattatcaaatatttcaattacctgatttaatttcttgaattagttgtcaaaatattctgataattaattgtgtcacagatactaatagagtatctcacctataaatatagagtactggtccccaagttcagtgctcactttgtaaaaaatagtatctaagagagttaaagagggcttgaaagctcaaatactcacactaactaagttttcgtttttctttttgtagattcaaagttgatgtggaatcaaagctcaaagaattaatgactggaggtatttcgatcatttattcataatgcgtatatgttcaatttttttttccttttagctatgtctatacgctttttttagtgattgaaaaaattcgtaactaaaagtattttttatagtagtatagttgaaccttacattttactaaagttcaaaattaagggggaaaatttaacatcactaatagttcaatgggtgtgtttttctctgcaatagttgaaatgaaaatttatctatttattcaaaaattaataacaattaaataattgttaccactaagttattcaacaatcaaacattttttttaggagtgattaaaattactttaagaattcacgatgtaaatattattggtcggtaaaggatagccaaatgatatgcttagccaaattcaaggtggcaaaaaaaaatgtcagtccaaattaacgaaaatcgcccccaaaaaattaaacaataaaactatgtaaaatacctaccaacataagtaaaattaaaaattaaattagtacactaattaatatagtacgtagtaataataaaattattgaaattcttagaaaaaaaaataaaaacaaaacatattcaaatacaaatgtcacaatcgatcaatataaacaactaccacgtataacaaaaaaaaatgatagttaaggattttagtctttgaactttttttttttttt

SEQ ID NO: 225946 - DNA, 2118 bp, Cannabis indica
aattcaattccaaatctattcaatttggtaataaatatctaattactttcccaaaatagcatcaaatcacaaaaatccaaacaacttagttaatgcaatgaaataaacaacaaattaaacttgacccagataataataactgaagaaaaaaccaaaaagatgaaaaatttcgaatcttgcatcagattcatgacctgggtcactccatttttagctcaaaagctcacattaattaattacctgtgccaatcaagaccgagcacagcagtgacgaagcgaacagagagagcttcaaagagaagagttgagagcatgaagatgatggaacccaaaaatggaaggactgagcgaaactctgaggaccagtgtttgtagaatggaactcgagtgatggctattagagcgagtacagaccatagaactggctgtagacgctcgtgccatgtcggagataggtggcggaggtagtcgatggctacgtaggatatggcggcgatgccaagccctcctccgggcctcgccgccggccaccgcatgatgacacgtgtctgtggcggtggctctgtgtgtttgtgtgtggtttttcagtggtttggactctgctcaaagaaaaagtaggaattcttcttctaacaaaggttggacttattttgattggaaggaaatattcttttctttttttaaaaaaataaataaataaattagatttgaaagttctaatatctccaaaagctaagtaattgaacttaaatgcatattacaaaaaaattaagactagaaagttaaatcaatgaatactagatttataagttttctcttcattggaaatacattccaaccgagtagtgtttgggtctccaagaattaggtaaaattacatccattataaaatcaattcaattacatacaccagttttgattttacaaaccaaactacataatctgaaatgactttacacgatgttacctaattcttgaacacagtcaagacaacaaatctaagcactcctagatccaagaagacaagctctccttgcttccatcaagctgaagatccttcagtagttcagtctgaactcttctcagacatcacgaactctttcttcaacctcgtgaagattcattgaatttttatctgcagataacacagaatcaccaaagaaatattttgccctagcaaagcaagaatcaaagacgaatctatcaaagatgagagagttagttaaaaaaagccacaaaagaatattatataccaactgtaagagaaacgaccaactaactaactaccacaactaaatccagctggcactgactcatactagaaaaaaatataaaagcaactaatgacaacttagatggtcaatgtaaagaaccaagacaacaaacaatgaaaatctgaaaactgaacagataaggaaccacataatttgccatacagaaactattgcacttacaagagtgattgatttataattttttatttttatacttcaaaatagtttttttttttacggaattctatataaaaatcttcatagcaactaacggagcaatctaaattgtaacaaaaatctacatagcaacccacatagaaatcattggagaaatcaccaaagtaacctaaatcttaaatttgaaaaaaaaaagttaaagaaagttattcattgataaatatataatttttttgtaagattaattgataaatattgattacaactcttttttttccctttaaatgaaaatactttttatagatttattttgtttagaaggtatatatccctaaattaatctcataaatacgaaataaaaattatgataactgtcatgtttttttttagtaatttgtgtcattcatatgtaagtttaactttcgttgtaaataaatatttaagtttaattgttgggggtaataatacttaagttataattctaaaattttggtaggtacttggttgttaagtgtcaagtaaattgccacgtgacaatcccggattggttcaggttattaaatttttatttttatttaaaaattaatttacatatactaataaaaaaatgacatgtggataatgacttacatttaacgactaggtacttacagaaattctacaaata

SEQ ID NO: 225947 - DNA, 6145 bp, Cannabis indica
taatcggaatgctttaagtgaccatattaccctaatataatataatatatataatagggtatataatatttggtggcaaaagtgtctttttatttttaataataaaaaataaataaaaaactaaaaagtagcattacccgtaatggtttatacctgaagaaattgggaggaaaacttctcccattcttttctcctaattttatgcctttcccttagagtattccaaccattaaataaagtaaacaaatgaaaaggagtgagtaccatacctatcactcccaatcctgattagtaaacagagtagaagagtggacaaccaaggatacgtgtcgcatgagggaacaatgagttggactgggccatttgatcaacattttaagttggactttaaaccttcaaaaatgccaatttgtttatctctattccaactcctttctcgtcaacaaatttatgaaaaatacattttatttctgcaaaataaatataaactaagttaaaatcagatacaaaatattttacattaattacataaatataatgatttgaacttaatttattgagcacttaagaaagaataaaaatgtatttttcactaccaatcaggtgctttggatccacttccaccattctccactccgcctcgtgttggatcgtcatcttgttgtcgcaagactcagaaacatgatgatgagaacattactcgtgttaaggaccatagatattttataattgactttcaaactggaataatatttttctcccaaacttcttttaatattttactgtagcacttttgtttagttactaactttacatcttaaacatatttttatagtagttcaagcgggatactatttaattatataagtgaatacagttttttttttttttttttaattttattatgtttctttcaaatataatttaatatttaaaattaatattaaaataatattaaaaattatttaagaataataaactatcaattttttaaaaacaaaataacaaaccaagcttttaccgacaaaccattgcgccgacaaaacttacccatccatcaatagaatatggcgggtaagggttttacaggaatattccaattaggtataaatattttccgccatattccaattggcagggtaagggttttacatgcacatatatgcaccgataaaatttttacttgccaaataaaatatacacgcaaactttttactggcatagaatcgcactagcaaacccattttaccaaccaatgatcagatttagccatctattaacactgacatttgaatttttgccagagcataaactgtcagtataacctagttttgatgacacatttggctattgcacctgtaaaaactattttaccaactgagtattgcgggcaacttttgtcgttgcatttattcactaataaaagtttgccgacgggttgggcctagtcttaccagcataaatttaagtcgacaaaagtcttctttcttgtagtggaggttgagtgagataccttcatttgtaggggatcactaacaaaccatacgcctatatatagataatgataggctagggtttggggaccttgcttttgagacccctatatcacttctgattgacatggccacatgcttactgcatcccttgatgttcttctcccttcatcatctttttctttcacttgttcacactttgtcgacaccaagcctccatcatacaatcaccattgatctacacacttaccaagaataagagaccattctctattcttgcccccatcgctttattattcccaagaacattaccgccaccattattatcaagtttatgggtatttggtctcccatgagccttttattctgaagcttcaatttatatttcacttagaaatctctagttgtactattgcccataaacttttgagaacataacttttttgtgttggaattaattaataaaagaagtagacgtagcccctttctatcgtgatattggggtgaactactataaatcctagtgttcctctttattttgtgctattttttaagccaaattgattcagcatagtcctcttattttttacgatcttcttagataagttgacaaaaaatcgcgtcgatcgcgtcaacaatctctttaacagatcccaagtatgcagaaaagataacacttcttttgacaaatcttcttctataatattgcaagtggtttaatagaatgcactattataaacattaattctaggttccttctatctgggataaaaaacatggcccgcgtcactttctccttggtataatctcttgagtattttatgaaaattgaaataatacaaaattctatttagtaaaaagattaactctcagtcagcacagtacacacttgcactattatcatttttactctggttcttccttccattttcttcctcaacaaattatcataaaagtcaggaaaagctttacttacaacaacctgattataaatctagttaccgtgtgttgaccttgaaaagtgatcaactgacagcggagtcatatgtatctgatgctagtcatgtgttacacaaatagaatgaaagagtaaggaacacaaagatttattttagaggttcatccccgtttgatagagggaaatgacctactcttttagttgtattaatactgagggttaatactatttagatcacgataggtgggatctgatatagcacccttatagatacaaagtaggaatcagattggcaaatctcaagtgatgaaagtgcttgtatgggtttgtgaaagacagtggagaagagtgttatcaaacttacgcttagagcttagaggctagtatcaggcttaaattgaacttaggtttctaggttagagttaaggcctttatataggaagcctaaaaccctaatttacaacttgaaaccctagatatatgtatatttaattaattaattacaaaagaccaaaatttccttaaacatagatattatttagctattctactgggcttttatggcccagttcgtagcccaaactatgttttacacatgtggaattgcacaaaaaaccatacaggcctttccctggctggccgaacccctgtagggagtaggcgggccagccatggttttttctagaggctggctggccctatggccggcaagcttttaggaggaagctggtccgtcatttggtgcccgtttgagtgttggggtccccatttgctaaggtattaacttgaccttcttattggttagttctactgccatgttgcactaattttttttcatgtaagcattgccacatcaggaggataaaatttgggatatcattttcccccaagtccctatgcagacgtgtgtacggataggacttaccagctatattggtgtagttagaactgcagtagcctttgttaaataaaagttactacatttttagccttttgaaatacttttcctattctatctaatcttattcgctatagaaaaataactgttctaattgactctttgatttttaggtgaagtaagtgaagaaagggtcccacatgtagtatataagtgctttttggggtggaaatcttttttcacttttcccttattatattttactttctctcaatagaaattttcatttgaagaatctcatccttctctctatagggcctaaccatcaacaacaattctcttgagatttttatgtcattttgacgatcaagacttcccacattcttcctcaacagtttcttttagtgggtaagctttctattcccgctatttcacttaatttggttaattttgccatgaatgtatgaacattatttcttgctttgaacaccctttgattcctatgttagattgttgtcttttcattattttgatctgcatgatagccttaggatatgtaatgtgttctttatagatgaaaaatatgaatgggaccttcattgtgattcttggctctttgagtcatgaagaacacgaagatcatgaagaacatttttgagttcttaacaaatcactattttagatttgtcccatccttggttagccaaggagttcttgttcaagacctggccgcccaagggtgactttaaagtggtctaaccagcctatctgtggcacatgggttcttggccggctactaggctagatcatggggtcttgccggccactacagcttggaaccctggccggccaaggccaaggctccaagggggcagccagtttctttccctctattgaccttgggtagggtctcgtgatggccttggaggcatatacaactgttgccttatgcatggttccccttgggaactctgcataaggctcaatagtgactccattatagttaattatataacttaggacttactatgtgtcttagttagtgtacttaagagaatacttggctgataattgaccttgtactttgtgatttaccttgaaggtacccttgggtattgttgggtacaatatgtttgtagctttgccaagtttctcaccttcccttatctcttctatgcaggtagcattaggtgtttgataagggaggtaacaaccacgtaggtcccttatttattctgtaattatggctagaatgaagtagacttatcgtaaagtgcctctgtgcgaccccaatgtagtcagggtggctataagaggtcgggttaggatagtagaggaggccactcagcctcatgttgatattgatctagagaatgatcaagggctgagagctctgatgttaagtttgatcttgaggaggttgtgccagataggaggaggaggtacatgacctgtattttcctccttaactatcccatgggtctttatgacgctgatggcaacccactaattaggcttggtaaaccttcagtgcttggcttggatcatgttttgaattagtcttctgagcgtggcatgttgaacatgggaaatgttgccacaacatccacactttcgggacatcagtgcttactttggtatgtgcctgacacaaatcaccctaaaaagtatcaagtacctttcagtgatatttattttatatatggagctagggtggcctcaacctattccttatgagatcaggaattattttgatttgaagtttgcgtaaaagtagaacaggactgtgtacttctacttcagtcagatcggtcactagtgattgggtgataccaacagtggagccatgtcaaaagtttgcaggtacgccaagaagtatttcattgcttatgtcatctaaaggattggacactacgaattctgacgggtaccattcatcaaatgctctatccccacattgcaaatgagggatagggcaaaccacatcatgtctctctgtgtggagtagagaaacatactctggttgaccagtgtggccaactacttaaagtatggtttgtatcctcttgcttctagagttgtgggagtcccagttgcagagggagcttgtcttggagatggacaagttcttaacttggatgatgatgtacctttgtctcacataacacagaagttggagaggaaagagaggtccctctactaacgcttggccaacaggggtcaaattagtgatgcttctctctggatcgggcctagaggccaggcttctaagggacatgcttgccccttggctacgtctagagataagggcaaggcattttgacagttcctcttctgagggtgatggtatttgatagttgataacataatcttttatattcttgtattgcatggagtgcttatgattgctttcttactttgctactttctttttccagatatatcttccacgatgagaggtctcaccatgggagcatcacatgagcccacgagatgagtgcgggtcaaggtggcccagacttctcatggcagaaatgctgttggatcgtctttgcctcccctcaaatagggcctgcaccaattgggtagcctgtgatactgtaataccctggatttaagaaatagattagcaaaaccctagttagataattatgaataattgaagaattatattattatatagttcaatatatgtgaattaatatgatttataacatgttaagacctcgttggtgacttaggggcattatagtaattgtgacccgagaggggtaaaatgatgaaattaatttaatt

SEQ ID NO: 225948 - DNA, 3650 bp, Cannabis indica
aactttttaaaattgtactacaaaccgttatatattctattattactcttttcttattctgaacatgatatgaaataagattgaaaaacaaacagatcttatgagatagaatcaataatatttttaaggtgtattagaatcttcttccattaattcaaacatagacaagagaataataataaaccaacagacccaatacgaaaaagaagaataaagtatactaccttactcatgacaacttgaatgtaaaaaaaaaaaaaaaaaaaaagatgaaacttaaaaataatatcttataaaaaagaaaaggtagatgacatacttattgataatagagatatctacctaattttctaatggctttctcatcatcctcacaaccttaaattaatattccaataatcaaccttacattataataacatatccatttgaaattgtgatatcgtattattggatggttttaaagagaagaagaacacatgtatctcagctttaatcaaataatatactttaatggcataatttacattatgtcgttaaactatcataaaaataataaacagtaaagcaatgagagtagagaagcttataaggaagaaaaaaatatgcttagttctagtaaattaaagcttttttcaaacatttcttatgatttatagtatacctaacttctttgctaggatttccactataactacttatcatggaacaaagtacttggatggatatattttgtacccactacatttatgatgatgatgatgatgtcatcatcatcagatatattattgagtcgatttcgccttgaggaggcaatgacctactttttcttactaatcttgatgtaacactattactttatgtgatgtagtcctatcataatcctctaccttttattatgattattaaaatatatgcatggtagggctatttggggctttggcctaattaagaatctacatagctagctagcttgtttttgaaagctaatcgacattaataataatattgtcttgtgtcaagatgatcaagatttgagttacatctaacctaattaaggttattaattagattaattaaaggaaagacaaaagataaaacgtaatcaagggagctaataactatagatcaaataaaaccaggaggtagagttataaacacctcttcatgcaaatctccatggagaaatgtattgttgacatcaagttgatgtaaacaccaaccctgaatagcagcaagggcaagaataagcttgacagagacaagctttgtgacaggggcaaaggtttcattatagtcaattccctcttattgattgtatcgcttggccccaagtcttgccttgaatctttcaatggaaccatcagtattgtatttaatcttatagaccaacttgcatcctatggcatgttggccagcttgtaaccacaaccgggtaccattatcttcaagagctatgatttttgtatccattgtattatcccatactggtatgcctcaagcttggtgaaaaaactttagttcaaagttgctagaaatagctagcatagttgctcgaaaccttggtgacaacctgctgtagtcaattattttagatagaggatgagaagttgatgactttggtacctgagattgcacattattagtagaaagaaagcaatgatactcttgaagataagatggtttgtctggctagttgatctagtagtaacaataggttcaggcatgttaattatgtctagtttatgggttcaggcatgtcaaaacgactgttgctatgattgtcttaagtattaccagcaaattaccttctattgtcattagattgctgattagttttagtttgaggtatgacaattcttctctgtttctccttttgaattatgttggcataagccttgttcacatttggaaggggatcttgaagcaagatctaagatctggcacttaggtaagactcatttaggccaatgagaaattcaagcactttgtcttcatcttgatactcctgcatagttttcattgtctcacaagtacaaaaaggttatggcctgtatttgtgtagcagatcccataaacccttgagcttagtatagtatgaaataacatcacttgatccttgggttagtgtatgcatcgatattaccctacttatctatattctaagtatgtggtcattacaagaaaggcgaacaggacagacctcaccctggtcctcaattttctagactttgacatctccagcaacatcttcagtatcctcgctcggaggcctagcttgctccaccccatccatcgtgaatagccgagcaaagtgagagttggactctgaagcctttcttagggtccattttttctttgtcgtctttctacgtttggacgattgattcagatcaaaagtgtgcctcgcaatggtaacaacaacgtctactatgacttaataactgatcgatggatttggtcggccttctagtagtgtatcaattgtaccaggtcggaccttgtacgtccacaaaacaaggagatagcgtctccaacctttgttcaattcccagatgaattggttgtagtaaccttctccacttatctggtcagggtaccatggatgttgtaccatgggctctgaagacttagagtgatcactactaactttgcagtcatcaaagctggaagttgaagagctttaactgcatgaagacgagtcagcaccgagtcgaggatgaattttgtaaagaagttgaagaagatcctagtcgatatgatgttcacctccctagaactcaccagggttcatctacaaaagaagagagacaaaaggtgagagttggacggggaagagaaggcaaaacatatcgaatatgccgaccaggttaatttgaagaaaaaagaagaaatttcaccccaacaatgaaatccccgaacttgagggttcaaaaagaatgttaatattcagaaacttataaatgggtaattttaaataatttctggccaaaatagctagtaattagaagcctacagaatcaacacgtatatcagtcaaaagttaaaagacctaatgagatctcaaatcagtcaagaacagattcaaagacccaaaatttacagcaaaaattcaaaaaaaaaaaatgcatgtattcaaaggaaatcgcataagaaagaaaatgagataacttactcattgttcgtaggctcctaagtttgttcagacgacttcagcaaatgatttccagcaaggggttctttgaagatttgagaggaaaaagagaaatatttgctctagttatacaagaataaaaatagctaaaagagttaaaagaataatttaaaattcaaaattttaggttttcctcccaaaaagaaacgttagtacttattgattaatagaaaagtcacgcgtgcagtatcatatagctgtcattgcgtgactcgaggtatagctttcaaagcaaggaattaatgcatgctctagagatcaaatggatcttcaatcagtcgtgttggatgaagggtaaaagtagggcatgcatcacccatccgatcagatcatgattgataagtcaacacgtgcgaccaaaaagctcctacatgaatttgggagacaaatgctatctaatttataacaaggtagtgtggcatccacttgggtgaca

SEQ ID NO: 225949 - DNA, 1593 bp, Cannabis indica
atatatatatatgttataatttagtgacatttggcacatggaaattaatataacatatattatgtatatcccaccaaaatgatctcactaatagattgtattactcttttaacactttgaatgttattagaattttagaaaagatggtattgtatttttttttttttttcaaacatcactaattaattcatatataatttgtagaattttaaaaaatagcactcattaattcaaaagtaatttataaggacattgatgaattgtaaatcactatatatatatggcttattgcatcattgataagtgtcactagatgatttattatatttatgaaggtttaatttgctgatgcagagtataaaaaagaggagattaagaaaaaaaatttggattcaaaattttcaattgcaattgaaatattggagaattggtactatgaccaaaattttgagccctataagaaacttgctacaacaagaccaagcaacaagaaatagagagaataagttgttatttgctcgagtgcttttgaaagtgaaattgagtcaacacttgcctcatgagattgaatttgtgaaggttgatcagaaaatgaaaatggcttttcattatgattggaggcctatcctttgtgaaaaatacaaaggttatagacacatgatagaggactccaagaaaggtcactacaaaaaagactatttttagtgacaactttttagtcacaacaaaaaaaatttgtaactaaatgtgacttttagtcacaacaaaaaaagttacttgtgactaaacataatatttagtttcaaattgtcactaatttagttttagtcacaacaagtattgtgactaagaacgcatttagtcacaacaaattataacttttgtgactaatacttttagccatgaactttttagtcacaatgtaggaaatgacaatttataattaatcacaactttcttattttattagtcacaaattttgttgtgactaaaagtaagatttttgtaatgggatacgattaagtgggttgctaagcctactaaacaagttgaaaatattagctcaaaggtagatactaaggctaaggggaaatttgaggaggaataacatgcttcgactcctattaaggattcgtttcaggttctaaaggagctatctggagggaaaatccaagttggaaaggttttgtgtgatctaggagttactaaggatggaggggggttcctctgatcccacatggataggatccttacttggaatgtctgggagattaatgcccactcgagaaaaaaaaaacaagaagtgaagaggttcttctaacctaaaaatgtggggtaattggtctccttgaaacaaaagttaaatcctctgaattaggggatttgtacctcaatatgttccccaagtgttttactaaaaatctcttttttttcataatggtcgaataatgctagcttggaaaggttactagttttattgttgatatagaaaaaggttctagtcaagaggagtgttacttacaacctcttattacaaccttagtcaacctccgcgtccgaaatcacatgccaaaatattttttttcatagcgg

SEQ ID NO: 225950 - DNA, 1285 bp, Cannabis indica
aaaatttgaagactttactttttcatgcttgtattatacattttttttgttcttgtatagccctaaggccttttaatttgaactattgaccgacaaacggtctttaatcctagttttatcttcttttggttttgaatatatatttgactgggcaatctttaatcccagacttatgcattttatgttcaccttgaggctttccattcacacatacttaagtttgtttgagttacaattggatttgaggtgtaaattatttttatttactgtgaattataggttgagtttgttgttgtagcttgagttgagtgagttagagtttaagaactcaaaaaatcacttaacaatggtgattttgagtaaatttttattttgaatgtttggatatgttgtatggatgatatagaactgttctttgaagtttgtgagcaattgattaggtttagagtaagtttttggactttgaaaacctgaaattttttgagtccctactgttgtgaactagaatttcggatggtacagggctataccaactggaattctgtttggtcagttttcaagaatcgctgatttttatattttggccgtaacttttcactcaagtgtcaattttagacattctatataccgtttcaaagcttatgaagagctctataatatgaagcataagttagagctaaaatatgtattttattttagggtatttttaccacgagattatgtggaaaaccttaagttattttatgtgagtattagacagtattttgaaatagatacttatcgatttaccgttatcgtaacataggacccaagatcgtcaagcagtattctactcaggtcggcccacacacctaaacttggatttgaggtaagaaaagtcaattgtaccactttgcacgactgattaagaaatggtaattgccattaatgtgataactctaatttaaaaccgttgttaggtttcttacttattggttgcctcattaggaaatgatcgtgacattagtgactcgttggatatgagggtcatggatactttattaagtattagaaatagcttgtcttattagacaagtaattgaaatgttaattttttggttatgttatgaataattatttcaattatatgtttaagtgcatgcttgttattgcttaatgttttatattgttcgtaatttttgtatttcttggtttccttgttgagtctttgtgattcacgggtgttatgtggtgcaggtaaaggaaaggggaaatcagaccagccatgagtcagaagtcttctagc

SEQ ID NO: 225951 - DNA, 3078 bp, Cannabis indica
aaacactaatatattgcattcagtattcaataataatcttactttcaaataacataaaaaaaacttagcataaaatttaatatacgtgtctcgcacgtagttttttgctaatatatatatatgttttcttagtttgctacgtacactttaccgtttaattattaatgttaactaataattctatttatgaacttatttggtatatatatatatttcaataataataaaataaaactccaaactatatatgtgaattggtattaaaaacatatagatatatatgactttatagtgtgaaaataatgatgaaatgggtgtgcataaattatccaattcagtaacaatcgactgatctaattacaaccgacggttaaatattggatatctaatagtgattggatcagattcgatattatttttgaatatccaattggatcagattagatgttagataggtatgcaaaaatccaatacgtacacatccaacatccaatcgaattaagtagtattttacatttagtttgaaatatataaaattaacattaaattttactcttttttcttgaattggatgaatctaatccaatccaatacgtattggacttaaaatattagatggatccaattcgataccaaaaatactaagtataaaatattgaataaactcaaattaaatcaataaatatatatgaaaatatatccaacagatagaaccgatcgattggatgactgaaattaattagattgaaacgaatggtaaaattaacatccaatatataattggatcaaatgtaaatagacctaaaaacattaaatgtgatcgaataaactctagtcataatagcttgtataataatataacttatataagtatatatataagtggtagtgaggggatatatatatgaggaggattgccctggtggtaaggaatgatgtgttgtttttggacggtgcatttaattttattttgtatatgtacttaagtttttgtatcttatctcatcattatgcatgttcttccaactcatcatcataacaactctacttcctatttattatagtttttttcccctttaggcagtatatccaacctggttttaccaattgatagagtttaggatgatgatgagtgtgtagtaatcctacatatatgatattattttttcatacattaataatataaataagattctttaacaatagtacttattaacaaatttttataataataattattaaattaattaattaaaatatatgtgacttgacaaggatatttataatattcttaagcaatatacataatctcataataacctaaccaattctttagttaatattaaattcctaaatcatatgtaaataattaatttaaaaagaagatgaatatgaaaggggaagcattaactcaaactcattaatgaagattaataaaatgttatcatcttctaagataactattctcttatgtatttttttttatgggaaatgaaagaatacaaaaactcttgttatatgtttgtgctatacatttgaaatcactcttgagaactaattcccaattcctagctcggttcaaacattaccatgtctattaaactgtaatcagttaggattagtttatgctttgtattttgtctgaccattctgttaacaggttggtaatctgttattaactaactaattggttagttaatcttgaccaacttgtcttttgcaaaccaatttgagaaataaaatcaatctcttctctctcggtttctctcttggtttctctcaatgtcataatagaattatcaaaccctaatatgatagttatgaccgtcctctatgagccatgtctataaatagacttctcctcattcgagcttagaagattagagagagagaagattcattgaggaatgtaattgagatattagtgtatctgatctaatatcctcccaagtgagaaatctttgtaatatgaagaaattttgtgagtgtattgaactgttcgtcacagtttttggtgtaattctctagttgatcaatcaataaagttctcaagcccttagaggttgtttctggccgtagagtaaacaagataacaaattattatcattgtacgaagcacataatatctcttctattcaaactgttttacacttttattcatttatgtatttcattcaattcataatatgttatgcattgattcttatcttgtcattattttacattattgctataagtgttgagatgaattttcacaacaattggcatcagagcataagtttgagcttgtcaaggacggttcaagaatcttgagcaagattaagatttttgaccaactatgacttctgcatgatttgaggttgacaagttctctggcataaataattttggactatggaagattagaagagaaagacacataaggatattcttatctcaaagaagttatatataaaaagtcttggtttgctgtcaagtggatcataaggtacctcaaaggtacaatggacttggaatttgtgtattatgcaacaataataatgaagttattgaagtcattgtaggtttgttgattaattagattatgctgaaagcattgacactaggaggtccattacaggctatgcattcactgttatgggtggatgtgtgagttagaaatccaatcttcaaaagatggtttctctatcctcaatagcaactgagtatatggcaacaacagaagaaatcaaaaaggtgattttaagagggttcacaactaaattagagttcaattctgaagacattgcagtgcattgtgacaaccaaagtgtactacactcgatgaagaatcctatgtttcaaggtcaaaatatatagacattaagctacatttcatcagagatgtaatagccaaaatagaagttaaagtaaaaaaaatttagggaccgaagagaacctaacaaacatgctaacaaagtatgttcttctagcaaagtttagactttgtctaaaacttgctaaacatactcaatagttgagttttgcaagaccagaataactctctatttcaacatagctttcattactcaaaatcgt

SEQ ID NO: 225952 - DNA, 2001 bp, Cannabis indica
ttttgaatttgatgtagcttctttgtttcacatctttctccagtgatcttctccaaaataagtttggttatcttaagaacattaaagtcatcagacacagttacccatactttcaaagcaaagtgttcttcgacagtaacatcgtaatatatattctgaacaagcgtagtttttccaattccgcccattccaactataggaataactgagatccttgagctagcatcattatcacacaataataacttaagaatagcctctttatcaccatctcttccataaacttgtgaatcatctaacaaaggagcatctgatctatgtaaagatgtttttgggtcaacccttttcaacccaaggtattctgtttgttctaaaagatgtttcagagtatcaaggatctcttctatttcagatttcacagcatttatgtcaaatggattattaaagacaaagctcaagggtggcttacttgctgctgtgctttccagttcatccttctccaccttcagtcgcagagcttcagtgctaatcttgtccatgacatgatctgcttcataaagtacttcttttaactcgtcaagccaattcctcacgttgttgtctccaagttgtttctcctcggcatcattcaacaacgcattagccgaaagcaacacagtcttcaactttttgagcagcttctgattgagtttgtcccctccaaagaagcaaaggacgtctttggaagcaatcctatcaaagaggacattgatgaaaccagagagaagagctcctcccaccattaactcagccatggttttcagtttctgaagaaaaacacaagaaatgaatacacaagaaatggagaatacacagaaaatattattatttatgctaagaatcttttaatggagtaattgtaaattgtatttttcgtttaactaactatttttatattttaattaatatttttgaaagatgttatatgcacatggttttgctttggttcttgcaaaagttgtttttttttttaaaaaaaaaatcatcttttgtgaaaaaccagattccattcttatttatttattactatataatctctatccttttttgacaatattatatatacatatattcatcacttcaatgtatagagaaaagttaccaatggtacattacgtacttgagacataaatcaacatgactatttcatagaatcctcatagcaataaaatttgttacatttaaaaaaaaaactataaaggctcgtttggtatgtcttataagagttgtattgtattaaataataaataagagtatatgtttgaataaaacaatgtattgaattaattattatggctaaattttttaatacaatataagttatattatttaatatataataaatagtgatctgtatattagattgtattataatatttacaaagtgaagttaaccccatctccgactcggacttgggatccagagttgcattgtattatttaataaataagagtatatgtttgaataaaacaatgtattgaaataattattatggctaatttttttaatacgatgtaagttatattatttaatacataacaaatagtgatctgtattagattgtattataatatttacaaagtgaagttaactccaatctccgacccgaacctgggatccagtcctgaatctggacccgggacccggacttggacgggaaacccagacctggtcctggacctgggacctgacccgtaattagtgttggggtcgagtgtattgaaaatatattgaggaatacctcaatataatttaggagaattttcatggatgaaaggcttagaggaaactaacacatccaatgttatatgaatctaacatattcctctatataatgttatattaaattaacacttcctattgaatctacttttatgttttattcttagttttttcttctctttcaagataggagtgatagaaattactatattggtatatatatatatagcaagcataat

SEQ ID NO: 225953 - DNA, 1299 bp, Cannabis indica
aatgcaaaaataattgaacctatcacagacataaaaaaatacaattacaaatttagaacaaaaatctaacagaaaagtgatacaaaagtctttaaaaagccataaatttgtaaggcatcgggcccaatcgtatcccatcgggcctaccatcagactcatcagtcttagatttaggtccaagaggaccatcaaattagcatcgagcaaatatcgggcctatcgagcccatcggccctgcccttaggtccaagttgaccatcacactagcatcaagcatattgggccaatcaggccatcatccatgatcttagatataaacccatgtttaaatatgttatgacatatggtggacctggccctaaataattatattgtattacaactaaataactataatgtcttggtgggaactagcagacccaactcatgtgcatttataatgcgatggttatcgactcgactctaatagttggtccttctccataactttgatttttttacatactttttactttatatagttggtaatgtgaaatcttgcttttttccattcttctatttttcctttttatcgtattcataccaaagccatactttctttcttctttattttccagttgtttcaagacccttttgtttgctctggttaaatattttttgaaccacatgtttttgtattggattggatggattattttgatagtgtgagagattttagtaacttagttgtaacaccttgatacttaggcgcgctacaatgattttttaattaatgcgtcacttttgctaatcaaagagttttcctcaaaaattgtgccaaattaaaacttttgatttaaattattaaactttataaacatatatatattttagataaaccaggatcccgtattgaaactttttacaaatattatcaaaatactttacaaacatgtcgcccaacgactacaaaatacagctcaagatgtctcgaacgaacactctaggtcacatcgtcccgacatgtacaatcaccatccaagctcggagctcactcctgttcagcctttgcctttcccttacctacatttgaaagtagcaactgtgagtcaacagactcagtaagaaaaacatttaacaataatatatcaccgacttgtatctaggtgcccattcacctatccacacggcttatcaaataagtaagaatgttctttacacttagtattatcgaccatgatatcagccactactagcgctaagattgtactgcgggcccggtacgtatgttctatatcgctatgatagcatcgataatac

SEQ ID NO: 225954 - DNA, 1901 bp, Cannabis indica
gaaagaaagaagatgagaaagtctttaacaaaaaaaaaatgttaataaaaataatttagcatattttaacagccaataaatgagtactgtaacattactataatagataaataaaactttactttaattacattgacatgtgtacataccaacatggaacttaatttggaagcaactgcttcaatcttctcaccacaacttttgaaactctagaaagaaaaaaaaaaaataagcttacctgaaaattataaagttaacataagaaaacattagtattgaaaaatgaaaggagtaagtgagtataaacgatcaatcttaaacgaaaaataaataatattttactttcatacaatgtttactttaaaattcctactttaccatttgacccaaaactgaaaaatttaaaattggtacaaagagaataataagaattaccagattatgagaagattataatgacagagaaggagatgaataggtggaggccaccacagagtcactggctagaaaatttcttcttgtaaagttagtaagctaaggcggctcgcttgagctactgcagccaaactacgttatttagaaatatgtgaccaaattcttctaccttctcaattccacactcaaaaaactgaatgacaagtaataaaaataattcacctttcggggaagatcaaggacctcatgtgttccaatcttctaaaccaacttatcaataagagtgtcaaccctaccgacaaagaactaagcaacactggttactattgagagaccatttcgcccagaggcctcaagcttattctaatcgtcaacaagcatctatgccaatgtgatatcacccaaaatctaggtttctttcatttttttaatgtagcaaatatcatttgaaatattgacattgcttctttggttgcgcaacttatattttccattgatatatttgaataagttattgattcttatagtgcaaagaatattatattagtatatcttatacctaaattggtcattgtaggtgttagaagataaatttgctttctggaaaatctggtattttcataaattataaaaaaacatgttagggggttgcttgaaacaaatagacgaaaaagaagattaggggtaatcccatcagacaaaattcaataaagaatataaaataattggagttgaccctttcgtcctgtttagatattgcaaataaagaagtgagatttgtgcatgcatgttcctaatcctaagtgaggaacaataatgatagaaagaaggaaaataataaataccattggattgctagtgacaccactgacacccatttcaataagaggaagatctgtgacggttcgacaaaggttatcgtaccagggagtctctcctctcttttgataaaatcatgaagaaccgttttctttattggagttcgattaccatcggattgggaacatctgaagctacaatatcaaaataatcacaaaatatgtcatatgtcatcaataaaaaaagactacaaataagaataaaaaaagtgtgactcaatcagagacaaaggggcaaggtagaaaaatgaaaacttacacaaaggaagcgttgagtggggaatcggtcaaaatagaaagcttagaagaaagggtgtggtgtcgaagtgcagttctagtgtgtaggcgatgaagaaaacgaaaaagatatcatgggtgtgtaggccatcgattttacagattctgaaattgaaaaggaaccggttgaacagatcctattctttaggaggttttgatttagagtcttaaaaaaagaaaaaatatcgcaaaaaaggttgttggtacttggatagacaatcaaatcctattatggaggggatcgattatacactaaagattctaaataaaaaaaagttaaaaaattctagg

SEQ ID NO: 225955 - DNA, 2044 bp, Cannabis indica
aaaataatttccaatacatttatacttggacaaataagcaacaaccaaatactcacactcaggaacgtcttgattgggctattactaactctgattgggaatcactctttccaaatcacaaccttcttcatggtgattttttcagatctgaccaccggcctctcattttaaaccttcatcaccaagcgcaatccacatctcccatgccgcgctttattttcgacaaactttggatggctgaggatggctttgatgattgtcttcgcaaagcttggacatcggttcctcgtgtgtctgaatgtgacccaatcatcaacataaataaaagacttgaacaatgctcttctcatcttagccaatggaaaataacccttggtccatccttgaaatacaaaataagggacactcagttgcgtctcaaaactgtgcaaaattgtccccaaccgactgaggctcagcttatgcttgggcggaagctggagaatgagcttgatcaactcttatataaagaggaagaatattggaaacaacgatcccgtgtgaattggctaaagcttggtgacaaaaataccaagtattttcaccaatttgcttcctcaagaagagcaacaaataagatcaattctcttcttcaccctgacggttctatagctaaggataatgactctttcgctctcattattgaacaatatttctcccaactctttactagtcagaatcctagcgatgcactcatgcaccgcattttaactggcctaactgagcatatttcggagtcagaagctgaatcccttaatagtatttatacggatgatgaaattcagagggctacttttcaattggccagtgataaagcgccgggttcggatggttttactggcacattcttggccaggatgtcctccgtgcggctaagggttttcttaatgggaatgctgaccttggagcaatcaataacactgtcattgtgcttatcccgaaacgttcccatcctcaacaaatcactgactataggcccattagcctttgtacgaccctttacaaaatcatatctagagtgttagtgaaccgtctcaaacctattcttagccgcattatctcccctacccaaagcgcttttcttccaggtagactcatatcggataatattatcattgcgcaggagattacccatgccttaacccaccgtaaaacgggtcaaactggatggatgggcctcaagctggacatggctaaagcctttgatagagtcgaatggggttttcttcagaaagttatggaaaaatttaaatttcctcttcgctttatcaaccttgtgatgacacgcatttccacagttaccttctccttttccatcaaccagcagattttagggtcagtcaagccttcccgtggcatccgtcaaggggatccactttccccttatctttttctgctttgctccgaggttttgtctgctatcattgcccaaaacactttgaactctcgctctcataatcaaggtcttggcctgaaaattgctcgtaccgctccaatcatttcccatcttttctttgcgccaagcaactccttctgcggctgcaacaatcaaagaggtgttacatgattacagccttgcctctggccagatggtcaattttgaaaaatcctccctttatttctcgcctaataccactgaggatatcaagcaccaaattacttcccttttgggcattcctattcgtgtctccatcgagaaatacctgggccttccccaatcttttgggagatcaaagaaagaggcttttaattaccttaccgatcgagtctggtcccatttgaacaaatggaatgctcaacacttctccaaaggaggaaaagaagttctcttaaaatcggttgttcaggctattccttcttacgctatggcttgtttcaagatgcctttctcttttctttcgaaaattgaatctatgatgtcttgtttctggtggggaggcactgaacatagtaggaaaattcattggaaaaaatggtccgctcttagcctttccaagtttcatgg

SEQ ID NO: 225956 - DNA, 2913 bp, Cannabis indica
tgtgatttctagacaaaaaagatatgaatttgacctttattgtgattcttggctctttgagtcgtgaagaacatgtttaagttcttgaaaaaacacaagttttgatccatgtagaccctggctggccaaggaggccttgtttgaggtttttctgaccaagggtgattgtcaaggggtctggccagcccaaggggttgtacccctaggttggcgacctatgcctagaattaggattcctggtcgaccactatactaggtcttggggtctggccagccactaaggcctggaactctagtcggctaaggccaaggctccaactgggcagccaggttttctccctcttttgaccttggctaggttcttgtgttggaggcatatacaactatggccttatgcatggtttctcttggaaactctgtataagactaggtagtgagtccattacagtcaattatatagcttaagacttactatatgtcttagtaggtgtacttaagacggtacttggtcaatgattgaccttgtacattgtgttttacctagaagataccattgggtactatttacttgaatgtgttcttaacttcgttaggttgctcacctctccttatttcttccatgtaggtaccactaggtgttgaataagggaggtgacagccgcgtaggtccctcatttacttcgcatttatggctagaacgaaatagaccctccatagggcgcctccatatgatccccatgtggctagggtggccacaaggggtaagctagagtggtggaggagaccgctcagccccatgctgatgctgagatagagattggccaaggagcaaagagtttggatgctgaatccgatctagaggaggctggactagtgtataggaggaggagaagttacaggacttgttctgtcctcccagattatcccctaggtcgctatgaggctcatggtaatccactgagcaagctcgatgagccttcaaagtttgaactggatcataacctagagcagtctcctaagctggagatactagactcaagaccacagggagttagttgggtctctcctgcttctaatctttctgatgaagcctttagcaagattcttgctagtggcttagtaggggatgtctactgcaagattccccgtagaaattactgggtgcaccgacttcttctacgttggttggcatggtctgaatgccatattgaacgtggagcagtgctaccgctttattaatattttttggacatcactgcttactttggaatgtgtctgaaacaacttatgcctaaaagcatcaagtatctatcgacaatgttcgtcttatatagggagctaggctggcctcagcctaccccctacgagatcggatacttctttgatctgaaatctatgttgaagtagaacaggactggatatttttgttttagttagatcagtcaccaatggttgggtgacactaattgcacaaccatgtcaaaggtcggtgggtatgccaaaaagtactttattgcgtatggcctctgtaggatcaggcactacaaattctggtcgatgccattctttcgacgctctatctctactttgcaaataagggatagggcaaaccaaatcctctctcttttgacagagcagagaaatataatccggttgaatagtgtggtaaatttctagagatatggcttgtatcctcctgttcctgaagttacaagagcaccaattgtagaaggggcctgccctggagatgggctagctcctcacttggatgataaggtacctttatcccgcattgtgcagaatttgaagagaaaagagaaggctctccaccgacgcctggccagcggggctccagtaggtgatgcttccctccatatcgagcccagaggtcaggcttctgagagacctactcgccctgtgcccacatctaggggcaagggcaaggctattgtcgaggactctaatagttcctcttttgataatgactgtatttgatagttgataacatcatgcttttgttcttgtactgaatgtttattatttctttctgactttgctactttctttttgcagatatgtcttccaagttgagaggtcttactaggggaccttctaatgagcccacaggacgagtgggggccaaggtggccgaaacttctcgtggtggacatgcttccgggtcatcactgcctcctcctccgccagggcctacaccgattgggcagcctgtgatacggcctgccgactagggtactcggaggcccgacagagcggggtcaattgctggggagagggatgctgaagcaacaaacaagtacatagagagagctcttcctttcacagacgagcatctgaaagagcttggtgatggggggccagacaggctttactctaccggtcttcgagatctttctctggtaagttgtgctttcagctctgttgatctttttggcactgtacaggttggctggccatgaggcttgttgcatggggctagccggccttggatgctgttgtgaagggctggccaatcatagcagtcctaaggggggactggccgaccagtgttgcggtcttgatactggtgttattttgttttgttttcaggccttgatgaagctaagctcagctcattgttaaatgctaaaatattgcatattttacagtgtaaaaatacaaaataaaattaattctttataatattttcatgaaatcaatgcaatatattattatgttgaaaatattttatatagatttaattttgtctttgtttataaataacattagtatttatggaataatagaaaaaaaataaaaaacttaagaaaatgcattatttttatttaaataaatacaaattaattaaatttaaataaatattctcattaaaattattgtgatatattttatgtt

SEQ ID NO: 225957 - DNA, 1915 bp, Cannabis indica
aattcaaataaatcatcacaaataattaattcaatactaataaatgattttcataattgaaccctaattatctactaatttccaaattaagactatgcaatctttacaataatacttatccaaggtgtaagtaaattttatcgttgattattacatcagtgtaaatccagtgcattcatgaatcatggcatataagcttttaaatatataatcatgattatatttcattgtgttgacaacactataatcatgaataactatatgttctagatttaatagaatttatacattaaatatataatcatgtgaaccatgcaacataaaatgatttttgatcttttattaattagtaaatatgattataaggaaatgaattttatttaggacataaaatctaaactttaccttgtccgaatattccagcttattcttctaatcaattatttacaaatgataaattactttggacgatacttgatatagcatactacttgtttaggtcatgatatattatttacatgtcacttagataaatgccatgtcaccatgtgcccattttagaatgacaaataattatctttaaattaatacacctaataaagatataaatatatgtcttattatagtaattcttaacaagaaaaaaaaggttcaattgtataattatacaaatggtaaacaacagcataagtactaaaaatttttgagtttgtaagcgacataactctaatgattttcttttatagcggtataagtatttattatttgtaaaactgtaatttttctctagtttcgtaaatacactctattttaactttatttaaaaagaatttgaaagtaactgatactacatattttcatctaaacttaagagcactcctaataaataagctaaaatagcccaatcttaaaattataacgaaaaaagtacaattttgagcttccactaagtgagctaaaacttagctattatacatatattttaactcaataaatagtacttagttaaatatagaaattactgagctaaaatatattttattattattatttaattatttttacatatgtgttgattattatatttgttttataaaataagtgaaatatatttaaatattatatttaaaaaaaataaagaaattaatatatggtgtaatgtaaaagcagggtcggtcccaaaaatttatgtgcctaagacgaattaaatttttggatcctcactctcaaaaatatatataaaaaaatattaaaatgtgtgttatgggatttaaactcatggcattatataatatattatagggtaaattgcgacacaagtacctaaagttttaagtttataagcggcataaactctatgtttatttttagtgggataagtacccaatgtttataaaactgtaattttcctccaattttgtcagtacagactccgttttgaatttattaaaggaacatttggaagtaactgatactacatgtttatgtctagacccaatgatcaacaatctggaccttatatgtggtatgtttaagaaaataatagagcttctatcgacgaaattagagaaaaattacagttttataaacattaggtacttatgccgctaaaaataaacattgtaattatgccacttataaatttagaattttgggtacttatgccactatttaccctatattatacaacccaactaactaccttatgaatattaattatttataatacatttaatttttcttaaataaaagcctaaagaaattttttattttttattttgggctcccgaaaagtgtgggccctaggaatagacctagcccgcctatgcctaggaccgcccctgtgtaaaagtgtccaataaaattaaaaaaaaaatgaaattttgataagttattttaaagaatagagtaggaa

SEQ ID NO: 225958 - DNA, 4615 bp, Cannabis indica
tttttctgtgaaagaactgtgttgagagggtttaggggttaaagggtttttctgtgaaagaactgtgtttatctttagtagtgaaaacccaggaattgtaaagaaggaagagctgccccaggatttcgccacatagagaaaggggacggagatgaatagctgaacacagaaaattgagatgtaaaccctaaaatcagaagagagagacctgggttttagaggaatcttctattgagggcaaggttcgtactgaattcagttggaacttggaaatcggaagtgaaaaaaaaatgtttcagttgattcggtctcagtgagttgacaggtgtccagaaattactccatctactccgcacaatctaatctacgatcaataaaataccctttctttatttttttttaatttttttttgttgtcttcgaacttttacaatattgattttggcttattcttcatgaatttttatatttacataaatttagttattttgttaagttctattccattattccgtttaaataataacgtatctttgtcaattagtaactttacccttaaattttaataactatgtaatcgtaccccacaaaataaaaaaaaaaagagtcgatattttttttaataaatcttaaaaaattaatttagatcttaaaaaaaattattttaaatgattaaaaaaattaaaattataaaactaattaagcgatataacaaatttttatttttattagaaaatttatttaaatatttaaaaaatatattaaaatgcaatttttaaaaattaaattttacgggaaaaaccttgagtatatttatttttattacaaaatgtagattttttttaagtaacctttatattttttagtttaatttataactttttttcaaaataattttatatttttattgaatttttaaaaaaattctttattttgttaagatatgagtttataaatataaataagtttaattttttcttcaaaaaaatttagtttatttaaattatttattaaatttttaataattttgatttaattttttaagatacatgttgataaataaaaaaaaaagtttgaaatatttttttttaagtaaaattaatattttttaattaatttaatatttttattcaattttttaaaaaattttattctttttttctaaattaatagaatattataattgattttaaagaaataaaatattatcatttttaaattatttttttttaacaaaatgggacaaaattctgtattagttaaagtttagggggtaaagatgttaatttctaacggtaaaagaatgaacctaacagaagggacataattatgtaactattatatttcagggagaatttttaacaagttgtatatttagggggcaaaatcaagtagtgtcaaaagttcaggggcaaaaatactaattattctttttttttcttaaattgtaagtaatgggtaatatgtatttcgaatagttcaccttgacaaaaacaaaaagtatttcggatattggcagtaacaaaagtcagagttttgatgataatcaattactaataaaataacaataataataataaagcaaaattatagagatttggtcgtgtgtgataatacaatagttcttctgaaattatggggcttcgatggtagttcaatattttccttggtacccagacagggatgatagtccgatatgagctcgataagggcacgatggttttgcccgatatatgggttggttcaggcaaggatgatagcccgatatgggtctgatggggcccgattagtagtccgactttgtgatgggtccgattattttccgatgtggtgtctgattgttacctgatttgcagctaggacttaagtccacagatgagggcacgattgtgtgcccgatgggctcaatggggtccgatgcatgacagatttaaggcattttgaggagtttgtatcattttttcgttggatttttgttataaattgttaatagtgttttttaaatacctgtgacaggttcaactgtttttgcgttcattatgtataatggtgtttgggagcttaagggtagagattgggtttataactaggttgaaaatttgacatttgagattaatacgaacataagctactcaggtttggttgatcttttgtacaaagaactcaatgttgacaaagtgtggtatgatttgaaattggaagtgaattacaagtacatgaaaggctggagttattggaaatgataagtagtaaggtcatttttatctatgcttgcgaagaagccagatgaatttactcccttatttgtgactttgttaaagaagaatgtttgtatcgatcctagtcccacaccaagtactgttaaggaactcgtagcaatgttgggagttttgttccgaaaacgaatctagaagtattggcagctgatgtgttacctgaattaaacactatgatgctgactgttgacattatagcacaaatgccttttattaatggtttttgtgatggtccagaccctgaatgctatgttgagggcaatgatgacgtaagagacgaccaagatacagaggtccatgatgctatagctttaaacttgactcgactatcgtaccaaataccacccaagcaatcgacatagaaaagaatgccccatagagcaaatcgctaaatacctggtactagtagtcgtccaaacggaaccagtaatgctagagagacatgctagtggtcctagtgttgctacagggacaaatgatactgaatttagcgatccattttcttctgcaaaagttacggtaaattcaaggagaagatgtttacacgagaagacatcaaggatcatagtcattatatatccatgggtggcacaccaggcggggagttacatctaagaaagttttttagagacaaagagcatttatagatggttgttagcttgtatgcaatgaagaaagggttcgactactttgttaggaagtctggtactgctttttggtacgttacatgtaaggatacaaattgtgggtggagattaagagcgaagaagaacgtgctttctaacatgtttgaggtgactacatttcaaaatatacattacatttcaaaatatacatacatgtttccttgatcttcgaggaaaagattactgtcacgcatcacttttgatagttgcccatctaattaaggataagtttgcaattgatgactcggatcatttggcctctgatataaggaaagatatgcacaaggatttcgggatccaaatgagttacgaaaaggcttggaggtgcagagaaaaggcactacacctagtttggggtacacctaaagattcatactcaaaattacctggttacttgaacatactaaagttgagaaatccaggtaccatcacggattttgtggtaaaggatgatcgcttcaagtattgtttcttctctttgggtcctcgtatgcatgggtttaggttttcccgacctattgtatgtgttgatgggtctttcttgaagaccatgtatggtaggtaaatgctgtttgcagtggcactggatacagcaaccatattttttcgatagctttcgctgtagttgacagcgaaaaccacatatcttggacctatttatgagaaaattgaaagaaacaattggtgatgttgagaacttagccttcatgtcggataagcatcaaagcattgtttatgctttggagatcgtgtttggtgatgcacaccacggtgcatgctaccaccacattattatgaacgtcaaccacaagttcaagactgatgtcatcatgaatcatatttaaacatgtgcctaacatatttaaaaacagagtttcatagagaatttgagaagattcgggcaatgaatgttgcggttgcacaatatcttaaggaaattatatttgagaaatgggttcggtcgtactttctaggggtacattacaatgtaatgacgagtaactgggctgaaaacttcaacaacacaactaaggacgcaagaggctttctggtcactgcttctgtagcattcctgaggtccaaagtcaaacaatggtttgctacgcgaaaagaaaaagctgacaagtggacgaagaccctagcaccaaaattggaggaggacttggcattaaaatttgagaactctcagtatttgaacattgacacatgtgcaccttacacgttgaatgttcaccctggaggattagttgagaccggtgccgtagtggacttgcaggaacatacttgcacttgcggcttgttccaaatcatgaagtttcattatcctcatgcatgtattactgcttagcaacgaagtattagcatatacgcactatgctcgccatattacataacagaatattagaggagcacatatgaaggcacaattatgctagtttgtgacgaggatgattcaaaattgcctgatgacataaagaacatgatagttggagtgcctgttgagaagcaacaagtaaggcgacccaagaagcaaaaggtgttgggttttatgccctaagtaaaactccatttcaatgtaatccagattatttaatatcaataaagtaatagaagtatttttcattcatttgtgtatgttttggttcaccttat

SEQ ID NO: 225959 - DNA, 4082 bp, Cannabis indica
gtctctttttctttcccttttgtaaggagatccttttagcaagatgttgtgtacttcttggtcactgtagaccagaagtataagagcaggttgttggtgaatcgggttggctagggcaagacgatgtggccaaccatattgaggaagcattgcttgggtgattagatgaggccatggcaagccagcatgtggaggtggtggtcggccagaatgtggattctatggctggctagcttactgaggacatggtcagccagccttctaaagcctggttgatgctgtagtttgatcccgcctgcattcgattgactttgcccgtggcataattgctatagagcctttgtgcactcctgttaatagctatacatcttcttttgatgaaatgccccttggtggtgttggaataccacttttgtgtgttatgctatcaggatacgacaccttgtagttgtcctcctagtccctactttatggcaaggtctttgtttggacgtatgttgctgtaggtgtatccatgttagttgtctagcttgtctgttacttttgaaacaataagggcttagttctttgaagaactgagaaggtaccaagtttgccttggttgtcaaggtcaagctggctagttgagcgagtatgtcagctattgtgccgtcattgggggcttgccttctagtatagcctttgaacaatccttacagctccagtaggctatcatcttcttatattgagctgcatattcacctaggacaccacctacaactatctgagagtcgtggtacatgtcaaggtggttagcccacgcttcgtgagctagcttggggccagaatttggaccttcatgttcagccttgttattagaagctttgtatctaaccttgttacctcgtgccttagttgcccccaggtgccttgggggtcatgcttgctttagggaagtggtcaatgcacctctcggattcttgctctcgcttcttctctggctcctacttttctcttatactctaagagatttggggagatacgattagccatgaagctgataagagttgtgcctttggtggccatgcctggttgtgagttgcttttatgttggctgagtctcaatggttcacttaagtagttggtatgatgatccacgtttttgtaaaacatactgtaattgccaatcggtgtacacctttttgaaaggtgtatctggaagtatggccttagctttctagaagccaagagtaagttgtgggtcaacttctccataagtgggaaccgactttaagtgtcaatcagtctcttgctggtgtagtatatagggtgtggtacacgtcttcttctcttgtaagggcagcactcatagcatgttctatgactgctaggtgcacgcctaactgttctttgtcttgggaatttggcaacacaggtggctaagccaatctgtttcttcagcttctagaatgttgtttcacattcctttgtccactcaaatgtgttgtctcttctacttcatggtgaagaagggtacacatttgtctgtatacttggacacacgtcttcttagtgagtagtccgccctatttggctttgtacttccttgattgttgtgggcaacttcatgttcaaaagggcttggatcttgtctgggtttgagcttcttcatgttgtagctggggatgattttgaaattttatgtataggtcctccatatgcccccaacccttttggacttgacaagcacatcggccacgcacgcctccatattgcgcctgataagatcattgaacatcatgaatcttttctgatcctgatctgattgatgcatcttctattttctggctttggacaaggccaagttgtaatagggacgggcaaattattggtcttctttcaacatgctacccctgccttgctgcaaatttcaggcaaggtggtagatgttttacgccttcaacatgtatagggctagcaagcttatcatggtgttgaaagctgagggaatgtcgattacgacaacctgtaccatcaaagttctagtggttggattttctccaacaatgaggggtaatgtgatatacctaacgggtgtgatgcgttggccaaagaggccatacatcacttgattgcagagcaccaagtcagcgagttggagcctcatgttttcatgtgttgattttgttgcatttatattcttgatttgtgacaagggagtcgttttgtaggaaactgccttgggcaggatctcctttccgagagagagagagagtatgggctctccaagtctttgttgcttaagcctcgttctttgcctgccaggaagtcccttttatgctcgtgatggagtgtctgagcatagcgctctcaggctttgttggtgtcactaataatatggggtccgttaatgatgacccctaagtgtcctgccatctgaggtttgggcagagttggtggtacctgcatgtatgcctggccaaagttggaggccaaccttcagagatggaggccagccttttgtctgcctattgcagactcgccctgctgtgatgtttaggtatgcctcgctttgggagttttaatagaagagtgatgaagcatacacacttgtatttcttcttcctttgtcttcatggcataaaaggatccttgaatttccctcttttgtaactatgttggttagagccatcgttgttgcgcttgcctccacaattatcattatttgagaattgatagagatcgtctacattggtcgacatgctcgacattgtttggggtgctatgaggccctgtgtttgttcgtcattgtcctaccctcttgtctgggcttgccaaacaacttcttccagctttaagaagccatcaactcgctcaaggaactcctccatattactcgttgagatcctcctaatatctttcgaaaagtcactcaatggtaggatgcctccgagtatagccatatattggccttcttctgttaggcttgtgaccttggcagcctcagccatgaaccgttgaatgtagtccttcaaggattcatcttgtctttgccttactttgaaaagatcctccagttgagcaactatttgtctcgaagtagagaactaaaaatataactctcgagagagctcttcccaacaatcagatcttccttgggcaagcttgaaataccattattgagctttttcagctactgttgctagaaaaatttggcatcgcatgtctccagatacttgtaggagatctatctggatctcatagtactttaggtgtactagagggtcttccttttctgtgtacatattctgatctggcatcttgaatttgggcaagggcaaggacttgatgtatgctaagaagggtgatctccttgccttgtctagctcgagttctgaaggttttggacaagttaggcccgttagcatgtctcgtatttggtcagactgtgcttccacagaaggatctgttgctgtaaaggcatggttgattggccttctttaattaagctacagcctagggagagggtatactgaaggtcagtcagtcttgagtgtggtgcttgtacatggtcagccaaccctaagctatataagtccttgtcgcccacacttctctaccttgctggtggaatttgtgcattgacatagggtagataacaccaattgctggagtttggtggatctaactgtctgaagtaatgaacatcacttctcaaattgtatttttgggtgtttccacccgctctcagtcctcttaggttgaaaattgaccttcgggtgactcactctccttgggcagggagtgctcttctctagccagccataggaacttctagaggagtctagctggccatggggacttctagagaagtctggctggccatggggactcttgctggtggttgaccacccataggatggacagagcgggttgttgctgagcgtacgatccctagctggccccccatgtcgttggtttccgagatttggacattttttctgcctttaaggaaaggtgtgtcctccctctggcaagggaagatctatcctagttcctaaggaactaggttgatcagcatatcgatagaccctccctgatct

SEQ ID NO: 225960 - DNA, 3810 bp, Cannabis indica
tttatttagggcacaaaacccaacacatgcaatcccaagacctgcctaacatagaagctagtaccataatgtcgaccaggccttcagtattaagaataatggaggcaaacgtaaaagtaatagttctggcatgattggtggaaaaaaaaagggaagtttaacacttcccctacaccactaaaccaaagggagaaggaggagaagtacacatgcttgaccctcctaattgaaagtcctgagaccctttacatggcaactcaagctgttatcccatacaagaaacctcattcaatcaagaaggacatcaacaagagggacatgtccaagttctttcgatttcaaaatgacttcagccatgacacaaatgagtgtgcatttgaaaagggggattaaattcctattaaggaaaaataatccccacttgcgttattatgtacaaaatgaccaagctcaaccacaagctgtccagaatggagacccaatgccaccaccagtggcgggtcacttgggagtcattataggcagaaaccacatagcacgttaaataagcaaagctagggaacgctatgcttggaccctccatcatgagtaaaaaagtgacatcctcactgtggaagaaagagactccaagctaatcaagcttggagagcgtgccatctcttttacaaaaggagatgctgcacaggtcaagtttcctcacaatgaccctctggtcattactacacaaatagggaacataacagttgctaggttcatggttgataatggagcctcctccaacattctttctatgtctgaaaagatggggctccaactaatagacctagcatcctatacacaacttatgtatggatttttgtgccaaggcattgcaccttttagatacatcttactacctctaacaattggagaaagtcccgcaacaagaatgtttgtggcacaatttttggtaattgacgtaccatcgaccttcaatgtaatgataggtcagccagccttatttaacctgaaggcagtaacaacaatttaccacctatgcctaaagtttccaacaaggcatggggtgggatgcctaaggggagatcaaaaatatacccaacactgttacaacctggctttgtctaaagccaagaaagagaagatgtctgccaagagtgggaggcaacaatagatcctcgctttggggatcctgtagaaagctttggacttgtggaagaattagaagaggtggagatcaaccccactcttccaaccaaaaaattgaagattagaaagggtttagtgctagaaataaaataagcattgataaaatttctaagagaaaacctcgacctctttgcatggtcacataatgacatggtaggaatagacccatctgtagtgactcatgcactaaatatagattcgaacttttgacctgtacaacaaaataggaggttgctagataaagagcgtgcgcaagctttgaaggatgaagtcaaaaggctaagcaccaatgaattcatcaatgaagcttactacccactttgggtatccaaccctgtgttggtatccaaactaagcaacatgtggagagtgtgcatagattttaccaaattgaataaggcatgtccaaaagactgcttcccgcttccaaggatcgattagctagtggatgttacaactagtcatgaaatgctaagcttcatggatgtttattcaagttacattcaaatcaaaatgcacccaccagaccaagaacatacaagtttcatgatagacctaggcttgtactactataagatgttggtcaagtccaaaaagcttggggggcacgtggagaatctaaatgaatacttcaaggtcatctgagtgtacaatatgaagctcaaccctctcaagtgtttgttcagagtaggctcaagaaattccttggcttcatagtcaatgcaaggggaatagaagcaaacctagactagatgtaagcctttttgaacatgaagtcacccacaaatataaaagaattactaagtttgactggacacattgtagcattaagtagattcgtctgaaaatccatcgacaagtgtgtccctttcttcaacatactccgaggaaaaaaaaattgaatggacagaggagtgtgaaatagcattccaagagctaaagaaataactagctcaacctcccatcctatcaaagcctttggacaatgagtaattaggcatatacttggctattacagaatatgttgtaagttcattcctaatcagagaagatgatggcacccaacatccagtatattgtgtcagcaaaaggcatattgacgctgaaagtcgatacccattcatggagaagctggcatattgcttactcttagcatcaagagagttaaggtcatacttccaagctcacccaataagggtgtacactgaccagcccttgtcgtaggtgctatagacaacacttaagtgggtcattgagattgcccaattcgagataacataccaaccaagattgaccataaaaggccaggctctcgctaactttgtggctgaatgtacagacatatcttctgaaatatctcatgatttggaagaaaagaaaaagctagagaagaagcaagagcaagagaagaagaaagagcacaaaaattaagcttggaagttacatgttgactgaagttgtattgaccacctgtctggtacatgcattgccctcgttacacctgggggcaacaactgcatggggcaatcaagtttggtttgaaggcctccaacaataaggctaaatatgaagccctaatgctagaacacgaaatatgggctgaccacctagacatatacaacgactctcaagtagtcataaatcaagtcctaggcgagtatacaacccgaggtgaaaaaataatatcatatttgagcaagattcaagacttaataagttggctcaaaggatatactataaggaaaatccccaaggatgagaatgtgacagttgatgcactcgctcatcatgcaagaagtaccttgactgacaaggaaaactttgtgcccgtacacttcttaatagaaccaagaattactattctagaagaagttgaaatgttggacgatagtccaacctagatgacgtccataacaacatacctctagacatgaatcttgttagaaaacaagagtgaagtaagaaacatgaggaggaaatttgctcggtatttaatcttagacggagtgatgtatcgatgtggcctctcaatgccacttctaagatgcatcaccaagatagaagctgagacgatataggtggatgtgcatgaaagcttttgcggtaatcatgctggagggcaaagcctatccaaaaagatactcagataagagtatttttagcctaccgtgatcgaggattcaatggactgtgtcaaaaagtatgacaagtgccaaagattctcaaaaatcctgagagctttaccaaacgagctcacattcataaataagacatagtctaattatagaactataattgattaattaaaatcaattaactacgtcttgcaaacagtattgtctcaactagtatggggaccatgggcctatataatccagcttctaataagtagctctagaatttaccaagtaaatgctctaacttattaattcctccttgcaccactataaatttggaattgcacacttaattatatagagcactttatatgttccacgatatagatacactatgaaattatccattattatagttctaataatcaatgatcctctacagatgatctacattgagtagggacaaatttaccgttacacccttcaa

SEQ ID NO: 225961 - DNA, 950 bp, Cannabis indica
ttacgccattgatcaagaatagataatgctgatgaagaaacatgttggggagaagttgttttttattccaaactaagttgttgcgtgctttccaaattgcccagcataacatagcaattcggcatttagtttccatatcagatgtttgaaatagattgcaaagccacatacctgctgtagtgtttgaagcagtagctaccgtgggatgtgcataatgccagcaggaactagcaaaagggcagctgattatggcgtgagaggcagattctggatggcttttgcatacagggcagttcgaagatatgtcaacatgcttggtaataagctgtagacaagtggggagagtattcgagaccaatcgccacatggagttcttgactttcggagggatttttagttgccaaagtgagcgccaaaagccagaattgtcagcaccagcatgctggttttttgttttctgcagcagaaaatatgcacttttcaccgagaaagtgccattgctttctccactccaagaccagcaatcgtctccagtagaggcacaaaggggtaacccaaaaatgagagatgcatctcgcatattaaagatgtcagtaacaaggtcacggtcccaagaggaggcatcaatttcgaagagagaattgaccatcctattcagcaaactcgggtgtgtagttgtgacatatgggttagagttgtcaggtaaccaaggatgagagagaatactggttgtggtccctgaacctatagtgcgtctagcaccaagtttaacaatatcctttgcttgccatatacttctccaaatgaagctgggattgtttccaagttcagcaccaagaaaatcagaacgaggaaagtatcttgccttataaacttggctgacaagggagtttggtgtaacaagtaaccgccaaccttgcttagctaacatagcaagattaaaatcgtgt

SEQ ID NO: 225962 - DNA, 1789 bp, Cannabis indica
ctctctctctctctctcaaattgtagttttcctatatttatgttctttattaattagttcttcatgttaaacatatttctattagattatttaggattgaatatatatataactgttattagtttattttgttattgttctattattattttaaagttgttttactattatttcatttcatttcatttatttatcacattttctaaatgttattgtactaccctatttttaataataatagaggaataatgaaatttgtatgtaatttattttatttagtatcctatgctccaatatatgttaagttttcctctgttattttttagttgttttgttttttttcatttttgatgtcttctcctacatattatattgttgtgccacaactctccacatttattgcatttgttatgttgtttttttcccagggagcttccatcctcctttttttttatcttctagattttaccatttcaataggaggtaagacttttacatcttttacattttatagtacatctcactcactttggtgtcctattgggtacattattccttcataagttgctagccaatttttcttggtatagtaatctgaacagagcttgtgtagtaacatgttgcacgtgcatgttctctctttgagatctacctatgattctttcattcaagttaccttaaaaaaaatatttagtggtttatttaactagtgtaatttgaaaccaacatttgttaaacatacgaaataatagtggaacaacccaaaaacaacattagaaaaattatgacagccccagtattaatggctttaatgtttctgcttcatctctccagaattaatggttatttttcggttattttgatgttgctgtggtggtttggtccgtgaatgtggaagatggaggcctcatttttttatttttggtgtttacaatataaaagaaaaagaaaaggctatggctgtaaaaatataaattttgcgtgtggcagtataaatgtaaatctttatctaaatctagaatttttgtaaatctctctcaaaaaaaaaaaaattgggtccttatttagaaagaagtgtaatattttcaaaattagtaaagaaaattgtgtatttttaaaaagggaatttttttgagcctctgtgctaggtgggtcttaaacacaggcctaacccgcctatgctcagggtcggacctacgttgtaattgattagattacatgtggcatttggaagcattgtttattgaggaaattgcattgtatacccattttactctatttattttaatttttacctttatttttatattctttaagatatacacacttttatagatgatgttcccattatattttttaagttaatgtaaaatttgtactacatttaagtggatagtgaaagtatattgggcaattcatttaaaaaagtaggtatattttaataaaataaaatataagagtatttttaattaataggtgtaggaattttaagataggattttactatcttgccccctacaccaacaaacaaaaccaatcaagtataaggtcaatttcgacctttccctgttcaatgacttttcaaagtcagagaacccaaaacgacagcgttttgtgtttgaacaaaacccaaggctcgagaatcttctcagccactttctctctttctctgtcttcacttcgaaaccctagcagagagtttctctctgagaaactcgaagctaggtttcaatctacccagaaaaccaagccccaaacactatacacagatcagatctacaatgatctg

SEQ ID NO: 225963 - DNA, 2462 bp, Cannabis indica
ttttaaggggcaattgttatactcgaaattcagctggaggacacgtgtcaatataaaaggaatgtgaatctgtgcaatatctttttatggaataactcattaattacgtaagtattagagtatattagtaacccgctgactgtaaggtcttaagcgaggaatcaatgtacaaaccggcacttattgtattaacgagaaatcatatgtcgctaaaggcgaatagcgaggtaccagagaaaagtgacacataccttagcttgcaatgagcaactaagtgtaaaagtcagatcgaatcaaagaaaaagtatgcgagatgaccatctcgctatgagaagacttccaatagcttcatccaactaacaggagtgaggctcataatcctggcaagtcagaagatttctttataactgcaatcgacgtaagacatacattgtcgacctcggaaagaagaatggtcccagcttgctattgggatcactacaatcaagtttctctcgagacatctcgaaattcaataattaaagacatatttaaatacacgatatttttgacccagtataagcaggaaagtcacaactatacgattttcaaaatcatacaccgcatttacatttcttgatatgtaattagatcccaccattttagggataatggatgtaaacatattctggtcaactttgtaattaactacccactatgtattatgaaaaattaattaataattataattaatttaattttaaaatataattaatcttcattaaagttttataaggaaataaattattaggtgactattaggttataagttaattattatttatttttatttaatttccaaattaatcacaaccatccaatgataatctaatggctaaaaaaattgtaaccatgatggttacatatttaatgtaaccattgaaacctcttccatatatacatatatatatatatatttcattttagtacttatatagccatatcatatgttgctttaatgggtacgtatgggcgtttaatttgatttttggttcttcgactaacttttgggtttatcatttggtatcttgactaactttttgctcataaaattttgggtgtgattttttttctcctctttatactgtgatatgataatatatgtatcatattgtatgaggattctaagttttatttttgagtaattttaagaaataattaaattttaaattttagtgttggtttatgtctaatattttaagtaaagtaattgaaataatatgccaccaaagtgatctctttcgtgtagattaattgatttgaaatatcaagatgattatgtgtttgtaattgatgcatatgttgactgacccaacggtaagtgaaatatgtgacaattataaggtattttgtgtgagcaatatattagtccaaagattgacctattgtttggcataattttattgtcaatgtttaattgttacactaagaataccgcttacagttaatattactgtccaaagacttgatattaatgtgtgtttggtatcttgagatgggattgaccaatttttaaatttattgtttaattatgtatattgatatgagcttgttttatttgttccatatttagttagtccatcttctattggctcaatatctgtgaatattaattctattcctatgcttaacgggaccaattttaaggattagaaaaggaacttacttatacttctaggacgtatggatttagaccatgcactaagggatgaacaacttgcacctctcactaaggaaagtacctgtgatgataaaaaaaaaatttgagaggtgggatcgttcaaattgcatgggcctaatgattatgaaacatggcattctagaagccttttggggcacataattcgaagggttactatggccaagaatttccttgaacaaattgaggaacatttttccaaaaacgataaggttgaaatgacaacacttcttggctctttaatgaacatgaagtataagggtcaaggaaatgtaagggagtacattatgaaaatgcatcatattgtctcaagattaaggacacttaagattgagttttctgatgatgtacttgtgctcatagttttggtaatgcttcttccacagtttaaccaatttaaaattagttagaactgtcaaaaagagaaatggactctcaactagctcatgtctcattgtgtgcaagaggaagaaaggtttaaaaaggacaaaattgaaagtgttcacctagccactatccctaaggataagggaaagaaaagaaaatttaactgctaagggtcaagttcaaaagaaacaacaacatgattctaagggatgtttcttttgtaaccaacttggacatgtgaaaaaagattgtattaaatatcatgcatggtgtgtaaagaaatgtattaatcttgctttggtctgttttgaggttaatttagcttcagtacctagaa

SEQ ID NO: 225964 - DNA, 2539 bp, Cannabis indica
gacctcacttgcgtgagatactacttgattacgtatacttgcgtaataaacataaaattcgtaacagcatcctcagcagattttgcgtcacttcatcatcatccctttcatccacacgagcaggaaatttaaaatcttgccccatttccttgacttctatatccggagcagccccttacatggataaagctcccttgagcaggtacggtggactcgcttccccgtatctcaatagcatttagtgcctctaactctcggaccatgcgacctatctcgccagtaggccacgagtcttgttggtccacacttgctagaaccttatcttttgataatgatgttgggataaagttgtctctcttctaaggttcatctgcgaatgctccatcctcacattcaaatatatggttgttgtttgagagatcgctcatctgaaagatagaagatcttttcagtatcttgtgagtgcaatttaaggaggagtgtcctcaaatgtatacaattgatcgtatacattgttctctctcaaattctccgtccttttttctgtgggatccgtccctatttataggaatataggttggcagttgtttacatttaattcaaaatatgtaactgttgataaaacgtgatcaatttcccatgaaggagaagaactgtgtaggatgaagtaagttctagctcggggtgttcaagatctcgagatcacagtcgatctacgcgaggaggggatagacctcgacatagtgatgatcgagaaagtattagtaatacgaggagtcatcaatctgagagttactcagatacaagatccatgagcaactatgaacgaagacatctagatctttgtgaacgttgagcgcttaaatcagaatgcacctgatttatgccaaaaactcaatgccaactgaaagcaagaagatccaatccaattgcgaatccgtgagttggaaaataaattcaagagataccaagacgaggaatatgggaaactgcgttaacagagtataagtagactatttccagaggagtagggcactcccatcctaaaatgtgttatagaaccttcaaacttgccaggattctatacgagacaggattcagtttgaaaggagcgactccgaggtaatttcgaaaatctttgaaataatccctcaagggaagaacaacaccgaccttaatgtgatcaaggctccaagtgcctattcccgacgtgtcactagtgttggccccactacactcctcgtgaagtactctcttaggggggaaatagttgaattccccatgagccattgacctaatgcgacattgcgcgcctttgttcgatgccgcaggattttaaaatacctccaacaaatgctccaatagatttgaccttggattcaatgagttaagcttcgaaagtgacattgggatcctgtggggtctttgacttcgaggattagtagacataatatcaaactcgaggtcacctggtgaaaaagtagtaacagtgacttcgggtaaaaatattggtctcgcgagtggaataaaagataataatggaggttcaggccaggctgcgcctcacaaaaaacagtgtttaccctcagatatctcttgcagaattcacctatggcgactagaaacttcgtcttggttggtttttattaaatggtccctaatctttggatcatttacttcaagtaaggattgagatttctgggttttaggtttcaatggaagggcaaatttcttgggacactctgtttctaagaattctggagaataaatttcaaaaccagattgggaaatttctataaaaagagcaatcccaattcctggaagaaatttattaaaaccagaaacttataaatatggtaaacccaaaaagataaaaaaaaatttgtaccaaaacccaacaaagaagaacgatgatgcaattagttatgactaaaaaaatataccaagaagaaagagaatgaacacatactggttaaagagatacgtctgcgcgggggagaatcccgtgtttgggtttgagacgaacgattgaacgagccctgaggacgtctgagattgaagactaaatctgaggaaattcacaggaaatatgttaacgacaatgagggcatgcaaggttttgagaaaatgggaatggatttttcacagaaaagcttgaagtttttgttttgacacgacaaaaatgctggaaaaatggttctttttctgttttatacttcaaacttaattactgtaggattaaaggacagagatccaacggacacgaataagggagaagtggaaaagatggctcattaatgctaagatgtgcttcgaaaacataaaccgccaaattcaaaagtatgcatttttcaaaatggatcatgacgaatataccctcgctcatcatttaaaaattacttttcattgaaaatgactttttaaggggcaattgttatacccaaaattcggttgtacttcagaaagtgacacatgtcaatctcgtggaatatgaaccaacaaatataatgataattatgtcattaaatgcaaaatggaa

SEQ ID NO: 225965 - DNA, 3244 bp, Cannabis indica
tatatatataggtgagaaaaagattattactttgaaggacaaaggagccgccacacaacaacaaagttatattggctttcggcaaggcaagtaaaacgtgaccacaatttgtaacgataagtaacattaattaactaattaattcatttattaattaatatagcttttggttggggccaatcatctatagcttaattgatttgttggggcctatcttcttcatcttttctaggttcaaatttatatctttatatattaaaagttgaagtttgattgaataattttttttacctttaaggttaatgttgttaaatttctatataagttgttggttgcatttctaaagggctcaaattatgatttttcctaaaaaggtattaaaaaaggtgaatgcaattaatttgtaaaaactttctttggaaaggaattcttgaggtgaattgtgttggctatgtagcttgatgttgataatactcaatcaagcatctctgaggtgagtttcagaaagacgtagccctaaaatttgagtgaactccgagatcaaatctctagtgtttctttgttgtgttttgtatttttctctaaaccaaccataagatcaatctagatcttagttgtctgttgtgttttgtatttctttttatcccgaacaagcacagactgaggttgttcttattttttttgagggtgtgttattggctcataagagtgttgtcactaccctttgaaccattacatcctattcaagcattgaacttaccaggaccactagcttcgatgttaaagtacctaacattctttcattaattgtaatgccaagtcttcttccataaggaacgataaaggtgttctacacttatatgccttctcatgtcgctttgaaaagcaaagctgcactgtgaacttgatgaattcagtaaaaggaatgattggaaaacttcttgttttctttctcttgttattgaacatttcagcatagttgcttgttattatgctgtacatgtcgtttaaataataagtatgagtccacttttcacacctaatacaccctcaagatattcaacaatggatctctatttcaataaccttgtgaaatttcttgttaaattttgacttcatgaataagtatgttgcaatccacttggcaaccgcattcatcataatgtggtgataccatgcacaataaaatgtatgatgggaaatactgaccttcaaagtatgaataatactttgaacccacatatgatacgaacactaaattttcaatgtcgttaattgcttttttcaactttctcacgaaataattcaatgagtggtgattaattatatgtaggatcctggatagaattctcatcattcacactagttatttatatttattttcatatactttttctaataaaattttatataatttgttatgttaatttttttgttataatatttaaattaagtatattttatttttaatttatatatgtcctttttaagaatataagaagattttttttaaaaaaacaaataataatataaattaaatatatatctcatataaaataaaaattattaattatataagttttagtggtgtagataaaacttcctaaattttataaaaaaaatttggcctcatgttgctaaagggtactactagtgtctagcatcctctttaatgtcataccgctattggtgtaattaaatagcgaatctcatataacttaagaaaataaattttaagaaatagtatcgttaactaatcataatacttataaaaagtgctggacaccactaattctcaatagcaatactctatatgaaatggatgggtgcaattctatttaaattcttaattaaactttttaagtcccaatgtagtgatatcgatcgatatacgaatttacattgattcttatataatttgattttttttttttttaattagatatgtacgaaattctcaagtggcggatgcttaataattaattaattagcttttcttgactagtactagtatcaatttgtttgtttcgaattatctccaacttttttattaatgacaaatttttatagcgatgattcattttctaaatttattagagagttggcaaaattatctttttatgcttaaaaatagaccaattacaaaaaaacttccaagtttaccatatattcaaattatgttaatcttacgtcaaaaaaaaattatgttaatctttactcatttttcaattatatccctgccatttgatttgggatggcaattttacctaaatacatttacgagtatggtattacccgttgaatagagtttaggataaaataagggtatgaaaatatggattcaatacaggtatagggtagcgtacgaatacataagtgtataattgccctattactctatccgattatatatttatatttttatgtatatttgaatagtattttcacagaatcagagtagttttgttcaagggaggtttattggccataatataatgatatgtcaagatctcattaggcattatgggaggaaaaaacaagcaaggccaattgcatgatcaaactggatcttcaaaaaggatatgataccttggaatgggaattcattgaggaaatgtggtgtgcattcaactttccagcaagtttcatcaagctatgatctgtgtcagaacacctagattctctttgatgtttaatggatccatgcatggattctttgaggccaagagaggattgagacaaggggatcctatgtctctcctactctttgtgttgggcatggagtatctgtccaggattatgaagaaagtggggctaaagaaggattccaattaccatgagagatgtggggagttgaagcttaattatctgagctttgctgatgatgttttgctcttttacaatggggactacaaatacatctattttatgctgcagggactcaagctcttttctcgttatttcctaatcctaataagacctttgtctactgcaataacatttgtgacacagatgggtgttccaatttgtcctaaaaaaatttctccaaaggattgctcaatcctagtggaaaaaatcatggccaagattagaacttggagctctagaaatctatcatttttagataaagcggatcttataaattcaattttgatggtcattcacacctattggagtcaattaatggttctgcctaaaagtactgttagagacatagaggctatttttgcatgggtttttatgg

SEQ ID NO: 225966 - DNA, 1809 bp, Cannabis indica
aaaaagaaaaaaaaacaaaaagaagaaaagaaaagaaaagaaaagcttataggaatagggaaagttgtgtttctctacaaactttgttgatggagttttgttgttgccaacttgtaagtaattgtaatacgtgcagcatgaaaatgtaaagggtttttttttttttagttaattaattcctcctctattgggactcttttttttctttgatgattttttattgagatgataagggcacacaaaatgaaaatatatcccaaatatgtacatctcacataattttgaaaaaaattgtaccatgacaattactttgacctatggaattctaaaccggcctaaatgcaatgagtgggttgggttgattataacccattttataaaattctagtcactttcaaaaaaattaatttatatcacatcatattctaaaaaaagaatgcatcaagtctttgtatcaataaactatccctaaattttagtcatccaaacataaatataactttgtactcaaaaaaaaaaaaaataataaataaataaaatataacttaattttttttaaaaggtcttaatcttaaatttgttatagttatgcataatactaactagtattttttttaatatactaactagtatcttgatagtaatattataggaattattttacaaatacacaaaaattacaaaaatatagttttacagaattttaaacatttttatgattttttttattttatttacaaaaaatacggtcttttatgttgtactcttgttaatttgttattgattttttttgttatctttatattattttttgttgttgttttgatgttatttagatgttattttcatattacttttacgtaatttttttgttttcatgttgcttttatggaaaattataaaaatgtaaaaaaattctttaaatgtaaaaatgttattttttttacaaaaagattgtaccttatgtaattatactaaaataaaatttttgatattatgttgttgggttttggttgagttgggttggattaggttaatgccttacccatttctaaaccaataaggtcggtccatgaatagtataaccctttttttttaataaacaatattataacccatgtaggtcgtggtagggttgttaaatttgagataagttaaagaatacctcttttttatgtccattaataaaaaatatccttatattatattttattaaaatatacaaatttttatgagtgagttgcccaatatatcctcactctctacttaaatctagcatataatttacatcaacctaagaggtctaatagagatatcatctataaaagtgggtatatcttaaagaatatgaaaataaaagtaaaaattaaaacaagtaaagtaaagtgattatacaatgtaatttcctcatattttttcgggttggattggccggttggaccatttatgtacaaccctaatccacaataagagcatagggagtttattatgggtccccttttgttttcatgggtaggagcagtttaatttgggtacaaaaatacctattttttgttattttttacatttttctcacttttttatacatttttatttacatttttctcacactttttttttatacattttaaatgtattaagtcttaaaaaatactgtattaaagttacaaaatcaaaaaaatatcgtgtttcagtaaaataaaaaaataactaaaaaataactaaaaaataactctagaacaatttaacattacacatgaaaataactataaaataacataaagataactacaaaaaaacaaaaaaaaa

SEQ ID NO: 225967 - DNA, 2536 bp, Cannabis indica
gattacgattgcaaagttcaacctgagggggcgattatgccctaatactgaacacaacaggggatttctaaagagagtgctgggaggaatatggcaattgaaggagacagaatggaatatcaagatcaaagaaaaattcgattcaggtcttttcttaactcttacttttgcctctgagtcaattcaaaacagagttctatctaaaatgccatggtatttatcaaacggactgttgattttgggaaagatggaaattctaatgagtcttggaaaaatgatttgaccaattttcctatttgggggaaggccattggagtaccgatcgacttcttgactaagaataacacagtgaaaatggcaactaaaagcaggggaggttattcaagttcagaattcagatgtttcaaaaattgtggcggatgggttttttcgattccgggtatggatgtcaatcaataaaccggtgtgtcatggtttccccttgccgtattcaggaaagaaaatatagatctctttcaagtatgaagaattaccatttatgtgctttaaatgtgggagaattgggcatagtgttaaagattgcaacaaagaaccaatcaagattactggggatgagaatgaagaggtagctgcttatggggtttggctgaaggtggataacgggtgtagagatggatttcaaggcaaaatactaggcatggagcaatatgatcctaaaggcgacccttctaactagaaaatcaatgggttggagaatgtaactaaggtctctaatccgtttggccctttggagaaaatgataggggggttgaacaaatgatagccgaaatagtagtccaacaagaaaaaatgaatcagaacgctgaggggggacaaagcgcactgctacaggatcgggacaactactcagataatatagagctgggggataaggaaagattgcacgatgatggagacaagggcaaacgacgaatggtggaggaattggaagtgttaccacttccctttccaaagagatgcaggataaaagtctctacgacattccaatctcttatgcgcaagaagctcaattcttgaacgaagcgatgacttttgcggtaggcagtggcttgaaggaggtagctaaagagcatagaaggaaggtttcggtgaagaaggattcaaaagcaaagaaggggaagatagagggtaatgtggctggtgtttctcagtaaggggattcggtagctactcaaatcatgaaagaggcgtaccctgatgttcagggtcgcctgtagccatgagtctcttaatttggaacgtccaagggttggggaacccgtggacggtacattccttacatttccgggtgagtagttacaatcctaagatggtcttcttttcagaatggagactgaataaggttcatgctgaaactttgcgggttaaactgggttttagtgggtgtttcggttgaagctcgggggaagagtgggggcctcagcttgttttggtcaatggatgttgagactcaagttctttccttttgtcccttccatattgattccttcattagaatggaggaagggcaatggtggagatttacgggattctatggtgatccggatccaactcaaagaattcactcatgtaagcttttgaaaagattaagtcgcatgtatttagggacgtgggctgtgggcggtgattttaatgaaattctgagccaaaaagataaaatgggagactcctctaaatcgagctatctaatcaacaatttcaggaaggcgctggattcatgtcaactaagggatgtgggttttgagggttgtgattacacttggtgtaatgggaggaaacaaaaccttatttttgaaagacttgatcgggtttgtggcaattcggattggtttgaaatgttttcccatgcgatagtgaaacatcttgattgtattaactcggaccattgccctcttctccttacggaaaaggacccctcttctaggatgtaccacacggctagatggaaatttagattccattttgaaagtgcttgggcagatgatgaagagttcactaagattatacagccggtttggttattgaatgaaccaatcaagcatagtaaggagctaaagaaccggctagggaagtgtggggctgctattaaacaatataaagttaagaagaaggacatgacaaagaaattgaatgaatataaggaaaaaaatatcccagctgaccagcaacaccgaagtaaatgaatggcaacaacttcaggaattggagcataaacaaaatatcgtgcttcataaagaagagaaattttggaagcaaaggagtagagcgatatggctgaaggaaggggataagaataccaagcttttccatcggaaggctagtaatagaaaagcaaagaatacaattaaagggctggtggatgagagacttaattgggttacagtgaaccgccatatgggtaaggtggcttgtgattactttaaaaatttattcacttcaaatcgagctactgatgaggagttactagaatttcaac

SEQ ID NO: 225968 - DNA, 3638 bp, Cannabis indica
tgggagagtggcagctggccactttgttttatctgagctgaagtaatggtcttagacattattctctagagagaaattaagaaaaaatcaagacaaccttagaaatttcaccctttttctctatttttcttgttcggcctccacacaaccataaaacaacccatccaagctccttatttttctggaatttagcaaggtctcaacaagtttggaagttgttcaagtcaaggtaaaccttagatcgttatctttgtgttatttaagcttttagttaagtttagcttatgattttgagatatagtggctgtttaggttaggttttattctagggcatttccagaggttgttttaagtttgaattgattatttattgttggttttgctggtttgtttgtgaaatgaacaagtttgagcttgtgagctcatacttggctcattaatggcagaattggattctagggttgtatgttgtgttttagtgcttgaaatttattgttggatgttattctaggtgttctggaaagtttggctaagtttggacacatttcgggcaaggtttggattgcttggggaaacctggtgcaaaccgattaatcagtttgctattaacagaaattgtacatattaaaccataaacatgaaaactacatgtaaacataaatgacttttaatcttctattgataacaaatcagactatattaaaatgggttttatttaaggcataggcataaaatcccaatagtgtgtggtacagcacttagtggtactcagagtacgaaacaaaccctaccaacactcgtacagtgtcggtacgtagtgtatgtggtacagttgttgtaccctagtaaagaacgttcttactaatttgttaagccttgtaaataggtgtatgagcacctagatacaagtcgatattatattatttgttatatgcttttcttactgagtttatcaactcattgttgtttttttccttgcgttggtaaaggaaaggcgaaggctgaataagagggagcttccagctaggatggtgtttgtacatgtcatggtggcgcgacacatctgcagattttattttgtagttgctgtgcgaccaaactagatgtattttgataatgttgtaaaggtttaaatacgggatcctgaatttcgtaaataaatgtttaaaagtttataaagtttagcaattaaatttaaagttttaatttgacacgattttcaagaaaaatcttttgattagcaaaggtggcactgtatttgaaaaatcattgtagctcgcctaagtatcagggtgttacaatatatatccctaaaatttttaaaataacaaaaactatacaaatctgaaatagaaaataaaaaaaaaaatacttacatgaaatgagttttggtggctggtatttggtggtgggtggtggtacttcggtgttgtgtggtggtggtggtgcgtggtggtgagaagagctgaaaatggctgagagaagaagagaagaagcaaaaatggggaaaataagggaagtgggtcgggagagctatttatagaactattagcggcgggacccgttgctaatatacattaaatatatatatatttttttattattattactggcaggatccgccgctaatgctctcccgctaataatattcaaactgaaaggatgggaattttctcgcccacttttagcgacggactattagcggcgagttctgccgcaaatactattagcagcggacaatagtgacggactctggggttccaccattaaaatataaaaagaactattaacggcgaaatctagggttcgccattaatactgccattattagcggcaaatttagctcgccaccaataaatccgccgcaaatatgataaaattgttgtagtgactcataatatgccacaacagtatggtgttgggcaccctaacgtgcctaataacaatgatatatttataaaaattatattatatatttagcaccttaaggtacccaacactatacggatgtgacgccttataattggttagcagattttcatattatttattgaattaaaatatgtgtgacccaatattaaattgtacaaatatcaatatattacgtcgtgtttgacaacttagggtgtccttagcatttcttattgataaaagctttctgtgaatgttattttacttttatttcaatcccacctaataataataattaattaaaaacaatattttatccatacctaaatttgttaacttgtttgataatcaataataactatttttctaagcaagtacacaagtaaaataggtgttttcaagtgttacctttgtgttggagtggaagacaacaaattatcatattcccaaaacctccttaaaaaggattacttggattaatttttgatatttctcaaggagtctacaatatacatcattattatgaccatacacctttaatttttattcaactttcatgttaggcagatatcaactaattaatatattttttttacccttttatcatcacatgaaactaaatgatcacatttatcccatgtaattatgcccatgtacagtgaaataacttgagtgacacaatgtaaagatatatacttttgaggaataaagagcataaaaattaaagcaagatccaatattttttttaaagtgtataatattaaaccataagaaactcatggaacctattttaataatatgaagcatactaatccaactaaaaaagttcattaataattaatcattcttgccaatatatataaagtcccaaccattactaaaccacaccacaactcaatgtatatatatgttagctctattaactaagttgatacagaacacaacaattattaataatgcctttaatccaacactccacatcctctaaatcaaactccataaacttcgacgagcatagatgggttacacaaattcgtcgaacactcgaagaagagcttgaggatgatactgaggttcctgtctctattttcagtgtctccaaaattctaaaggcaagtgatcctgaatcctacactccacaagaagtagccattggcccttatcattattggcgaccagagctttatgaaatggagaggtacaagctgtcctcagctaaaagagtccaaacacacctccaaggtggccataagtttcaacatcttgttcaacaattaatggatcatgaacccaggattcgagcttgttaccacaagtatttagactttaatggcgaaactttggcttggaggatggccatagatgcctcatttttgcttgagtttcttcaagtttatgccatcaaagaagggaagattccacctggtttatcttcaaggatgtcacacttggttgactacacagggagaaagtcagcccacaatgctataataagagacatagttatgcttgaaaaccaaatcccattatttcttttgagaaagatattggaatttcagttttcgtcactagaagctgctgatgacatgttgtttaccatgttggtgggattttgcaaggagctttctccattcaagatgatggaaaatcaagacttgcctgaaattgatgtctcggaatgtgctcacttgttggacttcttatacgacatgatcacacccaaaatg

SEQ ID NO: 225969 - DNA, 3296 bp, Cannabis indica
taaaaaaataaatttaattataaaagctttgtttaataacacattttctaaaagaagtgtggtgattggtgacacgttggctcgggataaaattctggccacctaactcgggatgaatagcatttctcatttttataatagttattaaattaaaatataaaatttattaactttttacattattaaatatagacacatttaatttgtacactctttatcatgtgtaattaattctaattataaatattttcaagtagaagcacgttatatttaattatgtaactgtagttaattatataaatccggcacatgcacttaatttgcacatactatattatctacacaaaatataataatgtgtaattaatctcaatcatgtaattaaaaatgatatgtaatttccatatacaattctttattatgaaaactaaatagataaaatatatataacttttgtgtgactctagctagctaacattacttatattatatagtatgtaattagagtgtgacaaaatagaggtgtatgaattttttactaatttttatattataagcttaataataatattgttgtaaacataagcatccattcaaaaaggaaatgtattcaataaatcaaatgaagttagttctttctctctcaccttggattttttcatatactatacaattaatttttaatgaaatcggagatgaggggaccatatagttccaccgacacatatagtatctaatatctatagatggcaaattccactatattatatatatagttattttaattaaaactcaaaatatttttataacaacaatctaattaaggctaaatttatatgttacattcataccctcaaatcaattaacacaatgattatacatgatctatgaaaactttatatatacgtcatgcaaaaaaaatgaaatatatgtaagataatttcaatcaaaaaaggaaaaagaaattctgacaaggatggggaagaaggaagggaaatatataacgatatttctaaagtgaatcaaattgattaatctaaccgttgtttctaaaaatggggtctctttataacacttttacttaatctaaccgttgactgcgtgattaacaatgattaatcaagttagagatgtttccttaatgggactaattactagttgccaaatgtttgtgacttgcaatcatttttaagtttcaattggttaatacagtattcaacaccaaaaagaacaaatctttcaattttttaattttttttaaaaaaaaaaaaacacttggcctgaagatcccaaaccaatgacacttcaaggcaaagaaagtgggaaagataatatcattaattatgagcacctaattctgaaatgagtatcaatagaaagaggatgaagttcattactggataaaactagttttgccaataaatgagtctaggacaatgattaaaagataaattaacaaactcgttacaaattaaaaatattcatgaaagaaatactattaaataattcaagtccacaccatcgattatagccttaccaagagtcgatcttaaaattaggaagaaaagaaattaatatttcaataaaatattaagactatttaggatttttatttttaaattactataacttatatattattgtgttgtttttttacttccttaaaaatggttcaccaactatttttttttttgtttttgaaaatgatccatgaactatttacaatattgtgaattggtcagttactgcttagccagctaccacttcaatgccacatgtgtaacttaatttttttaaaaaattaatttagtattgcatgtaatttttttaatcattaattgatttttagcttaatgattttttaaaaatacataatttttatttttttaaaattttaaattttatgttgacgtggcaactggctaaatagtcatgtcatcatcatttttgttacgtgtgacaaaacttgacagaatcatcaatttaaaacactcagattagttcaatttgtcatataaactgggtttgttaatcttacccagattatgagctacttaatttaatttgtcaattaaataggaagaaaagaaattggttaattgcattagaaagtaaaataaaagatagttggggatcataataattttcgttatttctctaaattttaattattattttgtcttatttacttttctccaatatttttatttaatcaaatagaaataaaaaataaattaattaatatttgataattaattctcgtggaaacgatactctactttatcattatattatttgattcgattagtatacttgcgtatcaattttactgaataaaaactttaattttttttcttctaattattaacctttgaaagaaatgattataaggtaagaaaaatattaagtgtatttatagaaaatcgaatattgaaccctaattttttttcaattttaaggaggaaagattcgaacaatattattgcgcatgtttaattaataggaatacaataatttcatttaatattatctttggatagagaaaattaagtgttaagattaatattagacaaaaagctatatattaaagatgaggccatttcttctggaaaaagaaaagattcgtagatatttttgttcagagaaaggcattagtattagtaaaacataaaagtgggaagcagtaagtaatatgcttcgccactattaccactaccacccacattatacttaagctaattttcaattctaccatcctttcttgaataatatatatttacacatattaatatgttattttaaataaagaattaaaaaacatctcaatgtcaaaattaaaaaagaatgctaattacaaatatcattttagagacggactgcattttaattgtttaaactattcttagttcggtatctatgccttttatttttggtttatttattaaagattgtcaagttattttatattctttaagtaatgtttttattagtcatattaaacggtttgctaacaaagccgcgcactgtatggcgtggtgcttgttattggtcaggtcgtctattttctgagagtgatattccccttgttcttcagtcctctgtattagtggatgtttctgtctaataaaaattattttcattaaaaaaaaaagaatgctaacaaaatgatattcattttttgtaaaattttgaaaaattataaatagtttaagtactgaaaacagagtttataatatttcagtttattatgtttgtttaaaaaaatttaaacatatattaatactataaattattta

SEQ ID NO: 225970 - DNA, 980 bp, Cannabis indica
ctctctctctctctctccctgattaaatttttggttttacacaagagtacaactcacggtctctctctccacctctttcattctctattttctttcagattcagaactctctcactctagaatttttcaagttaggctttttctgttagaggtattgttatttataactgtgggtatcttttactaaatttctaattatgtacaattaaattgaaaatagaaaatggtagttgtagtctagggcagttatgagtcttcattttgaactgagtgcatagccattccttcacatctaataacttcatgatattgtttccaatgattaagatgacatccacatagaaaactaaaaataataccacttgattatccttgaattggtaaacgcaaggttcatcttcattttgtttaaagccgtagattttgatgatcttatcaaaccttctatttcaggatcgagaagcctacttaaatctataaatggaactgttaaacttgcatacttttccttcgtatcctggaatcttgaactcttctagttgttccatatagatagtctacggtttctgttaagggaagtggacttgacgtccatctatgaaatcttataatcgagagcaacggttacagataagagtattctgattcatttgagcatggcaattggactaaaacttttctcatagcccacaccttctctttagttatagccctttgctacaagtctatgtttgtaagtttcaacttgtccatcagctcctcttttctttttgaagatccacttacacctgatggccctaaagtcatttggtgcaagcataacttgatcccaaacattattttttctaatagaattcatttcttcatagatggcttctaactatagtctccagtcaaaactagccatttcatgtttaatgtcaacggatcgtcatcaccagtatcaccaaaaaccatgttgatttcaccatttaggccat

SEQ ID NO: 225971 - DNA, 2695 bp, Cannabis indica
aaaaaataatttctgggtttggttcaccctttagctgacccccccctctctctctttcactctctcttttgttttcatttaaattggaagaaaagctaaggaattttggtgtagttcttatagtagaagcttgtgaaattagtggtaagctctctaatttcttttgcattagttgaattctgattgttgaagccatgaaaacttgtctttatgttctttgaccttttgattgcatgtgtatgagaattgagagagttttgttgtattatgtatgattgtgttagtatgatggtatggtatgcttctagatggttcttgttgagtttagggttggaatttaatgtttgatttctggattttgtcttcaagttctggctttttgtttgaagatttgaatgtattgatcttcagcttatttaatggtgagtaagttcattgagtttatagcatgcttaaattgtggtgattgtgattttgagattatattttgtggtactaatgcgtgaaaataccttgatttagcatagtttttcttgtgtatgacttaggtgaagttaggtttgtgtttgggcatttttaggccataaaaatgggatttttcgatgttctaaacccagtcgccgcgatcgaattattggtcgccgcgactaggtttggcagtgggaatacctgtttttcccgattttgttttggccataactttttcactcgggactctgttttagacgttctttatatctctggaaagctcgttttgagatctatatgttaatatgtaaattggatgctaattatgtgattattgaaagttaattttgggattaaccctatttatgaaatcccagaaatgtgtgactaggactactgacgcttgctcacgaacattcgggggattttgaatctccgcatacttgggatgctaggtaagaaagtagtttgtacgtagagctaagtgtgttggcgctcatgttttattttatggatgtcattaattaagaaccgggatgagggttattaccctaaagttagcggttatctagccaagggttattaccctagaaatctaatgattttgattgttatgcaatgctaaatatgttgaaataaaggattatgtgctcaaggcataactaagttagactcggtaaattagtaccctaagtaaataataatgtggtctacggttattaccctaggatgtatacgaaggtaaggacacaatgatgtacggtaatattgctaatcaagtaaaagtatgaagtagggttattaccctctataagcgttacttcgagcatgctatagagtatgttatatgggtaattaattggtatgcaagttacagttattaccctaagattccatatattatagtatacattgaagatattgaatatgtgaatatatgttaaaggttatgtgagtgtgacataaccgggttagacctgatatgcatcattaagataaactattgaaggaacataatatatggattgtgtttatatgaataggattatgcgggcaaggcataattaagctagattcggtaactataaccgagattaaccctactaaggccttattataaatagacgtgtgagcgcaacacgtaggtctatgctacatagacataaatagacgtgtgagcgtaacacgtaggtctatgctacatagacataaatagacgtgtgagcgcaacacctgggtctatgccacatagatataaatgggcatgtgagtgtgacacgcaggtttatatcaaatagacaataagggagatgacattataatatatgcgatatgttatttgtgattattgatatctttactgtcttgtttggcttagctcacgtgtgctctactgtgcaggaaaggatacatcagtttgtgattagccatgagtacgggtgctcggtgatgcttgtacatgttcgagccatactagaccaagcgtgttggggtctaccagttgtgtattttctaactctaatctcgccgcttaggtctacttgtgaaatggacttgtaatattttgtgaaaaattttacgggatcccgtaacatgtatcttttgattgtaaagtttaaagttgtttcaagtttaattttcattctgtttcaaataaagtttaaatttcccacgcttatccttttagtaatccctaattaggggattagggtttcttaatcagttagcgtagcgtgcctaatggttagggagttacaattttattcttccttctcgctacaatattttgttatggtgtatctcgtgccgaactctcataaattataccatttttctcacaaaaattagtaaattcattagaaaagtaaacacctcctctatcacttctcaacacttttattttcatgttgagttgattttaaactcccgctttgaaaatcttaaaagcactaaaggtcatatccttttacaataacaaatatacataagtatatctactataatcatcaataaaagtaataaaataccttttaccacctctagttagaattctatttaattcacataaatcactatgaatcaaatctaacaattttgaatttctaacaacacttggaaaaggtttttttaatcatctttggctttacacaagttttacatttaccgtaattttttatattacaatcaatcatgccatatttttcaactcttttcatagtagaaaaac

SEQ ID NO: 225972 - DNA, 1881 bp, Cannabis indica
tatttcttaagctataattaattggttttaaaaaatctcggtaaacattattctgctttcattgagagctgaggaaaggtctaaacttatagtgttgctgctatcataagcctaaaacttaaatataaggaggagcttcactaaaaaatggagaaaggtcatggcttgcctacatgcaaggtctagagatccagccagaagaggctatgttgaagacctgtcagttgaaggtgttgttgagaataatagaaatagccctgctaataccaatacctatgcccgtgttaagggaggaaagtaggtgaacatgagaaatcttagagtccccactgctcccatacctctttagaaaaacatgaatccaatggctcagccctctaagaacgcagaatgccatcagtgcttttcgagcttgaatgcccttttgctcatagagacataaccaccctgaaagggaaaaaaatggaaatgcctgagcccaaggccgaagaagactactctattgattttgtcaaccaagacggtgggaccatggaacattattttgacgataggtcgcctatggtggaccttaaaatgtatctcgactttaaacacgacaaggctagaaaggcaaggctactaggtaatgacccccatgacaattcaattgacaagctctagggaaggaatctcatagtttgtgacactgaaaagttcaaaaaatggaatggcattttcaccaattttcacgatgacgacccgtagccttgcttcaagaggccacgagagtttctctcccaatcaacttcaacaattagctcctggttgtggggtgaggagcacaggacaagacaaaaaaccttgtcagagcttgtgatgaaggcccaagaattttttcaatttaaaagacacatgccaacaacctaccgaagcccctccggcaccgatgtcggtcctattgttgctcccaaacttgtcttaatagttcttgttactgggaccccatgtatttgttggctttatgccctaaataaaactctatttcaatgtaatcatttctaatcaattatcaataaagaaaaagatttaatttcaatacttgtttaatgcgttattttgctcatgtgattatttattgttttatctgatttataaattcatccaaatccttatcacactaatattcttgtttattgtgttgtcaacatagtggaaagtaattaaaattatgtgattatatgtattcctatgatttatcagtacacagggtttaactgataggataatctacaatgtagtttacttgcaccttggataagtgtatgtcctttttatggcattggttaaagtaagtgttagcgtagatattcgttaactatataaaagcatattttgtgattattttgcacataaataataatagataaaaagtcaaaagaataatgcaaagatcgcaccaactttttttatgtggttttccagttaaattgtgcacaatccacaagtctgtcttattagatttctttgatacaaaactagggtttctctctcaaggatttttttccctttttcagtgtatcttgcacctatttatagttacatagggaggcagttaattacaatcagattaatatcccacaacaatattcccttgaaattatgggatttgattacgtcccacataaaataaatacggttattatttgaaaattgcacaactttgacttatccacttttaccgggtcaatgctgacgtgggtttagatacgcttcaaagtgtatctcgctgggataacaacaataaccttgacagcaagctggagcttttcccatgtctttctgaggttgataatgtaaatgccgttatttcttaaggcataatgctccatctaaaaatcg

SEQ ID NO: 225973 - DNA, 2445 bp, Cannabis indica
actagaccactggtgctgtttgtatatgatggacaagaataaattataaacacaaatttttgttctatacttacttccattgattgtcagaagccacttgtcattgaactccacactacttttgcttaattagacgactcaagttctcaagctcaaatgcaaactcctccaaataatgtaatgttcttagatatagattatcaatatgactccaaggaggcaaggatgttgttgagcccaataatgtccacatcccaaaacaaagattcttttactcactccccattacatacttagattgaatcaaatgaatatgttccttctgtaatgaactatcttaactactaacccagtttatcaactgacaccacaactccaaatctttcaaatgattcaaacccaaaacatgcaattgaaacaaactttacataaaaacagatacatgggaatctgacacactagcaaatagataagctggccaaaaaaaaaactttgagagatcaactgttgaaaagttaaaccaataaaaagatggcagtatcacctttccaaagatttgagttcagttcagactaaaatctacactgttacgatcaacttcaactaatctcactagcctaaaatctaaattctattacgtgactacagtgtaagacaacacaactaataattttaatttcagtcacacacatatgctgtatttaattacaaaaattctataagcacttagtaaaatataatataaatcatacaaatttgtagttatttgatctttgttagagttctatgtagaaatataacaccatatgtaaatttatggtttattttttttattgttaattggttttatgataaaattagatgtaccttaactaaataatcttaaactttaacgagtacatatacaatctaaatccaataatttataccaaaaaaaaaaagctatagaactattttcctgtgaaaatataacaccaactttagagatagaacccattataacaatcttgaatgactattttgattttaagctttttgttgtgattgttattcatttatgtagtctgaataaattggcggtgaattatattaaattggattgggttgttggatgtcatacgggtgtggtgtgtgtgtgtgtgtgatatgggcaatggggacgcgtgacccacatgctgagtttgagtgtgtgtgtgtgtgtgtggcactatatgatctgacccacatgtgagcctctcaattgcttaattcaattttcttgtttctttacataatcatataaacactggttttctgatgatcccaaaggccaaatacatatatatcgacaaaattcctatcaaagtgtttacattggtttcctctcacatttctttatctaagaaatttttaccttggagtttctctcttggtccccaactagaataggacaatgctttcttcatagttattattcctaaactaatagagatttttcaataactttggagatatactaaaaggctattatggtgtccacaatcactattcactattagctattgtatttgtattattattgtttgtagttttatttacactcttaaaatgatacttaatttaatatttttattcttctagaaaaaaaaagaaaaaagatgataatatttttagtttatataaaatttatatctttaatatatactagcttttgtttcacaaaatatatagtagttttagaaaaaaaaaaaaaaaaccttactcttattcttataagatacatatataaaaaaaaataaaatatatttaaatattaagataaaaaaataaataaaaaaatatatgaaattttattagaattttttttaaaaaaagcatacatgatttttaaaaaaatgtaggaaaaaaataaaactaacttttgatattaaatgaatataatatgaaaagaaattttaaaaaaatattaaaatttttttaagaaaattaattaaagttaattattttttaatattggggtgcacttataattttatagggtgcaaataaaatttttcttatatttttataagaaaagttgaacttaaaaatacgttacatttatatttagacatactatttgttaagttaccattataatgaatataacatattttggctttttcattatgactaaagaaaataaaaaatattataaaatgtaatattattttaattaaaatagtacactttttaaagaaattaaaaaactacatgaaaataaaaaataaggtaggttgcaagttttcaaactttaattacccctatagtttaggttcattataaaaagtgagcagtgtgcccttaaaaagctctgtggcagttagtatctgtttttatttttaattgttacaacctcccaagttccctttattccttatttattctagcaataacttctttttttcaaattttaaccattccctc

SEQ ID NO: 225974 - DNA, 1244 bp, Cannabis indica
ttttaaagagtgttataccattgtagtgattttagaagagtgccaaaaatgatgtagaagagagataaaataaaatattatatttttagattattaggagatttttagtatccttaaagaatgctatcagcatctctaatggtagcatagcatcttctaaagatgctaaaaatttacacatcatctaaaaatataatattatttatctctcttctaaatcatatttgcagtcttcttttaaaaacactccaatgtatagcactctttaaactataattatgatctcacacattattatttaatatatattctaatttctagctacaataactttttagcttcaattttttaattaaaaaaaataaatagcatcaatgtcacaacatagcatccatgtaaatttttagaatgacatccttttctcttcaatagtataacatctcaatattttgccacataatatgtccacctcaccaagcatcctttagaggccatttggtatagcagttttccttactcagaaatgggaatatgaagtccaaccaatgtttggtattgctttttaacttttttagctgaggtgttcattttactatgggctcaagttgactttacacagaggtaatatccacctctccaaaatagttgagttttatttgccaaggaaagctcactcttaacatatcaactctcatcctcttcatttcttttctgactcaaggtatctctctctcaatctctgtctctcctctctctatgtatatatatattaacattcttatatatatatgtatattttattttttataattatttattattattaattttttataaaattatataaaatataataaataaaaatgattttgaacacttaaaacgattttttttttaaattattagtattttacaaaaaataaataatcattattgtaaaaaaaatacttattattgtaaaaaaaataatcattattgtaaaaacacacaaaaacaattagtaaagcatgcaattaatgaagaaatgcaataagaaagacaaatagcaattatcaccaagagagtcacactccctaaccgaccttttctttgaaggcccaggcacagtgcttttgttatggtcgtcaaggccggcctcggaggtcccaagggtcgcaggatttctcgtactccagtagaaggggtaataacaaagttgaacctaaaatcgtctaacacccgggaagaggttaggatgctgatat

SEQ ID NO: 225975 - DNA, 2265 bp, Cannabis indica
agtattgtaacagtaataaatctccgtcaacaatttaatttctttatagattttgtcgtttcacagccctggaacgaaattgttgtcctctatgttattataaaatatttatttgaaaagaaaacaattattaaataatattaagcatcatcacaacatggaaacttgttagtcattttcgcaataaaccagttttttaacagcaaaaatctgtgtcaaaaaggaaaaagaaacagcaataatgaatcatatcatttgataatctatttaaattatattaagattttacataatgtgaggtcccgtagctcagttggttagagcgttggtcttatgagccgaaggtcgcgggttcgagccccgccgggaccacactttgctgataatttttttttttttgttagttcattattattaactttttcttttctaaagtattaagataaccaaaaagaaaaagagtagtgttaatagggagtagggagtacgtaccctaacaaaacagtcatgaaaatgcattctaatgagaccagctgcaaggccaggattttcacacacagctctctccacagcattcttcactatatcttctgctgaaggacatgttgatccataatacccttcttccagtgttgcacaatcctccattgcagaagtagtagcaataaacttatgaactaataatacatacattattattatcacaatccatgcactattcatgaggaagtttctcatcatgatcatctttttgcttcaactattcaatttcttaacaagttaagaaaagggtttgagtagaatagttggaagtatatatatatgagagtatttatagagtagtagtagtagctgtagataattaagctagttttgaacagctttcacatgcacattgtaagagtactataaagactaattcaaataatcattttcttaattcccatttttgctctcttatctaaaatttcttgaataaagcaacttttgttttgttgtatctctttctaaaatgtaatatgtcattttttttaagctttggctagacatggttaagtaataccgtgtttttccttttattggtaatttgaattggctatgtagtgatgtgagaaatgaaattccaagattgccctgtgattattggtagtttgaattggaatttgggaatgaattatgaagaagaggctggacacggttggtaactcaaattggcaaaaaatttctaatatattgattggttgtctgcatgcaatagtgacctagatgaattgccctcttttgtaactaaaaaagtaacaaacaaacaagaaatgaggaagaaaatgagctaagaatttgtgatttgtttaatttttagtttttttttccatcaacatatttcaatttagttattaattattttataatgttaaaataaagcagtaatagcaactaatcaatgatttgctttttttcgccatgaaccaacatcactcgtgatcacattaccgtttaattttagatcgacttctctatataagttgcataagaaaaacagaatgaatgatagatcctctaaaacacaagaaaaaaattcacattcttccttacgattttttctcagagcaatttttagagtgtaatcgagctcatatatgaaacaagtatacattaataatttaacacaatatgagcttgtttggtatgccgtataaaagtcgtattgtattaaataataaataacattaagttttgataaaataatgtattgtattaattattacgaccaaaatttattataatatatgttgtattatttaatacataacaaatgattcatattagcttgtattataacatttacaaaggattcggggtcaataccaatcttcaatccaagcctgggaccaagacccgaacccggactcggaccccggccccaaccccagacctggaccccgacccgggacccagacacggacccaggacctggacccgacctgggactcggacctcgacccaggactcggacccggactcggatgcagacccagaccccgacccagtcccgaaccccgacccagacccagactcggacccagacctagaatccgactcgaacccgtacccagacctaaacccgacccaggaccaatccccaaactcgagatcgcgactcgaattaaataatactaatacaatacaatatattaatacaagtcaataccaaacataatattgtattaaattaaatacaatacaatacaacacaacacaatccaa

SEQ ID NO: 225976 - DNA, 1461 bp, Cannabis indica
ggtgaaacttttttgaattataaaccaaattatttgtggttgacagctttcttatttttttttaaatgaagagacatgtgttgttatatctttggtttgtgaagattactttcattaatgtggcgcgttgaacaaggcttttgtgaaacgaaaattgattacgttagcatgagtctcgaagaaaatattatcatttgaatatcttatttctaagcatcgcattaaatgcatatttgacagtttttccagaccgttagatttgtgttgtgttttcttggacatgatcttagccattgatctgggatcatgcatattgcctcctttgtgtataaataaggtgaaagttgcccatttaccacttttgcccaaatttcaaatagaattcaaatttttagagtgaaagacgacgacgaatgagagaaccctagagtattacatcgattattgtattcatctccttcttcaaatttgtgaacgagagaatccaagagtaccacccccgatttttactgtcgattcttcaacgccatcaagaacacagaatattcaagtggagtttgaagagctcatcagaaaaactcgtcttcttcgatccatgatttgatgtcttgattagatttctttgacatgagtttccttgcgattgtcctaaaccaaatcctcagctttcttcaagctcttcatattcacccagttcttcgtcaagtatgtttccccttttgttacctttctggaatcttgttactttttggatttggcattattttttaatttttgcatactttccttaagatgttgatgaacaagatttaggcattgaagtggttctgagtgttttgtaaaaataagatattttgcatatacttttttgtaattttggctaagttcttggagaaataagatagttgcttttaataatgctagttggtaaaatattctaattagtgtgtggtgcaattatttttctttttctatttatacttaattttatattttgactaattaaataattttaaatttctataatacaaaatataaccaaataaaataaaacatatactgtaatctcataaaaaattattaaaaggcaaaaaaataaatggtatgaagtcaaatgaaggtatcaaggattgaactcatgtcactttgcaagagataagagaaacttaacaaatgtgttacaataatttttctgtattaaatgaatatatatttatattttattgtgtgtgaaagataaatatatacaaatgtattttttaattattattcgcatctctagattgataacgtgtgcatttctaaagcccaatagcagccaaagcaagcctattcctgggcccaatcatgttaataaatctatgaaaactttaaataattataagaggtgcgataaggcatcaatatcatccaaatataataatttattgcagcaaaatttatttgatatgtaagtgcaca

SEQ ID NO: 225977 - DNA, 2107 bp, Cannabis indica
ttgaataaataattaaaactgtattcataatatgggatatttatgaaatacaataattgtttgatgatgaaacttaatgatacttgtacagtgtgatttaacaagtcgtaaatttcagatcatgaaattaaaaaaaaaaaaaaaaaaaagtcttaatatcatgattaaaatgttagattgcaaaagaggtggtatgttgacggtaagaactcatcaactaaccttttggtcgaaaaattaaaatctaacttcaaaactcaaaaataagatgaagatgaaatgtgaactcaaataaaaatgtgatttcaaataagagaaaaataaaaatttattgctttcaatgtgttgattacaagagtaattttccaatctattctcacatttgagaaagagatatttataggctctaatggcctttgatacattagtggtccctaaggacatggtgacatccattatctagcaattgcaggttgtaggaggtggtcttgtaccttgtacctttgtttggtattaggtgcttgcattagtggtggctgatgtgtacccttggtcggttcattcaggccttgcaggtgtgatgcctccactactcgtacctccttgctttcagagcttgcagaagatgtagttgtacacacctcacatgcacacattatccttgtgatcgtaccctagtacccttcatttccatacttaggaaaatttcactaagtatagccatattgctatggaagttgcataccgagtggcatgcttgaagtgcatgccgagtgagctcttgggagggtgcatgtcgagtgacttttagaatggtacatgccaagtgactttgagaaagagcatgaagagtggcatgcatgaagtgcatgcctagtgagctcttgggggtgcatgccaagtgactttgagaatggtgcatgcctagtgactttgagaaagagcatgctgagtgacttgagaatgagcattccgagtgacttgagaagggtgcatgcctaatgactttgataatggatgcatgctgagtgacttgagaatgagcatgccaagtgacttgagaatggtgcataccgagtgacttgagaagggtgcatgttgagtgacttgcatggtgaccatgctgagtgacctacatggtggccatgtcgagtgactcgcatgatgaccatgccgagtgacttgcatggtggccatgccgcgcgactcgcatagtaaccatgttgagtgaattagatggtggccatgccgagtgaccatgcatcactactcctccgaagcgactctcttggcacgttctcgttaatatctcaattgccaattaactaatttcagaggttagcagtgctaaattttgagattaacacttgcccctagtctgtaagaattcttttaagtgctcttgtggactggttattctagtattctctagattaattgtgagtctgtccattggcacaaactttaagaaagcacaaactatatatagggagcctccttcccttcaacttcacttcataatttcttccttggcctagtggtgaacttcaatccttctttccaagagattctaggtttgattccaacctcagtccttccttttgttaatttcttaaaaaaaaattttgtgggccgagtgacatttgaaatcactcatgtccgagtgacttagtgtaacgtcctattgcttaggcacgctatagtgactttctaattattgtgcactcatttgctaatcaaagagtttacttaaaaatcatatcaaatttaaactttttacttaaactttaaactttgcaaatatatatctaaaataaagttgggatcccatttctaaaatttaaaaacatattcaaaatacactttatagacgtcgcacatcgactacaaaaataaggcccaagtcatcccaagactaaactttctaggtcgaaccatcttgacatgtacaatcatccccgagctctggactcattggtgttccgccttagcctttcctttacctacacataaaaacaatatatgtgagtcgacggactcagtaagaaaagcatataacacattaccgacttgcatttaagcgctcatacacctatttataaggctt

SEQ ID NO: 225978 - DNA, 3642 bp, Cannabis indica
atttggattgacaagctagttaaagtggatattttgttggaagataggcagctcattcattgtaaactcaaaatgatgggttacaaggatgagttctatctcactgcggtctatggaagtaattcgttaaacgagaggaaggatctttggaataaactcactagcattgggcacctaaatgctccttggattattcttggtgacttcaatgctatgtttgcttacaaagatagaagtgggggcaggaaaattagaggtcttgaaatctaggacagccaaaactggcttgcttggggtcaggttgaagagatgaagacctctggttttttctttacttggtctaataaccacgaggaaggcagtcgagtgtactcgaagttggatagagttttcactaatgaaagttggttagatcatttcccgaatacaaaagctagtttcagatgggggcctcttttggatcacagttattgtttgattaaacatatcaaggttggtaaccatggtactaagcctttctgtttttgcaactactggatgttcaaagagggtttcagagagagtgttcttactacttggaagaagcaccttgttactgatttgaactcgttacaccagcaactttttagggtcaaacacatcctaaaaagctgctatgttaataagaatgaggatgttactggattgtacaatgaagctcgagataagtttatagaagtacaagaagcattggccatcaacccgcaatgtccttcagctgctagaactgaaaaggtgaatcatgctaactacctagctgcccgaaaacagtattttagctatttgcaccagaactcgaaagcttgttggttaaggcttggcaatgaaaacacaagttattttcatgctatcatgaaaaagaggagagctgagaacaaagtgtgttcgttcactgttaatggagttgtagttgatgagtacgacaaagtagttgagcattttttaagccacttccgcaatttcatggggagacaaagctcggcttctagaagattggaagaggattgcctcgagtttgggaataaacttactatcgaacaacaagtgagtctaattcgtccgtttagtaaaaaggatgtaaaagaagctttatttggcatcattcgtccaaaagtccggggcctgatgggtttggtgctagttttttcaaagagctatggaacgatattagagatgacttctcttgtgtggtgttggggttttttcaatctggtaagcttcttcaggaagtgaatgaaacatccatatctcttatccccaagattgataaccctcaaggagctaacgactacagacccattgcttgttgtgccacaacttacaaatgtatttcgaagatgatatgtaccagactctcggaagttcttcctgagcttattcatgaaaaccaaggtgcttttgttaagaagagacttttagctcacaatgtgttgattttgcaggatcttcttaaaggttacactaggaagaccatttcttctaggtgtattatgaagattgatttgagtaaggcctatgatacggttgactagtgctttgtggctgatattttaaaagctctctgcttcccttccaagttaataacctggatcttaagctgtcttcaaggagcctcttgtgcccttctgcttaatggaagaattcaaggttcttttaagggtgaaaaaggccttcatcaaggggacccgatgtctccgcttctctttgtgctcataatggagtatttaactagacttcttattcagagttctaagaagaagggatttggatttcaccctttgtgtacatccttaggccttgtcgatttatgctttgcggacgatctcattattttttccaaaggcaatgacaaatccgttcagatggtgaaagaggccttctagctgtttagtgaagctacaggcctcgttgccaacaaggccaaatcaacggtgttttttgggggtatctcaactacacgcaaacagagacttgccaatattttacaaatggaagagggatcttttccattgaagtacctcggtgtgaatctcagaccaaccaaatggcgatctgctgactgtggtatcatccttgataaaatccataagaatttgcacacttgggcaagtaggaacctctcttttgctggaagggctcaattgattcattcggttctcttgagagtcaaaaatcattggatgggtttatttttgctttctcacaaaattacggcggctattgacaaatgttgcagagacttcctttggggctccattggaaacagaagaaaatttcatattccttcttgggagaaagtgtgtctccccaagaactcagtaggtcttggtttcagagaagggaagaaatggaacatagcgcttatggaaaagtatatctgggctatttctagcaaacaagacaacctttgggttaggtggattgatgcgatatatctgagagggttgagcttctagacagttgaattcaagcaagatgcgagctggtatttcaaaaagatccttcgtcttcgttcaactgtcaatgaaaaaaaagtcatagctgctgttaaaagaggtaaatttagtgcaaaactgttttatctctcttatatcgaagctcacaaggttgactatgcaagaaacatttggaatagaatggttctaccaaagcataggttcataggatgtcaaattgtgaacaaccagctgctaaccagagacaaactaagtcgttttctttccattccttcttctctttgcccggtctgctatgaggaaaatgagactcaccagcacttgtttgtgagatgctgctttacccgaaagttgatctgtcagattaccaagtggtgtgtccagtttgactggccgtccgacttcagcaattggttctccaagactgccagcagtatgcaggagaagatcatcaacacagtcattttggcaaccttgtacacagtgtggataaacaggaattgttgtatttttgagatgaattataagacagctagaactttaagtagagagatcaaatcttgtgtaaaatctagatgtttaattggctataatgggggaaaagggaagctagatatctatattattaatgtaatatccagttggtcttgaagggctgggggttttcggtcagcagcctgtttcttttgtaatctttgtttgttcttgcttgtttgaataaataattctcttcttgttcaaaaaaaaaatctaaacaaaaagaccactaaaataaactaaaaatatttgagaacaaagctaatttaatgcacaaaaaagctaaataactctattttcatagagttataacaccccaaacttaaaagttttcttgtcctcaagcaaaaagaaaattaaacaaaataaaataagaacaaggggcaatatgacacaaaagttggtgatctctaaatttccttaaagattgattagtaaacatagcttagagaaaaatataaagattgtccaataattgtgaaaaattcaagaacaagttttatttcaattttaattacttcaagtgtgtgtaagaaatgccttttcttaaattattgcatgtcatttatatcaatttatgtaaatatgaattaagcacaaaatctctaaa

SEQ ID NO: 225979 - DNA, 1757 bp, Cannabis indica
tatggctgcgaatcttgttgaaaatacaaagaagcaatcaattgctttagttcctaaagacattgcaaagttatcacagagattcctaccgatgtttaatccagcattgtttccgcataaaccaccctctgcagctgtagcaaatcgagtgcttttcactgattcagaggatgagtaagcttcctttctttccttttgtaatgaatttcttatatttatcaagttttcttactgttagagttgatttaacatgttccaaacaaaaactcactttattgtgcaattgcctttgttaaatataaagaggttcttcatttcatgacaagaatgtggataatattgtatgcttgtgctagagtagggttggccaaattataaatatactctagtaatgctcatcacattcgttatcatttacattattattattaatttgataaacatttgaatattgttggattttctgttagggacaaatatatgtagtgtatgggaaacattgttcagatatgaccattaactctgcattgtggattgctccattgaatccgatttatgtgtgaatcacctggtcatggggattggaggaatggataatgccattaagtgtaatgtctaagaagtgttttttttcccttttttattaaattatattttttataagagtttcatacaataattatgtatattattattgcatttttactctcgttgaatgtttctccttaaaatacaaagaatgtgaattgtactattctgtctacctcttgcttcttctattatagattatggcatgaggatttacatttctatattaaaccagattgttagcgctgggaatgatggaccataatacagattggaaagcaattcaacaacgattgcttccttgcaagtctaagcatcaggtattatatttctacatagctcgttcttatttctcatggcttatgaattttctgctgctgaatagatgaatcctatgtttagaagagaacatacgagtcaagtaactacactgcaaaaattaacagaaaagagccaagttccatgtgtcctgttttcaaaatttatgtagtatccagtaacagcgtactataccaaattgtcactgactgatcagaatttgacttcacatattggcgtgaaatgagatggtatttaatgtgtgatttttgtgaaagcttcgctgaaatttgcatgcccaattttgaactaagttgattttaccatttactattttgtgcttttgtatgattcctaaatggatttcacactaactgaatgctgcaacacctccccaccccctctctgtgataatgcaactttttatttctcccttctctctcccctttttatttgaagagcttgtatgacatggttatccttctttcccagctttgtttgttgtcaaacgtaaacttttaggctatgtgaggtttctaagcaatttttcgttttacagatttttgtcaggcagaaaaaccgttgctcatccaaagcaccagacaatcccataaaggtattagaatatctgtagattattaaatgtatttctaaaatttctattgtttataggagaatttctattcactttcgccctgcttcatctctttcactacagctaactccttctctatgcaacttctggtctatcaaatttacaaaatacacaaaacccataacattgttttcctaaaaaactttgtagatattgcttttgttttcttcattctcatatctcgtccattaaaggt

SEQ ID NO: 225980 - DNA, 2068 bp, Cannabis indica
caaacacggacccaaacccaaacataagacttggcccgggcctcgagacccaaactagaacaagactgggatccaagactgaaattcaaatctagacatgaggcttcacctgacatgtagtcaatgtttgaatccaggacctggactccgatttgtacacacacccggacccaaaccgggatccaaacccaatctcggacccagaatcgaaatcggtctaccactgggagaagaacccagacctgggattgtaacaggagccaaacctaaaccaaaactcagactagaacccataccgggacttggaccaaggccaacacttgtgatttgggacctaaaccaagattgggccctagacccaaaccgggacccagacccatgcccaaaccaaaaatcagggtcggatccaggacccaagaacctaacttagacctgcgattctaaacccaaacctagactgggactgggacccgaacccaaattgggacttggactcggactgggacccaagacccgaactcaaaccagaacacaaagtttgacccacaccgggacctaaacttgaaaatagatgggagaccctaacccaagaatcaggcccccgaacttggaccagaacttaggccttggaacttggattaggattgcgagacctgactcagacccaaacctagacctaagacccaccttgagacttaggatccaggactcgacgcttagactcgacctgtaccctgtgacttgaaactagaaccgaaactaaaagcagatcgggacctaggaaaagggcaaggacaagaacatggaccaagacccaaaacggtaaccggaccaggacccagactcggacacagatgcacacacagattttgggtctgggtttcgattcaggttcgggtctgggtcagggtctaagtcctggtacgagtctaggtccgggtttttgtcaaggtctagatcccctttttggtttgggtcctggtatgagttcaggtcctaaatgcgggtctaggttttggtctgggtcaagatctcggtccggatctatgtcttgggtttcgatcccagtttgggtctaggtacgagtccaagttcgtattcggatccctatctaggtccgagtttgtgttttggatcgggtcccagatttaggtctgtgtccaggtcttgatcccggtatgggtacacgaccgtgtcaaggcctgagtttcaatctcaatttgggtctggggctaggtctgagtttcgttctaggtctacgtccaggtcttagtcacagttctagtcttgttccagggtcctggtccggcaaatcttgttcaggttccaatttcggttctcgggtctaggtctaggtccaggtttgtgtccttgtccgggtttgagtccttagtctgaatcccagatccagacaccgactacgggtctgttccaagccccatttcctggatcataagtcaagatctagatccttgttatgggtcccggtctagttctagtttaggtcctgggtctgacttcgggtctgggatgaagctagggtgcggttctgggctcaaagccggttttatgtcccgagtctggttcctatttttcagtttgagtttgggtccaagttcgggtcccgggtctatgtttgggtggggatccgagtctgggtccaagttcgggtctatgtttgagttcgagtctggaaactggtccggttacagttctgggtctggttacggttctaggtccaaatcctagttccaggccttttcccaggtcctggtctacttccagtttcggttccaatttcgggtcactgggtacgggtttggttccaggtttggctctacgactggttcaggtccaggtcttgatttgggtcctggtctgggttcgagtccgggactgggtcctagatctagacaccaactacaagtttggtccaagcccaaggtccagattaaaatcccgatctcagttccaagtctagttctatttcgggtgccaggtcacgagctgggtgttgggaatattttaccagcatctagatttactaacaagtatgttgaattaacat

SEQ ID NO: 225981 - DNA, 2108 bp, Cannabis indica
taaaacatggttgacataccatcacaactagggctcttatctggactcattaaggacagagctgagtaaactttgtggcttgtgaaaggttgcaacaaggtattgttcatatcttccgttacagttgtaggtattgttgagataatatccaccagagttgtctcatcattgccagaagttgaaaaaagttcctcaaagtgtgctgagataatcttagccataccatgctttgtggtgacaagaacaccatttaaattattaaggaacttgattttgttggtcaacttttttgaagaggcgtgaccatgaaagaatttcatgttttggtctccacatttcagtcaatcaaccttgatcgttggtgccaatatgtctcctcttgggctagcatatcatccaatatatatatcttcaacctttttcaaaacttgtacatatgttcttgcttttctaaaattattcagctttaattcttccttctttgttttggaattttttgcttcataccaccatatttttgtgagtgccacttttggagttcatgcgtacaaacatctagactagagataaaattctctatgtacctagttccgaagctttccagttctgcataattattgcagaaacatcttcatcatttagccataatttctcaaaattaaatttgattttccttggctgttgttgcgactgtgagtttagaccctagacctccatcgagattgctatatgattcgaagaaaaatagtcaagatgattcataataattggttggaaagcggatgtccaatggtcattgacaaaacaccaatgaagacgttcctttattgtatgaaaagaacacctgcttttgcccatgtgaaaggattcccgatatatggatgtatattcgaatgccaccaatcaagaatagttcgaaaatgttccatttgagtgtcattccttaaaagcccccttgtttatcttggttagataagatctcattgaaatctccaatgactaaccctagcagcaatggggaagtgtcttttaaacattctaaaaaagcccaagtgtattctaaaagagcccaagtgtgcactctttgctgagtttctggtgcgccataaaaattagtaaagtgccaacataattcaccattaaaagccatgtaacagtcaaatacatttgcattaaagttgagaagagttacatcaacatcatcatttcgtaacaacataagacctccactaaaacctactctagggacttcaactccgttataaaaatataaaatttggcaaaaacgagaaattacattactactaagtttttttttatgaatcagctgattttcattactccaaatcacaatttgtacaacctacaatcatcctcaagaaaaaggaggacctaaatacttatattatttacattgtatcaagtcaaactttatcactactagaaactttctttggctatatacaagaaattctacttttagttacattcttaacctgtgagataactgtgttgctattcactactctattttcccaaaatttggtgtttcaggtgcactaaatggtatacaccagcgctgcaattgcagcagccaaagtcatccttctgaagtctctaatccttgatttgcctaaccacttgacaatttaaaacaaagaattaaagttcatattccattacagccaaatcttgatctggtttagacaaccctgtggaaaaagaacaatcaaaatagatgtgttcaactgacacctctccattgttgcataaaaacagcaggggtccatggcagtattcaactttatgagcctatctttagttttgatcctcttaagcatagttagccaaaaaatgaaactatgcttaggagagttgaatcgactccacacaatggaagtccaatgtactttagggacagtaggatcaagaaatttgtacccttgagcaatctgatatctgttctttataacttccctatcaaccgaatttttcattttctcttttatagcaaccaatttcctccaatatcagttgccattgccttagcactataattccaccagttctctccttttacataggcataatgtacccattttaccaca

SEQ ID NO: 225982 - DNA, 1402 bp, Cannabis indica
tcgggacttggacccggacctgacctaaacccaaacctatgacccgggacttggaccgaggaccgggaacttgaggcccaggacttggacctgggacccatacctggatgcgtgagttagaagcagagacaactatatatctattctttaattgccattattgtaatgaccgcaatggattaatgttttggactattaaataattacggtttattcatgaggtttaaatattatttataacatgcatattgtggaaatttattttgagtttgatataattagttatgccatttttttttatgaattccttgttgctctgtaatgtattcggaagcagtggaaagagacgttgggccaatagagagtcgcgtttttttttatgagatagaattattttaacattggggtgttgttgttagactttggaattataagaatttttgggttttggtaatgaccaatttacccttgggagttttcaattagtgaaattaattaagggcaaaatggtaatttagttagagtttctttttcttttcttttatgagtaataatctgattattaactcatatatatgttaataattagtcatttgtggtcaaaaaggaaagaatagcttttgaccttcaagaaaaacctagaaaccattttcttcaaaagctctctccttctccttcgaatcacctagcaaccatcccagaattctggtttccttcaactcattaatttcagtgagttttggtagagtttgaagcttcaacccaatgtattatgctttagcttgtctctttttgttttccttagcttaaagttgacttttatgtatgaactttggggattgagttgttgtatgcgtggggattatttatcttggtattctgaagttagatattgatcatttaggttgtttaaggatgaaataggtgagctttgtattgtttagactacattagagtttgtaaacttcaacttagagctctaatggtgaaaagagtttttatgtgaattgttgtgatttgatacttgaaatgtattgtttggggtataagcaggtatattggaagtttttagaaggtttggagttgaattgattttagggggttgatttttgggttcccagcctagaaccggttctgagggaccattagaaccggtcgaccggttggtacccaggaatcgggcttccggttggaaaccggtctgccggttgggtcattttctagaatcctagttttccccgtttttgcgtaatttagggtgtttgcatcctatttatcgatagggttatccttgatttcaagtttaaaatcccgatatctctcatctagttttgaacgttatggttgagggcgctgtaaagcgtcgagctgcacttccactcaggctgaccggcacacttga

SEQ ID NO: 225983 - DNA, 4940 bp, Cannabis indica
aaaaaaaaagagaaagagaacgacaatgtgcactgatgcattcataatagtttagaagttgaaaccgggaaaagttgaaacttacattctgaagagaatgcagaggttgtcaaaacaactttatgctggtagtacttcacctaatagtgacaatggaaaaccaagaggtagtttggagagtctggaatattttcaaaagattaggaaaactttggaagtgaaaaatgatgagtggttaaaaatcgcagaaggaaaacgcacgagcatttatagatcttccagggaaaataataatcaatgaccatctaacagtcagggctcaaactatccaaattccattaatccaatggccgggacaacctggctagaaaatgtagtgaaaagggcggttgcaatacttgagtattttcctaaaactgatatgaatgaagggttctattgaacatgccagaatcaaatcctttttgccaaaaatgagaaaaatgattataaataataaatgactcacgtgtgtgcagaatgatgtttggtggcagtcactccgttgaggcaaagtagtaaagtctctattttacaaagatagaaaaatgagtacgttggggtaaatcgtttcccttaatttttcctaatacacgtggcaatcttgaattcggttgaatggcaagaaagtctaaatgtcaagagtaattaaagtaaacctttgaagacaacaaccggaaatctaatggtcatgtccaggaagccactctaggagcttcaatcgtgtcatgctaagtaaggaattatgcccacctcaaggagatagataaaatattttttgtctggtcattagacctcagacctgagctgatatgggacattaaatgtggcatggggaagacttctatgaattgttctgaaaagacgtgttagaggcattaaacccattattcggtgattacactctatctatgaatcttatgacggttgcatattgaactgttgcatcaatcaagaaaggttaagagcttatatcaccaaacacctaggaaaaactttatacaacccaccagacagacaaatataccttattatcagaatctagaaacttgtgcaagtaatggttctacacttacgataatagaaactatttttccttctttatgacgctataaatatcccaactatattttgaagaaggggtcagaaaaaatggtataaacaccctttgtaaaaaaactacgatataaaatagtagtgactcgtggaccaaggctcattaatgcccaaatcacgtaaaaatacctgcattaaatttcttctaattattttaacaactctaatcaattggttgccaaaaatctctgtcaacacagtataagggttgcattgtattaaataataggtaataatatgtatggataaaatataatattgtactaattattactgttgacctcgcttttagccaacaacaatgagtcaaatagtaagcaatagaaaatgtaattaacatgaagtataaacgaataagtaataaagaacacagaaattaaagaggtttggcccctttagttcagtaataacctactccccttactttgtattaactcaaaaacaaagaatacaatgtttcctctcttgaagctctcacaatgaaatctttgagtatgctctcttagatttctttaaagtaattatttcgaccaccttaccagtgagaatggatcactatttatagggctaaatgcttgagcggaggtttcccttttgcttacaatgtctataattggtaagaacatatattacatatttagaatacacagattatgggatttggacaactttccatatctctatgatacaatcccagacttgtagggattgattttgtgcttcacgatgcaagtcttagaattgctaagtgttgatacactgctcggattgtctactactcggttgggaagacattattcatgcaggtgtatgctgagctttgttcggaacatctcttcatccatatgtagggaataaggtccaagtgtcaccagcatgtgctaccacgtcacagtacaaaaaatgggataacatttgccgccaagtctgcatgggacttccaaagtcgtgcgtagactttaactaagcagacctctcatctgaatgtgtgacacgtgttggatgcgtttgttcgtgattcgatgtgactctgaccagaagtcccttcagtttttggctaattaatgctctgattgaattgtacctcgacacgcgcctttcactcacacgcttttgacagttacccttctctaggtacttgattgcttttaatttcccaatatttacttttggggggaagtcgaggcatttgaaactctaatcgactgcaccctttcactaatttgcttataaatagggtagaagatccgcataaaccacttttacaatttttcttgctaagtgatcttagagcaaaaagtagttttctttttcgaattcgtcgtggaatttcgtagaaagagctgatcagcttcgttcgaacaacatcgaagcttcgaacagtgagtaagtttctcatcttttcctccctttattcttgaatcttcaattctctgggttcccattgtagaaaattctattgttcttgacttattttaggaaacatgtagaaaatctaggattgaaactttgtaactttgactgtaatagatcttatgacttcgttgttgcgacatttcaactttaactccgcaatgtttggttctcactttgcccatttggggtttagtgaagattaacccttaattaaaattttttgaaattcttggttatgaacttgactttcatgaaattttttgcctttttaatctgtcgattagacctggtcggtatatttgcttgattttgttcgatttcctggccaaatactcatatcgtgtattgtcttttgtagatgaaacctggtgagttttggggaggcgaacactatatcgaccaggatcttcttcagcttttatatgaggaccaacctcgtcttcgcgccagtccatcctctttgagtgacagactttctaattcgagttttgaggattgggaggtgagtagtgaaagtacccaaaacccgaggtgcaacaccatttttctccgagaagattgtaggacaaggctacgttatcttccatccaactggacatatatcgtccggctaggtgttgctgacactattcatgtaggccgtccaagttcgggtgccttcggcattcctattgctgctttttccgtgactgttgtatgaaatacacaccaatacccatccaggaggaggatgatggcatgcacaaaacagacaatgtagaagattaatgcaactgaccctcacgtggcccagtgtgccacgttgcctagtgctgaacaggacctgcccgctgcagaggaagaggactatgagggggaagttaaggtcgaggaggtagaagaccaggacgacgaccgtcctgataggccttccgaggttgaggaggagggagttgctcaacctttatgctttgggggctataatgaggccagggagccagtgtctgaacttggtgatgtcctggttgagggagaggattacatcacccaagagtatgtcgaggcagtccctcataggaggcaaggcctcgtgaggactaggtgggtgtgtcctccatccatcgtaactgaggaccatttacgagatttggaaaaggttggatatctgggtggagttgaatgcttcctcccttctccaaatcaccgggcaactagtccgagggaaagttactgtgcatggtcgggtgctcacacaaaacaaggggcaatgctgcctttgcacccgtacttcaagaggattgcgaactaatactacctttttctgacccagttcacacccaagggcatcaagtatttatccgccctatttatcctttatgccactcaaggatggggtgagccgtctccgcacgataccaactggctcttggtagcttgcttttcacaagtatgttttttgtctgtttgggtctatgggtgcgagcagacctttgtacacacttactggtaaatttataacttgctaatagaattgagaaaatttgaatttaaataagcatctttattcatttattggtcaaaacgcacttgttaccgtagtaacttacatagaagctattatattgatttaatccgatctttagcttaatataaacaaaacaaattgcaaaaaaatagaacttgtactttcagaagtggtcatccgacctgagtactttgtcatttcattcgaaccttcgggcgttatccgcctagaaggccacttacttaagagtaagggttctttcatttcatacttaaggtggtcatccgacctggtacttttactggtagtattttcttagatgttccccattccaataccttggtacaagaacgagttgcatttttttgtcatacttaccctgtttgtatgctcatgattctagaacttcaaccacttgatatggtccctcccaattcggtccaagtacacctgccgtgctgtctttgtgtttaagaatacccttttgaggaccatatctcccacaaagaatttctgtgctttcacttgcttgttaaagtaccgagctaccttctgttgatgggccacaagttttaggtttgctgtagttcgtttttcttcaatttcatcaagtgattctgcaaggagtgcatgattgacctcttggtcatatgccaatcttctctgggacgcaggttctaattgcacgggcagcatagcttcataaccatatgccatggaagtggagtctgtctggtcgctattttctcagttgtgcgataagaccataatacttctgagagttctttcggccagtttcctttaccatcttcaagtcatttctttaaagtgtctttcagtgccttgttgactgcttcgacttgac

SEQ ID NO: 225984 - DNA, 1844 bp, Cannabis indica
ccttactgcaaatggtaagatttagctgcatgtcactctcaaaggggaaaacgatacaattacttttaagcacttaacctttgttgtggtagactgcccaactgcatataatgccatattaggacgaccaaccatagtgaattttggggatgtgacttctattagacatttgtgcatgatgttcccatgtgacattggatgcattagcacgataaaaggcgatcaaagaagtgcaacaaatggttacaatgtttcgacatagattgtgttcatggttgtaagacttgaaggatactgagactgtccgggaagagtttgaagatgagctagaccctaggttcgagattgaaaggaatttgaaactaatggaggaggtagaagaagtcacccgagctttggttttatccttctcttctcaagagaggcaaagatcttcctgagtcttatgtaagttttcctaaagagaggtcatagttgcctaaatgttgctctcaacttgagccttatggtcctcataaagtttccagtacttggaacttatctctttctccttcagggctagattagcatcacagttatcctgggcctttttcacggtgacggcagcttgggttttgactcgctcaacttcagcgcataaggtcccattcttggctgccaaagattggactttagcatggagttagcctagctcgatggtcatgttgaccacttctttgccgtcatttccatgaataaggtaatcttacataaaacaaatacacttagattaccctcagtaatggtgaactccaccaaaaatagttgaagattaagacttacccttgttgcttgctatttagtagccattgacaacgtgtataggtctaggttgctgctcacaactcatttctttgatttaagtgggacttccaagctgttgttagagccccccgcattcggtgcgacatcggggattgcttctgccatatgtgggacttcccttaaggcttgctctcctagagtgatgggcgcttcggactcctctcgaagggtgatggagtctttttccacgcctaatgaagtcaaagagtgaaagaccacagacctacccttagagggaggagcaatctcttagacatctaatgatgaggaagttaatggaggacgtggctattgggtcctggaagcctgagtcttggctttccccttgcctttctcttgagtgctccagaattttgccaaagtggtcgtgatcttactgcttaaggatttcagcatcttggactctagtgtatctgcacacataacaacaatataagcaagtaaaaaccacaaatccaattagcagaactaagggaacgattgtaagaacgtaaaatctagtaaagaaacttgtgcgtgcatgtaaccatttagtgagctgctataaagtttcccatgagcaaaataagctatttctctgtgaccaaggaagctactatactccttaaaatggggcgaagaaataaccataaaaggatccaccttaacaatgtctgaaggtgtcctaggattgctagggctcctaagaatttggtatgctttatctatgtagtctttcatggggtacctacggaggtctatacttaagaggtatctatcaaatcctccctgatccccctaggatgtgcaatataggcggggggtacagaagacgcagaagggtctattacctcttctcgaagtacttcctccaggagtcccctcatcgggctatgtggcagctgttaggctatttttagcctatatttcggatcgattttatgtccgcttttcactgttttcggacggaattacgcttgtgtttctatgttttcaggttc

SEQ ID NO: 225985 - DNA, 2219 bp, Cannabis indica
aattttagtacgagtttaacctttcttctacaaaagccaaagtactgaccacataatttaacaaacatgattcttgcaagcacgtggtttttccatgcgtgaaagatcattgcgggttcgatacgtcgtcaaccctctttcccagaagagaagaatagttgtaagtagttcacacgcccagttttgtttcactccctttggcctattaacgcgaaatcattgcttgaattttattgcgactttagcctttcttcacgaaagccaaagtccaccagataaaatttaacatgattctcgcatgcacgtggtttttcatgtgtgaaagatcacttggggttcgatacgtcttcaaccctcattcttgaaagagaaggactgcttgaagtttttcacatgtcaagtgatgtttcacaccctttggtctttaaaccctttggtcttttaacatgaaatcatcgcttgaattttagtgcaagtttagcctttctacacagaagccaaagtttgccacatataattcaacatgattctcacaggcacatggtttttaattatgtgaaaggtcattgggggtttgataagtcttcaatactcctacacagaagagaaggtctgctttaagtctatcacacgcccagtgatgtttcacaccctttggtattttaacgtgaaatcattgcttgaattttagtgcgactttagcctttcttcacagaagccaaagtctgccacataattcaacatgattattgcaggaacgtggtttatccttacatgttcgatacgtctttaacctttcttccaagaggagaggatttctttacgtctgtcatacgcccagtgatgtttcacaccgtttggtcttttaatgcgaaatcattgcctaaagtttagtgtgactttatcctttcttcacggaagccgaagtccaccacataaaattcaacatgattcttgtaggcacgtggtttttttatgcgtaaaagatcactggggattcaatacgtctaaccctcattcctagaagataagggactacttgaagtctgtcacacgcccagtgatatttcacaccctttggtctattatgcaaaatcatcgcctaaattttagtgtgactttagcctttcttcatggaagccaaagtctgccacttaaaatacaacatgattctcataggcacatagtttttccatgcgtgaaagatcattgggggtttcatacgtcttcaaacctctttctcaaaaacagaggactgcttgaagtttatcacacaccaagtgatttttcacaccctttggtattttaatgtgaaatcatcgcctatattttagtgcaactttactttttcttaacgaaagccaaagtctgccacataaaattcaacatgattctcgcaggcacatggtttttctgtacatgaacaatcactaggggttcgatatgtcttaaaccctccttcttggaagagaaggacctcttaaagtttgtcacaagcttagtgatgtttcacatccattggtcatttgacaggaaatcatcgctcgaattttagtgcgagtttagcctttcttcagggaagctaaagtgtgccacataaaattcaacacgattctcgcaagcacgtggtttttctatgcatgaaagatcactaggggtttggtacatgttcgaccctccttctataaagagaaggactgcttgaagtctgtcacatgcccagtgatgtgtcacacccttttgtcttttaacacaaaatcatcgattgatttttagtgcgactttagcctttgttcatggtagccaaagtccccctcattaaaattcaatacgattctcgtaagcacatagtttttttgtgcataaaagatcacttggggttcaatacgtctttaactctccttcccgaaagagaacgaccgcttcaagtctgtcacacaccctgtgttgtttcacaccctttagtcttttaacacaaaatcaacgccttaattttagtgcatcatgagcctttcttcacggaagctaaagtccaccacataaaattcaacatatttcctacaggcaggaagtttttctgtgcgagaaagatcagtgggggtttaatgcattttcagcctaccatcctagaagagaaggattgcttgaagtccattgcaaatccagtgatgtttctgttgggttttatgcgctaaataaaactctgtttcaatgtaatc

SEQ ID NO: 225986 - DNA, 1857 bp, Cannabis indica
agatcctggtaaaataatatccaacacatgcaagtcgccaaggccagtgatgatgaaaaatgtttatgtttttcattgacattaagttagtctatagagaattggtggaaaaggttgtctccaagattgatccacaattagagagacctacaagtaatgtttagaaaatactttatagcagccaaggactatgatttggaggctagctccttgaccagcgtcaagcaactataaggagaatgttagaagaagttcatctagtgcatgatggatgtggttgccaaaactaaagtcactaatgacaagaaaatggtggctctaacataaggacttacaaccgtatcattattatagggagatctccaatgcaaaagggcagataccttgagtgaattctaaaaacgagcccaaggattcataaatctagaagacgcttatgcccaagcatatggagtactccttgcacctttcaatgaagtaacaaatgcctgaccatcgtagatgaaaacactcgacatttaccctctgccaattgtttttactactcctacagtatatgggtcatgtacttccgtagagccagatgtacaggctagtttttccaggtttgaggctgcacaaactggatgcagtaccacccccagaaaaacaaaccaaaaagtagaagttctagagtccaatataagccactcaagaagtaagcgaagtacaaagggtccaaatcagagtgagtctatgaaaaaaggtaaaatgcaagaataagggtacactgagtacacaagtctcatagatactcaagataatgtatataaggcaacatataacatggtacgctataggaagcctctgctaatgtacaaaggcataaaacacagtagagacccaaacaaaaagtgcaaatatcatagtgatattggtcacaccaccaatgagtgtgactacttaaaagataaaatagaagggttggtacaaaacagacacttgaccaattgggtgagaatcctagtcatctatctgggacaggcagtttcacatggacagcttttcattcccgaacaacagggagccataaatcctcctcagggagtaggccacccacaactctagcagtggcagtagctatagaccccagattgaaaaatttgtacccacatagaggtgcatcactagctttagataatcatatagcaactaatttaggtggaccctatattgccagaagcactcgaaatggaaagaagcggtaccttaatgtgtggaaccaaggtgaagcttgccacttggtgcagtcacctacccagcgtccaagaatgatgaatcttcgtatgacttttacaaaagatgatgccaggcacgtgcacttccctcataatgacccattggtaatagaagcccaaatagccaacaaaagagtttctagaatcctcgtggataacggtagccctacaaacattttcaaaggagcctttaacaccattcgtctagtaagcaaacttgttaccttgtctgattcaactagaaggcttcaatggagatacattgatccccatgggaaagaaacaactcctgatgactataaatggggaagctcctagaagtaacgccgtgtcctccttccagtatagcacatttttgatagtcgattatcctactacttataatgctaccatgggaagaccatttttaatggactttagggtcgtgattgttgggattttatgccctaaataaaacccatttcaatctaatctgatttgttatcaatgaaagattagaagttatttatgtttacatatagttttcatgtttgtgctttaatatatacaaaatctattaagtccagaacatacagtcatt

SEQ ID NO: 225987 - DNA, 2519 bp, Cannabis indica
ttgaggatgctttttgggcactaggtggggacaagatcaatcactagatttgaaattgactgtgttgtatttcatccattgtttccttcttagtaatactcccgagaaggaagttgttaggtctgaatttgatatcattaatagcggtcattgggatgaatattgttggggtggggagtcctttgagttgacaattgattcatttaagggcaaagttgaacatggtatcaaaatgaaaaacaaaaaagggaaaaagagaggtcaattttatgttggttggtataaagctttgggatgtccttgggtgtttatagtatggttttatgaatcttgtcctacgatggtaaattgtttttgcaaaagagttgtatctaggattccaagaattttgaattggaccaatgatgtaggggccaaaaatccaacttttaaggacttgaaaggcaagatatttgatttgccgttgaagcaggtgattttcagtttccttactttttatttttgttttgtcccattttattaatctttattatttttatttttgttgttttacaatttacaatttttgttttttttttcagttaaaggtgaagagcattcgtccatctgatgaagaaagacaaaagttgcatttggatgattatttttagatgaatctatcgacgatcatggtacaacaaagcaaacattcaagagtggttcatcttctagaaagtctgattcagatgatatagaaatgttaaaatctaagttggaattgattattttccaatcaagaatccttggccgaagattttattgctttgaggtgttttgttgatcttaattttaagtctgtcatgactgttattaaatgatattcaggaaaagtaaatgtcatttatgatcgaccttttattgaggtatatattttcataatttttttttcatattttacgttttgttattgttggtttatttttttcaattttattttagttgcaatactgttttcaaccaggtgaagtcatctgatgaatttgttgaccaagattctaatgatgatgatgatgataacaaatgattaccagcttcagagaatattgaaactgagtttgttgatggtgatgagttgggtaaagatggtggtgatgattctggtgatgctaaggttggtgctgatgtttctgctattgatgtggttcaaagtgatgttgttgtaggcagtgaagataggtccaaggataatgaaaatgtcaagggcaaagaatctgatgtaaagggagatgacttttttaatggtttaagccagcttgagattgatgatgaccaaattgtcttggctggtttagaggctattgctaaaatcaatgtacgtgtactttttatacttttttagattgtgttagcatgttagttgttttatagttattttacaattttatgttagttttgaaacttttaatttttttttatttctttcatgttccagattccattcctgatgtggttggtcaaaacacagatgccattgcttctaataaagaagaggatgacactgtgacttgtactcctctgttggataagagaaagcgtgccctgacattgaaatctccttttattgattttgggtctgcttatttgtacaacactccaatggaggtaatgtcctcaggttctcaatctggaggagatgagagggattttaagatagttacgtatgtgaagggcctttacgctcttaatgattcattttgcgatacccgtctctcttaaaattgaggctaagtttgatgattggattagcaaaggattgctaaaacatcctaggtgattattttctttattctatttttatttttctttgttagcatttcaatttatttcgccaattatttgaattcaatattgtttcttagtcatttgttttctaatataggccttacaatgtttacgaggattgtgcaaagaaattttccccgaggttcaaatgaggtgtagattatgttgaagtaaaacttggttttatcatttatcttgctgtgacatgtttattaatgactcggtaatatttttttattcattttatacttttttatagttttattatagttgttttatcattattttttagtttagcttttgttattatatttttggaatatttgttcacatttttttttgtgttgttttagcaaatgaatactatattctattaccttaggaaaaaagggaagtattcttctgttgttatcgaatatttcgctacaacacagccttttcaatgattctattcaatctttataccacaaattttgcaaagtcaagtcaatggaaacaaagatgtctgatccattgctcacccaatagcgcattatatcaaaggcttgcgaattccttgttctaagccttggtatgaagccaaccatgtcctattcattataaatcataagaaagaaagccattaggtttttggtcgtcttgatttgaatgaggggattatatttctttataattctttgaggactgccaaaatgaat

SEQ ID NO: 225988 - DNA, 3241 bp, Cannabis indica
gatgttaatgaaacatacttgttagtaaatctagatacttgtaaaatatttcccacatgcagtccaaagaggggactgggcagccaaaattgattgtttgatactgacattgttttgttttgttttgttttcatgccttgatgaagttgagtttggctcgtgacggctatagagggtctttagatgctttccaggagtgtgtgaaggtcttggaggcatctcttaccgcaaaagacaaggccaatgccgagctagaggtccttctagtagagaagcagaggatggtcattggattggagattatgtttagtgataggaacactaagaacaccaaccaagctgctctcatctttaggttgcagactgatcttgaggaacacaagaagaagttataggaggctctttatggccagtaggccattaaggaatactacctagatttgtcctctgaacatacttatgagtttcgcatgcacactcctaaagtcaagttgccatacattgacaatccagtctttgtggagagagcactagctcgcgatttactagggtacgactacttaccacatacactttgtaccgctactgtacaagtgttggtagggtttattttgtaccccgagttccagtaagtgttgtaccacacacactttgtacatgtctgtactaatgctggtaacaccttaatgtactctttacatattgtacactataccaatgcactcagttcgctatcgtactagtgttggtagtgtacaaatcacaacaagcatgcatatatatcacacatacatacattcacatatacaatatgttctatgctattcttacctcttttttgaattcaagtgagttggtcgaccggaacagaaaactttgtgctagatggatgccctagtcacattacataaacgggtaaacaacacgccaaaaccataatctgggaaacctaaaaccctaaataagggttctataaatggtaactaatacaacaataataccctaagtatcaaagaattaaccaaccaaaataacacgaactgacgaatcgaacgatacgagaaacatgccctgaatttggttaaccggttttaaacgacctgtcaaaccggtttgcaccaagtttccccacatagttcaaatcttgctcaaaacgtgcccaaatcaagccaaactttataaaatacctagaataacatccaataattaaattaaaccaaaaacagtggctaaaaagcacaaaaactcaatatgccattgttgagcttagaactcaaacttgctcaaccaaagaattaagctcccaaaaccagtaaattcaaacctagaacaattccacaatcactaaaaaatgaccaagcactaaccctaaatcaaataataggaaaatcgccattataatatgcttgaacaacaaaaacaacataaaaaattatcaagaagaagctagggctcttaccttaggtttactctaattaaaaccagttgaaaatttctccaaacttacaccaagaaaacaccaacttgctcctggtttgggttggttcaaacaaggaaggaagaggaagctagaaaatgtgattttcttctttctttttcttttgttttaccctttaattaattaaacccattaactaaaaaaaggctaaaaacaaccaatatggctagctgccacacccacaaatagccacctaatccccttagtgaaattaccaaaatgctctttattccataagttaaacaataaaaagcctaggggtaaaatggtcaaaagccacaaccccgctcaaacccgatattctatttatcacaaatatttatcccactaagaaacaagttttagacttacccatgtcactataatgaccatccatcacattttctatcgtcgccgagcaaaaatcataaaaattaaataatgcatatttagctcaaataatacttttggagtttaattaaatctccagaattgagaaattataattctaattcccatttcaaataatggaaaccaaaatatcataaactcatacaaaattataaaaatatcaataattaacgcaaatttcctttactaattcatattctaaatacggtcatatatttccccttgtctgaactttggccagaggtactttccttcttgaccttagttaaagcaaggttatagcattcccgtgcaattctttgatttcttttgagacatcccactccactttttgttgggaacttgaagcatagatgaaaaactgatgtaacgacttttaagccatatacggatggtcgacctaacatgacattcaaaactgaagtgacatccattattgggaatttttccattacagttatgctccttggagcctatccaataatatgcggtaggcggatttgtccaacgggtgcaacactctggccagagaaaccatatacgagctgagtgcaagggattaagtcttttagttggagtccccttctcataagttgtcttaaatagaatattcgaggaagctccattatgtaccataatccgtgccaccatcttgtttgcaatttgcacttctacgaccaaggggtcattgtgagggaagatgatgtggttgccatctacttcagtaaatgttattgttggctcccccacacgtggtaatttaggtttcctttcttccatggtcaagatttcttcattttgttcatactacaaggctcgagcatacttttctctaactttgcctgagtctccagcaagatgtggacccccaataataacatgcagatgcccgtccacaggtggaggcatcaattgattctgattattgtctgcttaggcgtccctttgatcttggtcagccttgacatacttctgtaagtgcaggttattctttctaattaaaaactcaatttactactttaaatttttacattcgtttgtgttgtggccgtagtccggatgaaagcaacaaaactgggttgcatctcttttgctctcattctttttcatgggagatggtttcttgtacgacaccatagactgagttgtcgcatagattgtttctatgttgcataaatttcctgtctttccattaccttgcctgttgccattgctagacctcttcccattggagttcaaactattgggatattttggattctggacgaacatccctgccgtcgtggtgcgttgttgatttttcttttgcccaacagtatccatgcatcgtatagcttcttcgagcttaatgaa

SEQ ID NO: 225989 - DNA, 2170 bp, Cannabis indica
aaatatttagttaatgacgtccaagtttgtgatttctatggttatgtttccttagctttgatggatgcagagcataaatagtggtttgacttacgcttggaactttacatgtgcatctctatggaaactttgaattgtacacatcaaaagaaaaagtatctcgagaagcaaaacgttaacatgtgcaattaatagtcattagtattatatatattatatttattataatagtatagagagaagcaaaataattaatagcggctattgaatagccattagtattatatatactatatttattataatagtatagagagaagacagtacaaagaagagaaaagccattcctctccgagccaaagagcctcttcagttctcaacagtcaacaggtcctccctctttccaccgccgtaagactcctgtgactccggctggtccctccgccaccatcggattctccacattagcgatggtttgggtttcaacatggtcattttggagggattggaatacgaaattgaaattgatatgatgagtcattagtgtattaagtcgtttttgttactatgatcgggttacgggttagaacccgaccaataaataaccaatttttgatacccgaacccgaaacccgtatgggttattttcaggttagacccgacccgaccacacgagtttttaatttttcggtttttttggcagcgagtcggggcgggtggtcgggttttccgggtctgcgggtctaaatgttcagctctactttctaacagacccaaggaagacggctggctttggttaccagatccgaatgggcggttctcagttaagtcgacgtatcgagtcgtcaaaaacctgcaggggaagcttgacacggatagtaaatggagatttgtgtggggagccaagatacacaatagactaaagttcttttggtgaaaaatcttaccccatagccttcttaccaaagagcaacttatcaccatctttcttggtattgatactctttgccctacgtgctccctaaagaaagttctttacatctcttctgggagtgtgagtacgcaagggctatctggtttggatgctcctggcaaatgagaacttcggctacgtcattcagctcctgggatgaccggttgaagtggttctctatccctcagaacacaccaggtatgatacattctgattccttcttgggaggggcagccatcatttttgaaagtatatggaaagcacaaaattctctctgccgtgaaggggctaaaacgcccatccatattactatcaaagggattagttgttggcttgaagaaattgagtgggtagccaacaatccaaactctgcattcactgaatctaacggctcccctccccccccagggtggatcatgtgcaactcagatattttgataggtaagacacaatctgcaggcgctgtaatctttcggcaagaggataacaaaattgtgaagatagtcactttcatatcgaattattgtgacccactccctggtgaacttcaagcaatttgtgaaggggcagcctcggcaagactactgggatacaagaacgtgatttttctcagtgactcggcagcagcggtggattcgatccggaacgctcgttcgaaccccagtaaactccaccacaatcttcgggatctaattacaaactttgttgaggcgggtggtgctttgagcaattgggagacccactggactccccgccagcataacggtgtggcccatgctttggctcgctgggcaaatcgtaacaaccatttcggtgtgtttgatttggccgattttgatggctccctgcaatcgtggattgcagacgcctgtgttagtgaactttggtagtttagttagttatttagttagcttgctatttttgttgtgtccttctccttttcttttctgttttttgttttagccttgggctattgtttctctgttctggagtttctttctcttgttgtttctccctggctgttatgctagtaatcaaaaaaaaaagttaaatgttcaatgtatttaaatttttatttgttaatatatgttgatggttgtattacataaagtataatagtaaataatgaaataacacatgcaataataataataataatcaaataaaaaatttgtcaaataaaaattgaataataaa

SEQ ID NO: 225990 - DNA, 3796 bp, Cannabis indica
gggcacaaacccaacactttttcctttaaggcaatcacctagccttcagcagcaacaacctagtcttcagcaactctaagcttctcaaccagctccactaccttcttgtgtttattatccattgtgtaaacataaccaacacaagcctaaagataaaagaaacaatgtcaagtgacaatacaacaaaaaaaaagtaaaagaccagaaggagacaagacaaagaacttactacaaagatgttggtgaaccatctttgagaaattatgtgtggaggttttgggctaaccaatcgttacaatggaatattatcaaccctagcactaattagggcctcatcattagcaaaaagtcaggaaccttgctcacgcaactactccattaagtctgaacctgagttcagagcagtatgttcggaatcattccgagagaggtcaatcggagatctctcattagcaccagcagtattagacttctccctaccagagtcttgagcaggaaaagcgccattagcaggtctagccctctttttgatcttcttcttcgaagcagtagaggaagcaagaatgccttgaaccacttcccttgtcagaagctcaatctccctcgacgttagaatcttcctcttcaagttcgaacaagatgccatagcaaccaagaagcatatattgtctgcaaaaagtaaagaccgaaggttagcacaacaaaaagaatcaagttaacaagttaagaacacaacatggagtgtcagcaacctgttgattccccatccttcttcgaaacaatcctagcgaaggtaactcctccgtcatcctggtctatgaacacaaataatctccctaaatattctgtgtcatttcgaatagaagtcacttcttccatcacaatttgagatagaataatagttgcactctgagcatcttcataactttgctcaagtggcatggtccaagtttgtcagggaagccaacatcaacatacactctctcgcatgacatgatcaacacaaccttccagagatttttagtgctaaagagggttcaaccatctctctcacatagcatcaatttaaagcaacatgacatcaactctcctcttcatgttgataagaggatcatgtcttgtgaaagggccaactttttggaaggtaatgtgtcttgacggaagaacatgagaataaaaatactcttgatagtaaaggccacaattactctaggttatgtgttctatgaatgggccaaactaatggaagtggtaaaagccttgagctttatgggtttgactcctatttaagtcgcagagaaagtttatctcatgaggagttgggatagaccagttcctaaggcagtgaaatataaagaaggtggctagaatcctgtagccattggagtttatctggtaatggaatacactgaagaagtcaactatagatataaaccaaggatgcaagggtaagtaagcacccacattcatgtggaatctcgaccaggcactataataagtattttggaaaccattgggagcaccatatcgaagcttctaaataacagttttaggaagacagtgatcatcctaaattatttgagcttgaagctcgataaggttactagatacaataggcctaagctcaaaggcccaatctcttgaatcatcactttcaacggcggctttgagaagtttagttaccatcactttaccaccacgtgccttatccaagttcttaggcttaggcactgccaaattttctctaatgaactgggcaacatggggatcatattcattaggtaaccttctgcttctcttcattctagccatctcaagtttaatgattcaagctacttacaacttaaggaaagtcaatcttcgttgaaataagtcaaagtagcttggaagaatttttcaaagcacaagaaggatgtattggatttttcgagagtttgaaaaattgtttcaagggtttttgggggttaacagtgattggaataagagaaacaaaggaagataagaagagaaaaaaagttggcgtcgaggggaaagacaaaaaaaatgttttttctaccttgaagtgaagaaggcttgaagacttgatgaatgctataagcatgtggagtgaagaaggaatcgtaaaaaaaattggttctcaactcacttatttatagttgattccaatttccaaatcctaattggagtctttaaaatttaaagcttcctaatgaagaggtaaattatatctttccccttctcctttgtcaagctaattttgaattcctatctaactaggaatagaaatataaatttaaaaggtaacagccattcctaatgctattgggatcaaggaaaaaatagagaaattaaaggaaaaagataaatgataattaaaaggccaaaagtctttactcttcttactttctctctctaatttgaaattgcagattcaacaaggattaggattccaatctaattaatcctaatgccataacaaaaaattaaaaaaaaaatacaaagaaagagataaaaataagtgaaaaaaaaagataagattttttccactttttctttgttaatgaatttttgaaattctcaaggactaatcaaaagtgttcaaagtctcaattcagttgggaatgcttaaagaatagatacaagtgcctaagaatgtcaaatttgatgcccatctggtagtttcaagcaaaacgggcttggttcacgtcatcaagtcaactctacacaagtgtgaaattgacttggtgggaatatattaacctagaaacgttccctagtgatgtgggcatcaatgtttgacacgtggaatgaaggatgatgtcacagagttgagtaaacttcagtcatagtagtcaacctaggaggggaccctagccctatgcccaagttgactctaggatatctgagatggaaatttggacttcaataacttgaatccaacccactatcttttattattctgtaccatgaagatatggagcaacctaatccaagggttaggagctgaaattacacgaatctgcaacccaaaagccaacttgggcacctagggtttccacccagccctcaagttaacattcctcaactagggttttagtttttgggaccgtctttataatatcccaaattttttgggcgtattttattaaatatgtgattatatagataatggagtaagattatgatcttacttaggctaattgagtgatacttagtgtaaatctaataaatggttaaatgaagcataatttataaataacagagattttattgaattatgtgggtatagtagataccacttttgaaataaaatatttttgagttcggtggccatggaaacacgacggagtggtcaaaaatatcacgacaattaagttgtgtcgtattggaattatattggactaggttaaaatattgcataataggttgaatcagaagttagaaattggccgaattactcctaggtttgattctaggttttatggtttttagaggggcaaattagtcattttgaggataggattttaatttgtcctatatttttttggctgaaatgggaattatattaagtatattatttattttaaatttaagttttacaaaggataaacttaagaaaatttaacaaaaatacaaaaatttcttctccttctttctccttattcaaaccctaaggaccagcagacccaagggagtttcttcaccaattttgttcatcttcagctggtttagcaagagatggaggttgtccaagttttgaggtaagctttccttgtgtagtttaaggttttttttc

SEQ ID NO: 225991 - DNA, 2102 bp, Cannabis indica
aagagcagaagccaatagtgaaggtgtttaaagttttaaccctttttcttaatactgcatagagagtattcagggttctaatatttcattttatcaggataatagtttcaaaacctcaacttcagttgatttgcattctcaagctacttcctttgcgaaattggccgaatctgaagctgttaagaacatttctttaaaagggaatttagagaaagtgaagtttgatgatgaggttggtctttttgcaattttgcctgtttcagctgagtctgctggtttgcttccgaatcgaaagggtaagtttcttttgcagactatacctttatcagttaacagaaattcttcaatgtttttgcacttgttttgctaagtgtaaatttcaactttggtatggagaaggataggacatatattcaaccaacaacagaaaggctttaggagcttcaaaaatttaagagcctaaataaatagctaaatttagtatgaaatactcataaattcagttcatcttgtatcctcattctttttttaatcttaattaaattttctaatgctgtaaattttttcattcttttacatgcatgttaattaagttattggatgtgaatatagataatattataaaaggatcggacattatgttggaagcagaacttgaagcagaagttgctcataatgccaaagatttcttctcccagccacaaaatcaactaccctaaattcaaaaggtaatgtaagtttttattttatcttttacctttgagctatgtactgctttgtttttgaacaattttagtatcagctacaactcagtactggcaaaaaagataaaagaaactataatgttcgccttaatttttgtcgaatgtgtgcatattgaacagacttaatagtctccaataccagtatgattcttaccaagaattcgacattgaaataactcaatattatcctcatcatcataatgtgaaaagaagaacacatctccattatgaggatccatagtgagtataatacaatggatattcataatcattttatgacaatgcaccattttcagaaaccacttcatcatctctgtcctcatcaactaattcccattcattaaaatataagattgctttgtgtcatcagctcaatgagagtatgctagtcgcaatccccctcgaatcactctcatacaagtaccgatattggggattaaccctgacggaaaactagtcagaagacatcgctgcgaattcttcaaagtcattttaatatcaaagtgttatgattattattattattatacttattgttcaaagagtaaagaatggagtaagtcaaggttggtatattttgaacaatttaataaagaccatactttaaatattgtttccaacaatggaatattgtattggcttcaaaccaaggcaatgattgcatttgatccttttaagaaagatgaaaatcatcatcattatttcattaacaatattccaaaaaaaatatagccaatttttatgtattggaagtgttggtgggaaactatgtctttctgagctttatttcaatcaaaatttggaagaaaaatggtttgaaagtttgggaattgagtaatgaagatggttttaataaatggagtttggtgaagaatgttaagttggagttgaataataataattattgttattattttgataataatgatattaaaagatcattatgtatgataagttttcatccagataatgagaatgtgatatttttaaaggtacaacttataggagattatcgaaatgatgttggttataatattggttatggtattattttatgaatatcatattgaagaaagaaagttaataatattggttatggtattgtttatactttaaagcatccttcttggccaacacattacttccaactcccattctacaataattttatttatttatttattattggtttaattagttctcactattgtttaattagtactttttatcctatttattactattataattgaattttattatgttgtctatctttgtttatttactctaaatactattttgaattttgtattttgtaaaaattatagatattttatt

SEQ ID NO: 225992 - DNA, 1706 bp, Cannabis indica
cccctaatccagatactaccagccaggttgtacctatatgggcaacctacactccagaagcatccatccatattcaactactcagaacctaaccaccaaaacatcgttcaaaactaccctaccagaccttacgaccctaatcccctctaatgagtataactcattcgaaaccattctaggaaaaacagagtttgaaaatacccaacttttagaccctcaaaactagctcacaccttaaccaaagggtataaactcaccaaaataacaatataggataatctaaacataacctacactacaaaagcacctaaaaccatctgaaactaattttaccaattttgagtgagctttgagttcaaaaactcaaattcttccaacacaaactacaaaagctaaaaccttacaaaccaacacaaaattcaaccttaattcaaactaacaacaattctaaactcaaacaaactctacaaaacctaacccataaatccaaacttaaaacaaaagcttcactttaaaaaaattaaagagactaaggagatagggttccttaatactccttccaatttagcactaattctagttagaatttcttggttaaattagtagagattcgttgtagaaactctggtttttgggttggttttcttcttaattttagatacaccaagagaatgaagaaagatagactctttcatttggtcttaccttaatgttgatatctatccttaaaattagtctagccgctatacacttgtcaatcaactcacaatgtaaccttccaagatatttcataaagataaatcactagagacaagcctaggtggaagaagacgaatatacctccttactcgcttccaagaaaattttacactaagggtaaaacgatcataactaaataccccaaactactctaataaaactacccaattcaaccattacttatactaatatcgatgtgactttctggccaatgcattgagtttctatggttgccatatctaaaaatattttaaattcacaaactgcatgtatataattcatatattccaaaaatatcgccgtaattaataaattatgcttattttccatatttctattaataatcttaattcatataattatcatagtaagagtataatcttactcatttattcctccaatacacatattactctatattttgtaatatattcttatttatttatgttaacccaaaaattagcgctcttaatttttgggattattcacccaagggtgaagagacacgcgagagtgcaccgagctagcctactcacctactgcatatttcacaaaggaagtattccagactcaggatacattcgtgctatcccaaaggttactatgtgactccgataaagatacatgtgcgcatacatggaagacctgcgtatgagtccatgtggaggccctggggcaagttgaacttgaggcatgcgtgggaagtgcaaaagtgtgagggcttgcatgcgagcccatgggaggctcgcatgtgagtcgtgtgtgtatggggaggtgtgtcgagtggtgtgtgtgggtgtggaggctcgcatgtgtgcatgtggagaggtgtgtcgagtggtgtgttagtgtgggggctcacatgtgagccgtgtgtggatgtggggaggtgtgtcgagtgttgtttgtgagtgtgggggttcgcatgcgagccgtgtgtgcatgtg

SEQ ID NO: 225993 - DNA, 1577 bp, Cannabis indica
aagggtcaccgaatctctttcatatcaaccccaagaaacatccaacgacttccaaagctccctccagatctatcaccattcataaacttggtcaaccttccattaccatcatcatcagagtttaatctcccaaacgatgcagaagcaacctctgatatgtccagagaacaagtcccaatcctcaaaagagcctacgacagtctccgagactcccttaccgatcttcttcgctcttccaaaccagactggctcctattcgattttgcggcttattgggtaccggatatggcccgagatatcaatcttcgaaatgcatacttcagtatattcaacgctgcttctctatcatttatcggtgcagagatccctgatacccgcaccgagcctgaccatttcatcgtcccgccaaagtgggtcccctttccctcaaaaattgcgcttcggaggtttgaggtatccaaaatcttcgacgacttgagtggcggcgacggagacgtctcagtcgtctaccgcatcgctaaatcgctcagaggttgcgacgtggtggccgtgagaagttgttgggaattggagtcagagtggttaaacctcatggcacatattctcggaaaaccagttctccccatcggtcaacttccaccgacaccatacgccggagaagtcaacgacagctggagcacagcaaaggagtggcttgatctccaaccgaaacgctctgttgtatacgtagcgtttgggagtgaggttgtactgagccaagatgaactcaatgagatggctctgggcttagagctttctggctttccatttttctgggtgctaagggggcattcagtggagcttccaacggggttcgaggatcgaacaagagaacgtggaatagtgtggaggagttgggctcctcagctgaagattttgggtcatgaatcggtcgggggattcttgactcactccgggtggagttcggtggtggaagctcttaagtttgggataccccttttgctgttgaccttcacaaacgaccaaggtttgaatgccaggcttttggaggacaaaatgattggatattccgttccaagagatgaaatcgacgggtcctttaccagagaatcaatggccaaatcgttgaaggcagtgatggttgaagaagaaggggaggtttatagagagaaggcgaaggaaatgagtcccatatttggagacatgggagtgcagaacaagtatgttgatgagtttcttgcatatcttaagtctcattcaatttgacaagttatgttttattttatgtaatattttgaacacattattatatctatacatatatgtatgtgtgttcattaaaattattattattacgtaccacttgtgtaaatgaattacatttgtatgactatgttatttaaatccattcaactttttattaattccgaacacttaaataactaataatgatgaactcatctttttttgaacaaaatgatgaaactcatcttatatatactgaatgtttttgttctttaatataattattctcttcaccttcctcgtgaagaagcatatattgaaaaaaaaaaaaa

SEQ ID NO: 225994 - DNA, 1211 bp, Cannabis indica
  modified_base (21)..(21): a, c, t, g, unknown or other
  modified_base (41)..(41): a, c, t, g, unknown or other
ctaataaaaaagaaaaaaaanaaaaaaaaaaaaaaaaaagntcagtttgaaattgaaaccccagccccccaaaaattctaaagaaactaataaaagaggtgcaaacttggtacaatatccctgaaacagtgaaacttaaagtaagaatgtgttgttggtcaataaagaaaagattacagttttcttttttcgctgcagaatctaaatctctaaaaagacgacagctataaacaaaaaaaaaaattactatgatcgagtagacagtattactctgtcccaaactatttcacttcacatcatataattatgttatggtgctatgtactacactactacctactctcttgggtctttctcttctactatctaggacaacaccatctcctgaaactaaaggaaacaaacttgtaatttttgttgttttaacaacgtatttgtcaaacctgacacaatattaaattgttttgtattatattggattgggttgagttatattatattgttacgtattactttaatataatagtatgttaattggtattgggttgtattaacatggggtcttttcgtacaatgtgttatattgtattttattgaatagtatttgcattagtattagtattttttaatataataatatgtttggtattgatttgtattaataaattgtgtaaaattatgctaactttaccataaactcgaccccaaccttagaatggacccatcttcggcctcaggctacaaacctcaacctcgaccctgacccagacccgaacccagacccctttcccatacttgggccttgacccaaacttgggtctagggtctaagtcggggtttgggctttgggcttcgggcctggaactgaggttgggtttgggttcgagatttgtgggtcgaggcagggtttaggtttagtttggaggcaggtctgagtttggggtgtgcattcgggcctaaggccgggtcagggtccgggatctaggtccagggtccggctcggggtttgggttgaggtctagggttgggttcgagtccccaacactggatattttttaaatattataatacaagctaatacaaatcatttgtcatgcatcaaataataaggttcgcattgtattaaaatttatggtcgtaataattactacaatacaaagttctatcaaaacatagtgttacttgttatttaatacaatacgacctttata

SEQ ID NO: 225995 - DNA, 2210 bp, Cannabis indica
ataggctgcaaatgggttcatcatgtaaaattgaacaaagatgggtctctagacaggtacaagtctcgattggtagctaaaggatatcttcaagaggcaggcattgactttgaagagacattcagcccagttgtaaagcctacaacagttagaacagttctctccttagctgtctcaaacaattggccggttacacagctagatgttatgaatgcatttctaaatggaccactaaatgaagttgtttatatgaagcaacccccaggttttgaagataaacagtgtcccactcatgtgtgcaaattgcacaaggctatatatggtcttagacaagcgcctcgagcatggaatgacttgttaagacaaaccttgctcaattggggatttcacgggtctagatctgacagttccttatttgtctatggtactggccaaagtttagtgatctttctcgtctatgtagacgatattttggtcactggacccaatgcagacctcattacaaaacttgttactgatctgaataaaagtttttctctcaaagaccttggtccggttcattacttccttggagttgagattttcagggatgactcggggatgtacttaagtcagtccaagtatattgctgatttattaaacaaagttcatatggagggggctaagtcttgttcgaatcctgcaagtgctaatactaaactgtccatgactgaaggggaaccattccatgatgttactctgtaccgaagcaccataggggcattgcaatatctctctctcactcgtccggatgttgcttttattgtcaacaagttgagtcaatttttacaatctcctactactctgcactgggaagcctgcaagagattactcagatatctcaaggggactatcaaagaaggtttatgtcttaaacctgctgctgctcctacacttcatgcctattctgatgccgattgggcaagctgtgtagatgataggagatcaactggaggctacttggtatttttaggaggaaatctcatcagctggtctgtcaaaaagcaacaagttgttgcaaggtccagcactgaaagtgaatttcgtgcgttagctaatgccactgcagaacttaaatggatccgatctcttcttgctgaacttcaagtgtctttagctcactgtccagtagtttgggtcgacaatcaaagtgccactgcacttgcagccaatccggtgttccatgctcgatccaagcatatagagatagacttgcacttcgttcgtgatcaaattctggccaagcaaatatcagtctgttatattcctgccattgatcaggctgctgacattctcaccaaatctctatccacagatcgctttacatatctgaagtccaaactaaaattggtctctaccccatttagtttgaggggggatgtaacagataactaattgtggttatgtcaagttgttaaaacagttagttggggtgtcttgtaactaactttctggtttttctgttatctgttttcttctttctttgtctatctctttgtataaatactggattagtctattcaataaagcaaggaattcatattctcttttcattttctctgcttttctgttttactacattgatcgttgtgttgacagacggaaattgtttttgtagcagcgtgattcgtggactaagactcatcaacacccgaactacataaatatcatgctctcaaccattttatttatatcttttctagctctaaatgcttcatataactttagttgccgaaaaattcgataaacaatatatatgtaaaaattaattttcatattactattttttaacatataattttattttgatattaatattacacaaatagtgataaaatatagggctttttttattttacatttcaaattcggtttttattttgtattttttacagaaattcacatagaaacccacatagcaactagagcgcgacctaaatggaccaaaatacacataaaaaactaccaaaaaactaaccaaaataacccaaactagtaaattaaaaaaaaaattaaaaaaataggtatataaaataattcctctaaaatataaacatcattgataaaattaacataagtttgtaatttatatttataaatttaattatcaagtcctaaatatgaaagggaaatttgaaaaattatacattaaaaaccctaatattttatgc

SEQ ID NO: 225996 - DNA, 2664 bp, Cannabis indica
tattatataattataataattttttaaaaataatttataatattttaaataatcggtagtatgcttaattttgtcttttttataaatccatgaaagaaaaaaaaaactactttgattatagttttgtaatttctttaatttctcaaaattttgtgaaagactactataactacaataaataacgtcataaaaaaattgtaaaaaaaatttacgtgcctcaaataggaatgtgtcacacatgtatagcgttttagcgtcccacactacaaagatttgaaaatggtaataaaaataaccgatcccaatttttatcaccccgaacatgtttcacctataatgtcatcggtgatgcagtatgagaagtgaaaatatagaaaaaagaaaaaatattaaccaatccacaaatgatcaaagaagaaatctttaatgtttgctgtaatcgcaaattatattgcacctatttgttattttgtattgtgaaatggcacacttaacagtgatgaaatcattaatctgtgtcaaggcagttaatacagttattcataactgtttcttggttgttagagtttgttattgattctgttatgattgtattctttccttgtgtatatatactctgttcaacagattcattcaatacaacaactctttctcttattatcttttctctctctctctctctctttctctttcatcttcatctctttcctctctttgttttctttgctactctgtatcaatggctggaagagctaacaacattaacatggtatcagagccttggccaccattggtggcaaacatggctaacatcggatcaactcactcaagtccctctcaccctgctgctcctccaggtttttctgctgcagatcgaaacagagccaaaaacgatgaacattcacctgttcacttcaatcactctctatcaatcagattgaatgatcacaattttttattgtggaagcagcaagtcttggctgccattcgaggaaacagactcctgaaattcatccaagatacaactccaccgcctcagttcctgaatgatggtgatcgagctgctcaagtccagaatcctgagtttgtggaatgggaagttcaagatcaattacttgtttcttggcttctctcctccatgactgagagtttattgactcgaatggttgggtgcaacagtgcaagacagatatggagttcactggagaaacacttcaccttgcaggtttcatcaaaaatcctagagttcagaactaagcttcagaacctaaagaaaggctctcaatctctcaatgattatctcctcaaggtcaaacagcatgttgatcttcttgcttcagttggggaggttctttcagctcgagatcacatagctgcaatcttcaaaggattgccaagtgagtatgatactttcatcatttcttcgaataccagaattgaaggatattctgttgcagagattgaagccttgcttcttgcctctgagtcaagaattgagaaaactgaccaagaagtggatctaagtgcaaatcttgctgctaccaacatgggaccagatctggaagatcaattgtcctatgaagcttaccttgcacattacaatcgcaatttcagaggctccaatgcctctagaggtcagtttccctctaatccctctcactatcatccaaataatttttctagctactacaataccagaggaactaatcccagttttcattctcgaggtggaatgaacaatgctaatgttggtcgagccagttttcctactcaatttggaggaagatttccaacaaataacaagcctcagtgtcagatctgccacaagactggacacttggcccttgagtgtttctataggtttgacaagagtttcactggtcttctcccaactccagaaagttcaaagccaatacaagctcatgctgctcaaacctcccagggaactgacactaaatggtacccagactcaggtgcaacaaatcactgcacttctgatgctaacaacctgatgcaaagcatggattatcatgggccagagaagctgtatgttggaaatggatcaggtttggctatacatcatactggtagtgcttattttaaatctcaacactcagataaacctctaattctcacaaacttgctgcatatacctgagattaccaagaatttattaagtgtctctaagtttgctcttgataatgatgttttctttgaattccatccttttgattgttatgttaaggacctgaggaccaaagccacaatcctgactgggaccctgctcaatggcctatatacttttgatccaggtcaattccaagtcttgtccaagccaacaccaccttgtccaacaaagcacaatcctgatctgactcaagcctgtcttgttgcctcagcttctagcaattccaacccagatcatagtacttgtactcactgtaataagccttttttgtctaactttgagttgtggcataataggttaggccatcccaatgagagagttgttagaactgttatgagtgcttgtaacatttctgatatcaataaaagagataattttgtgtgtgaagcttgctgctttggtaaaattcacaaaatgccatttcccaaggcatctgttactgtctacactgagcctctccaactcattgtctctga

SEQ ID NO: 225997 - DNA, 1774 bp, Cannabis indica
ttcctaaatcaagcactaatctcaaacatgaaacaagatttgagaaatcaaaaaataagaaaaatttacatggtgataaactgggtgataacactagacttgaatgaaaacatggcctaggagtgcacacgccaaccgaatgatggccttagagaaagttttttaacaaaaggacattcaagatgatcgagcctttttgcaatggcgttggcatggtcaatgagagaattgatttcagaattaatatccagggttaccaatttctctagtgaagaagtcataatcactgggggtggatcgtttgtatactctcgagccctaatttaaagtagaagatagatgcaatagtcaatatcatgctctaaatttgttcgattcgtactcggtatcttctttgcaaactctcaagaaatttgcaaagttgggtaaaagtggtaaacaatggcattacaaagtatatatacttagaatgtgcattttgtgtgaagcccagatcaaagggttagattaattctccaaaagaacaaaaataatccaacagctttgaatcccattagtcaagcatttaatgccatgtttgggaccaatgtaaatcaaatgataatattatcctcgagactcgcaccaaagtaaatagcctcaaatttgcttacttcattgcacacgcctcataaaggaacagatgcttctcaaacaaacaacatagtgtgacgtattgccttaaatttaaaaaataaaaagttgtcttccatacatttgaaactattttgaatttataaagatttcacctttagcctccacctatccatctatacagtttgaagcaagcctccacaatccacaacaatctagaaaattatgggtaaattttatccatatttctggcaagggacatgtggattccaaatattagcttagggcctatcagtgagcccaaatgcacataaattgggccaagcccaggatccattatgccttctaggagaacaataaacataactcgcccaggcaaggttccgtcaatcttagttagcatctgcaaggtccatctctgtgtatctagaagaggtctttagcgtgtctccggaagactactatagttacccatttttttttaccaaattgcataagatcatgaattactttctgaaaatctcgaacaaagaataatatcttgctaaaaagggaagttggataattggaaatcatgtaattaatatgtcgttaattacccatgaatataggatacataatgaacaactaattttgtgataaggcctccatgtcagcatacacaaggtacctcatgggtcaggctttaccagataagcccaaagtcaatatattatttgtaaactcttcattagaggggaaagggtactaatatgatctctataacactataaatactcattgaattcttcatgcaaagggttggaaattcttggcatacttgctcatagggctgagcatgggttgacaatgggcggaccaacccggccaacccaacccgaaatgggtcgaaacatggtcattttttgtgggccgaaatacatatgggttgataaaaatataacccgctgctattgggttgattttcggattggtatttttctaacccaatgaacccaacccgcaccgttcagcccactgcctagcccaaaaaaaaagtatatacaaatattatatacactagccagccccatcccagcccaaataaaaaaactttaaacatatatatttcattttcttttctctctattcaaatcaaacc

SEQ ID NO: 225998 - DNA, 2320 bp, Cannabis indica
attgttttagaattcatattatggtgttaatcaaacatacttgttaagaaatctagatcctggtaaaataatttccaacacagtatgccctaaaccagagcaatgggaacatgctactggtttccattcatatttcaccccagtgtggtatttgaaccaaattcattctcgaattccaacatgtctggaaaatcctgatccattaacaccttaaccaagaccctagggtagttcaacctttctctttccctagtcacagagtctaacataaccggcttccctatctgacccacaatcttaaacagagtcctctggccccagtatttcaattcaagctcctccaattgaacccaaattggcacacacttcacatcttctcttttaaaattcacattaggatccaaaggcttcattataaccggtcgtctattaaagaaaatgtaccctccattcaatacctgatctctgtgttcaagagagctaaatcgaatgataaagactccatacggcaacaatttcactttatctatcttatctttccatattctatttacaaatccttcaagaatatgcaaaggggggtttgctcccaagacatagcacactactgaaggtttccagaatgtgatttcctcctcaatgtcatctaaagtaatcctcagtttgctatttttagtctcagatttcttaaaggaattatcaaggttacgcaccacagaaccagatctcaaaattggaggagtcgggacttaccttatgcaatttcattgttgcattgctcattagcttggagaaagtgcacaaaatcgtttttggcatcctcttgtttctgaattgcctccagtgaggatttgggagataatggaggttgaaaaacatctcatagcgcaggatcatcttccttcactccctcctcgtccgacatctccaaaggagttatttcagtaagttcatcttccaaagtagtttgaattgcctcagatccaagtttcacacctttcttcttgcttatcttagtagcagatcgagttctcccttgaatttttgaccttgttttagccatagcactagcttctcagctgcaagagcaagaacccgcgagaagaactttactagacaccatgattgttatttagtattcttcataatattatttaagatatcatatcgttattagtataattaaataccagatcacataataaaatataaattttataaaatattactaatcaatttttaagcatcacctcgtactagacacattgctcatagaaaagacaaaattttaataaattgacaaaaatagtatatatgtttttttttgagaaaacgtataatcttactttataaattttaagaaattaacattagaaatatatatacatattatatctatattattaactcggaaactagtcatgatgacgtagacatcaatatttgacatgtaggaagaaagataacatctcaaagttgaatagttctaagtcacagcaggtagacctgggaggggtccctacccttgcccccaagttcactttgggaactctgaaatggaagttcggattccaataacttgaatccaactaatcatgtttcaatattttgtaccatatagatatggagtagcttaatacaaggtccgatagctaaaattacacaaacctacaacccagaagccaacctaggcacctatggttttcacgcggcccccaagttgacatccttaactagggtttaagttttttgggatcgccttagtgcaaagtggccaaaaattgcattgggacctcgacttgacataccatggacatgtttgaggcatcagaattacattcagagcaagttgatttttgagcacccagggccccgagcacccaacgtcgaggttgacagattgtcaacctgggtgccttccaagcatccgatcgaagatctgacttttgcattgaatctgtcttcatataaaatggggaaataggtcattttagaggaaaaacaacaagttggggcataaataaaagggcctagcgcccaggttgacacttggggcggggccacaaaaaatggagttttcctagaattctttcgaccatcaagcggaacttccaaaggggtagaatggggacccagtgccttggttgacattgttggaattattttaccagggtctagatttactaacaagtatgtttttaatatcctaaacatgaacttctaaaacgatatgaaataaacacatataaagtttcagaaaccttacagtgggtgcagcggaattataatggctccttccgctcagatctctaacctttgt

SEQ ID NO: 225999 - DNA, 2553 bp, Cannabis indica
attccatggctattgacaaagctagctatcctattctcctccctccttttcttaatacaagcataaaaataggctgtattaccatctccttgattcaacaaagttaccttactcctttgaacagatagcttttcagcattttttcctggttatgaaactcctcggctgcaactctctcagctcctacaaaaacttcttctcctggcttttcttgagctttcaatctagcctcaagatacttgtctttagctcgttgaaaattttgctccacacttccaagtcttgcatgattaaacgccttcaagacatgcttcaaacgagctaatttgagccaaaccccaagtaaaccagttgctgcaatcggcttaacccaactctcaagaactagcttcttaaaatccctgtgaacaccccaatagttgtaaaatctaaacggtctcactcctatttccaccatgacagccgaagagacaacaattgcacagtggtctgaaatttcttcccagctgaaagtggctacagaattaggaaacaaatcaatccactcttcattcttgaaagcatgatctatccgcgagtagattcttccatgactaccttgattattcgaccaggtgaaattagaaccttgcctctttaaggtatccaccagaccaagactaagccactaattaaaatcttctgtctcagctctcgaaactgatttgccgcctattctgtctccaagattaatgacagaattgaaatcacctaacactatccacggtttagcaagaaaccgactattagttaagcctttccacaactctttcctttcttccaacccattcagaccatagacaaaagtcacatagaaagcctcagttgacttgctagtttgacataacaatgaacatattgagtactctcctctatgacaatcacccttgcaaatattttcttccaaataaccaataaccgaccctcgatagttggactagaataaaaatcccaaccaaccattttatttgttaccatgtccttcaccttctctcctttcactttagtttccaccaaagctcccacaccaatctcttttaatctacatatgctcatcaccgcctcttgttttttatctttattgaggcccctaacgttccaacaaagaatgttacagcaattcatgatgctattaagatagcattctctcccaatttctcaccttccttattttgcaacatctcaaatgtgtttttctcctggtgaaccgatccttgctcccttacaatttgtttagatttcaaaacatgtgatcttctaggtgtttcccaacttccaactgcatccgtccccctacaagaagccttaacctcttgtaaagtacctcctacaacttcattcctactacaacttgatccattttcaccaactactccctcctccttcctcaacttgtcctctactgcattccctccacacactatagcatcattaaccttttcctttgaataaatctcgttctcccctatcttagcctgacccgtattgtcttttttgctatccttcttaacccattgtttattctcgccatgatatgcccaaagcccccacagctcttacacttcactggcagccactcatactccactccctgttccactaatcttcctttctcatttacaaaatggattaccctcggtggatcatccgtgatatccatttctactaagacccgagcaaatttaaccatagacctttccttcgttactttgtctaccattatcggattcccaattgtgctaactaaagcactcaagcagtttttcccccaatattgcaaacccaaatcattcaaacgaatccaaagaggcacagatttaacaagttttacagcatccaaatcagtagtccaaggtctagtaattaccggtttacgatcgaactgaatgactccatgctccagcacatgatcccttgttgcatcatcattgaatttgactatggtaaatcctccattcatacgcactatctgagctattcccaaatttccccacatccttcggatgaacccttcaaacactgcaaatggagggtttgcccccaaaaccatacaaataacagctgagctccaattagccgcctggaatttcacctcttcaacatcaatccgagcaatcttgaccccatccttaaccaccggctcctcatatttcaacctaacatccagatccaaaggtttcacagtggtaaatgctcgccattgactctgagagtgagattgatgatcattttcaaccatttctgcccaggattgttcttcacgaatctctttatcgccttcgacagcagcctctactgtctccaaaccagcaggatttccttcctcgttctcctctggcacctgctctatctcagataaaacacattcaatctcagatcgaaaatcctcatcactctttgcccctggttccacactcgttgcacgatttgctggctttcggatcactcgacgcttcttcgccatggaaaaaagcttgagagaacacgcacgcctgtatttttcaatgcaatatt

SEQ ID NO: 226000 - DNA, 1737 bp, Cannabis indica
tgctaattgccttttctaattcataatactagagcggtcattacactggtcttcttaagggaattactatctctataagagctttttcgatctctcatctctttttttgcagatgatagacttattttttgtactgctgatagaagatcttattatgcacttcaggatagttttaatatctactctagggcttctggtcaggctataaacatctctaaattttctattcttttctctcctaatacgttgcaggatatttgaaatcttttctttaatacttttaacttagaagatagaccctttatttgtaaatatttggggctccctcaatgtctttttagatctaagtatcactcttttacttttcttaaggataaggttatttctattattaggtgttggtatgctaagtgtttttctagggctggtaagaaaattcttctaaaggctgtgattcaggccatccttgcttatgcaatggcctgtttcaggttacctattaaacggtgtaagggtattgaagctgtgatggccagattctagtggggctctatttggaactcaaaaaaaaatccattaaaaatcttggaaatctatggggggggcttggctttcgttcacttgttctttttaaccaagctatgctggccaaacaggcttggtgaattttttaaaataccaactctctccttgctttagttcttaaggctagatatttcccttgctcttctcttcttgaggttgtccctggtcacaatccttcgtacacctagaggagtattgtttgggggaggtatttaatggcttcgggtcttgtttgaaaaattaggcatggaaattcctttagaactatggaggaccattggatccctaataataagtttaagtcttttagtgttaatagtgctcgttcctctcctttgttatcctattttattaatgattcaggaacctgggaccttaaacttagaatttatcttgatgagtccttgatcaatgatatccttgatgttcctatttctggcctacataataaggatgagattatttgagcacttaaaaattatggtctgtttagtgttaaatctgcctatgatttagctttctctaaacaggatatccccttctcctcttctttttctgattctaagaaattttggaccaaaatttggaattcgaaaacgaccccaaaagttaagctttttgtttggagaatgttgtctaatgcatgtagcttctttccttcataagaaatgtgttgttgattcccctatttttcctctttgtaaactcaaccctgaaactattaagcatgctctgctagactgctccagatcgagaaaagcttgaaagtattcaaggtttgcaatgcgttattataattataaacatcttgatattaatgaattttttctcagtattactagtgtattaaaaaaagattatctttgtattttatatttttttttgtgggcactttggaatcaaaggaataatgattttcatagccaacatactcttcatccaaataaagtgtttgattggagtgttaattttttcttcaagtatttggatgtgcagcaggttcaagctcaacctaataacaaatctgttaattttatagatgcaaccattgaccttaatcggaaaaaatactgtattggcattgttgtattgaaatatgttgaaatatgcatgttttagtggctgtttggagggattagtcaagttttgagt

SEQ ID NO: 226001 - DNA, 1642 bp, Cannabis indica
gctggctgaaataaaagtagccaattctgctctgctttggcccagatttcaactcaaaataataaccaatctcgtaaggtgtaggtggaggccaaccaagctccctttacaagacaaacatcgctaatagatatttaatgctttttggcatgagctgtgtcgggcacatcccaaagtaagttgcgacatccagaaagtattgatggagcagcaacaccgctgcttgttctatgtggcgccctgaccatgccaaccaaccgaacggggagtgtgcacctaataattcttgcgaggaatctcacaacggacacccctactatgccactagtaatgaccttatcaaaggcctcatcagagagagcagaagctggcgaaacccaccttgtcttaggtggtttcacatccaatatctctggcatgggagactgctctaggacatgatataatcctagtactgaaggcgtgccaagcccatttagaaaattgcctcaggcgtcataatggcccaaaggatggtcagggaggatagaacatatcctatatctcctctccctcactagagcgacctcttccaacttagattcagcattggagctcccagccttcgattccacctctggctcagtctcggtatgaggctgggaaaactcttcatccactctaattcgaccctttgtggcgaccatggccacatgaggatcatacaggggtgccttacgcaaagtttgtttcgtccttgcaataagtacgaggtgagcagaagacctacacagctgtcacctcccaaattcaccaccgagcactacctgcatggaagaaataaagggaggtgaaaaacctgacaaagctacaaatatattcaagtcaacgacactcaacgacatcttccaggtaaaaaaaaagtacaatgttgaccaacgaccaagtatcgtcttaggtacaattaccaagacacatagcaagtcctaagtttcacaataaactataacggactaattatctagccttatacatagtatccaagagaaaccacacataaggccacagttgtatatgcctccaaggtcatcacaagaccctaactatggtctaaagagggagaaaacaggctccatgcttggagccttggccttggccggccagggttccaggtttgagaggccagccaaaccccaagacccagcttagaggtcggttaggaaccctagttccaggcataggctagctagcctagggacacagtcccatggcggggcaaaccccatgaaagctacccatggctggccaggcttcaaagaaagcctccttggccgaccagcatgtgcatggattaaaacacgtgatttttgaagaactcaaacattttcttcatcttcttcatgacttaaagagccaagaatcacaaagaaggtcagattagttctttttcatctagaaatcatacattgtctatcctaagctagcatgcggattaaaataccgaatgaactacaatctaacgtaagaatcaaagcatgttcaaaataagaaataatgttcatgcattcatggaaaaatcaatcaaatcaagtaaaagagagggaatagaaagcttacccagaacaagatttgatgaagatgaggatgggaagcttggatcgtt

SEQ ID NO: 226002 - DNA, 2843 bp, Cannabis indica
tgagttgccctgtattttgtgtaaataaaaaaaaattattacgtaactatacattgtaaaggtaattttcaactatgttttaaactcgtgatctcgacgtatatggttatataattataatatgataagattaattttgttttagcaagttttcaaatacgggcgttacagttttgtatcagagccaccaggttagtgtcgagctcaattaacggtttcgtaagttgtacttttccaaactgtttaagatatatcgcatacatgtgtaaattgttgtttaaaccctaaatgcggtcttggaaatactttaacctttttctaacctacatgcctcatgggttcgcaggctaagtcctaacaatggacgctcgacaaaacgttagaggacgggcaaaatggttgagaccggagatggtcgaggtggtaaaaatccccaaaaccttcgtggacgcggtagaggtcacggtcgtgctcctaggggtggtcaagagaatccatctcagacgttgtttgactgggagcaaaagtttactgagatgaaagccagaattactcaacaagatgaaaagattcgaaggttcagacaacgggatgctcctgttgagcctcccctgtaactgcctgctgctgcagttcccgcggtgctagcagaatagtatgttgctggcaactgtatggggcccttatatgagaggttcaggaagatagcaccccaagtgttcttgggtggtcttgatgtacttaaagtagaacaatggttaactgtgattgagaggatattaaatttcatggagttactaggaatgaccgagtggcatgtgccacgtttcaattccaggaagatgacttggtatggtgggagatggtatccctcactaaggatgttgccagaattacctgtgaggaatttcgggacttatttaatgctaaatattataatgaggctatccggagtacaaagcggaaagagttcgttgagttagtacagggcgagaacatgacagtgactgagtatacgaccaaggttgatcacttggccaaattagccttagggattgtacccacagattttagtaaaaaggataagtacttggcagggttgaatgccaagattaagcatgatttggttatcatacaaatgatactacaacctatgctgaaatggttgacaaggctcttcgagctaaaggagcaatcaagtttctacaagaaacctgagaggttcctagtgctggtagaaccactactctccctatttttggacctggcaaagagagtggtgattccactatcgagtacaaaaagagaactttcccacctatagggagttcaaggcaaaacaagaggttttgtggaaaccaaagtaaagggggacgtcagacctactcctatcctgagtgcccgcgctgcaagaaacatgaccccgggacttgtaatcagagtgcttgttttcagtgtcgatcagtggggcacctcaagaaagattgtccccaattgaagaaagaggaacccaagccagaagccaaacctgcaccagcgcgtgtattttccatcacttaggcagatgcggccgccagtccatcagtagtcacaggtcaacttcttatcaacggtattgcttttactattttatttgattcgggtgctacacgttcatatgtagcatcaaagtacttaatcagcttggtaggcctagtgatgattttgaggtggggtttggaaccctattacctaatggggaattgattatatcgagaaagtgggttagatctatactaatcaaaattgagggcagagaactaagtgctggtcttatggagttaccgttcgctgagtttgatcttatactcggaatggactttttgtcgaaatactctgctagtatttactgcaaatgaaaaatggtgattttccaatcggagaatgaggaaccatttgtttttgttggttcagttcaaggttctcgtgttcaagaatctgaacattgaaaactagggatttactacgcagtggatgtgtaggattcctagcggttgtagttgattccagtaaacctgtgttatttggactcgaggaagtcaaagtggttaaggaattcctggatgtatttcttgaggaattaccagggttaccacctcagcgggagatagactatattattgatttgatacccggagcagaacctgtttcaaaagcaccttaccgcatggcacctgtagaattgaaagaaatgaagatacaactccaagggatgctggatcaagggttcacccgacctagtgtgtcgccttggggagctccagttttgtttgtaaagaagaaggatgggactattcgaatgtgtattgactactgagagctaaacaattaaactattgaaaacaacctttgcctagaattgacgattttttcgatcaacttcaaggctagagagtattctctaagattgatttgagatctggttatcatcaattgagaatccgagaagaagatatcccaaagacagctttccaaactaggtatggccattatgagttcctggttatgtcattcgggttgacaaatactctggcagcctttatggatctcatgaatagggtattcaaggatttcctccatagctttgtagttgtatttatcaatgatattcttgtgtactctcggtcggaagcagaacatgaacaacatcttcgtatggttctacaacggctaaaagatcataaagtttatgcaaagttcaaaaagtgtgagttttgactgccacaggtatcttttctggggcacattgtcagaaaagacgagattatggtagatcccggtaaggttgaagcagtgaagaactg

SEQ ID NO: 226003 - DNA, 1815 bp, Cannabis indica
tcaatcatatcttggaaaagcaagaaacaacaaactatttcaagatccttattagaggcagaatatagagccatgacaaacactacttgtgagattgttaggctaatatctattttaaaagaattaaaggtttagcatgaagggcctgccttgctatattgtgacaacaaatctgctcaacatatagctattaataatcaagttttttatgaaaggaccaaatatattgagatagagtgtcttttagttagagaaaagattcaagaaagaattatcaaaactgttcatgtatcaactaaagatcaacttgctgaaattttaaccaaacctctctttcccaaccaatttaagaatttcaaagacaagatttggctaagagacatttatagtacattttgagggggagtatcaagctcttcagagttagaggttagtcagatatagttgctgctgtttgttattcttgtaatcgatttcaattgctatatatagctagctcatcacttgtaaacacttcatgacaattcagtgaatatagctacattatccttctctctgttttctttctggttttctttcttgttttcttacttatagttatagatactaaagctttttacttcactttttacataaaaatcgatgttaaaaggccagttcttttataattttttaatttagattgacttaccaatatttttaactttgcatggatagactttggttctcatatgcttgacatcacccgagtctttcagcctaaaaatgaaagacaaagcctatttttttttagtgtagcctccttactctttcaaccttttgagttcgtcctttaatcaaaagctacaaaccgtgtagtttacatttagaaacttgaagttctatgtcgagtttagttttcatctgctacttcttctatttttctcttccaattaaacggtgtgtattaattaattaaaatttagagccaaaactatttggaaaaattatcctgcctatgagagcattaataatcatttagaagacatgaggaggtgaaacaaataaatccagattatagatcgctttcacgttcttacctcttcataaagcagtccacactgtcattattattattgaatttttatatagtaaacggatagagatattcattcagcagcgaatactcatccattttgtagcatcatttagcaaatgtgtatcacacatcattaaaaagatgcctctgatttgtcttgttttataaattgttgaatgacatagcatataattagggttattttaattgagtaaatgcattcgtaatgtaacatcatttttttagtttctatattttcattaacccaaaaaagaaaaaaggaaagagaaaatggaattaataccggtggataaatctcatttaatcaggaattaatcctccaacaagtcaaatcacaagtgaccattagatcttctccacttagataaatataccatcatgattaaaataagaagaatttttttttttttgcaataacttgtatggtttgatgagtaacatgtgtcatttatttcaagcttgtggactccacaagcataatagaacatgacacatgaaattcttttatatttatatataatgaacattgttatggatgtgacatttgataaatgactaagggctcgtttggaacgttgtattaggtcgtattgtattgtattatattaaatttgattatatatcatatttttatataatactatgttaaattttaatttatactaaaatattatatagttaggtgtccataaaagtcaataccacatataatttta

SEQ ID NO: 226004 - DNA, 1870 bp, Cannabis indica
gaaatttttttaaaaaaatattaggagcaatttttgaaaattattttgagtttaattttttaaatattacttatcattttgtagggtgtactttgcatataatattaaaaaaaatgatattatgcatactgctcaatatatcaaataatctcaatcatatatatttgcatacaggggcagaggtatgtagcagccaaaggtggtctttttttttctttttgaaagagagaggacatcaatgtgccgtgacgacggaaaaaatatcatcgcctcggcatacaatcaaggcaaacaggcagccattcttcagagaacgacccgacccgaatccacttgagagcaaaacctcattcttaaactaacgataccaagagtaattaatccaaaatcacgtgtttagttttttcctttactctcatctaatttattatgaattttttgtaatatttatttccttgaattatattttttcttttaattttattataatggtgtaaaagtaataaattaacctttcgttttatcttttgaaagttcaaaattctcgtgagaaaattatttgttcacaagagaataattattagtgtgtagttctcaatgattgattaatttgaatttcaattcatattcttaccattacatgagaagaattttaactgatggaggagatttacttattttcataggttcatgtgaaattttggttaaattgcacaggatttgatagcatgaaaggttgtctcgaatgggtatctctggtcattgttaattacacccctttctgtgggagaatacaacagttaaaatataattaatagttaaaaataattttttaattgagaatattctgttaaaagacacaataatcagtaatacgcaacaaaaaaattaaatatgcacttatataataggtaagatatgtatcaatatagagatataattttttatttaatttttgttgatgaaatagcaactttattgaaatattagcattttgaaatacaaaaggacttttaaatcagctaagacattatgctcaaagatgctacaaccaaagagaaatcgagaatgtctagcaatagcatgaactactcgatttgccgatcatctaataaaacgtaagtgcacattatgttaagaagataacaaagattgacaatcctaaataagtaaaccaaaagtggaggacatggcttggttacatcgaatggcctggacagaaagtaaactatcagtttcaatctctacattaagccaattcttgctcttaatccagctaagagtttctttaattctcaaggcttccacaacctcagctggataaatgcctccttgaaagaacgtcttggcttctattaacttccctcagttatcccttgcccctaaaaaaaaccatacggacactcttgattttaaaaagcaacatcaacattaatcttgatttgattcaaacctagtttaatccaaaactcagacccatcaccattattttcaatcaacaatgataatagagtagaattgtcctgagccttcttccaatgatcaaaagtaacagatgctaaagcaatattatctgttacgatagaggtttgtttatcccaaacagcttggttacgggctttccacactgccaacaaagcatggcaacacgacaaatcaggtcagtatcaatggtatgcagcagagcctcaaatcaggtaccaaacaacactgagaaattaatgtttagaggtgcatcgaacacataccagcaagccttgacaaaatcacaagtgagtagggcatgtgtggttgtttcagcatgagtattacacacaggacacttagctgaaacttgcacatgtttagtgacgagattaagacatgtagg

SEQ ID NO: 226005 - DNA, 3200 bp, Cannabis indica
ataggactctacctctatctatttatttttttttttttgtttttttaaaataaaaaaaagtactctgataaataaattagttagatctcacgttcatgtttgtcggaatggaagttaacaggataacttcaaactttttgtgggtaaaagcccaatcagtcacattatgagcgacaaaattacaataactattaatataagaaaaaatacaactacaaaataaatgagagtaacttttacaaaatgagacatagtttttaatacttcagtgaaactcattcccattgagcgcattgataactaccctcgagcccttctaccacaattacaaacttggcaccaatatcctttgcattcgaaatagccaaacagtaagtcgccgcaatcccacacagagcatcagagaaatcaacagaggacgtctggacccaaaccactctaccaaggtggttcctgacaaaaactgaggagcacatgctatcaagcccaactctaacatcgcaattaagcttgatccaatcctaaggtggaggagaccagctcaccgtcgaaggagggctaggtaaatggaaaattgtagcatgtaaatctgcataggaaatacaaatatagtcaatacacttcttcacatcatgcaatatagttattatgtattttgtcattttgagtgcgccagactgtatcaaccacaacagacgcatataaaaaaatctcatccgcattaattcccttatgtttaagatcccaaatgaatttgatcgagtcccacatacggattccagtgtcccgaatcggataaataccccaaggagaagatcgtcaggcatggaaagccacatcacaagtgagaaaaaggtgttccaaagattcatcctccctcccacacaacgggcaactcgcatcctatatgaaatctttttcttagcacagctctgacagggagggcactagagagaatacatcacaacataatcttatggagctctaacactttactgttccacaacttattccagagagtgggagcaacctcacaaaagggagctctttccaaagcctgggcaagatatgcagatttgtaagagagtcgcccgttactttctagggtccacacccactggtctttaccggtgcccgagggggcaccaccttgtaaaattgcagaaacagtctcacgatcgaaaagtctgttcaacttgtggatatcccagccaccatcattagaaaaaagctcagcaacacttctatcgtccatgacaggagaaccatttggcctagggaggaaattacgcatatgaggaatccaagggtctccccatatacgcgtgtctttaccatcagccacccgcttacaagcacctttctttaaaatggccttagactttacaacatttttccaaaaccaagaatcaaactccttataactacagttaaagagctcctttcctttaaggtattttgctgccaaaatcctacaacaaagagactgacttccgttaagtatgttccacccccacttagccagaaaggcctgattcatttatcttgttttcctaaagctgagaaccccccgagatttgggaagacagagtttgtcccaagcttttaggtaaagactgtggttatctttctcaaagccccaccaaaagtcacgcactaaactatcaattttgctcgctagacggttggagagtttagtggtttgcatagcatacaacggcatcgacaaggccacaaacttgattagggtagcccggcctgctttggacaaggttttcgctttccacccctgtaacttggaagtaagaatattgtccaggatgagattgaaatctgcatctttttgtctggatctgaacaggggaaggcccaaatacttgacatttctttcaggagaaccaatttccaaaacctccctaatctcacgttttagaccagtggacgtacgtttactaaagaagatggaggttttgagtttgttgacttgttggccaaaccaacaacagaatctctctaggcactactagtaacctctgacttcatccaaatttgctttgcccaccaaaattaagtcatcaccaaagaaaatatgggaaagaatcgggcctcccctgctcagtctgatgttcttaatagtgttcttacacaggggcttcttgtaacagcctagacaggacttcagctgcccaaataaacaagtaaggagacagagggtccccctgacgaaggccacaagagggtttaatctcacccaccggcccccccattgaggaaaatattgggtggtggttgtggtacactgagagatccaattgcggaactttcacggtatcccataacaagaaagcacatggtcaatgaacttccaatctagcctatcataagctttcatcaggtcaatttttatggtgaagtacccttctttgcctctcttccggttgaacgaatggaaaatctcctaaacaatcacattattatcttgtatattacgaccgggcacaaaagcagcttgagtggggcaaataagattaggtagaattggcttaattctgtttgcaataatcttggaaataaccttatacatcacattgcaaagagaaataggcctaaagtggtttgttcttttcgagttctgcactttagggataagaactatattcgtagaattgatacctttgtgcattttgccaaacctaaagaagtcagaaacagcatcacagacgtcatcacccaccgactcccaatagcgtttgaaaaataatacagacattccatcaggtccaggggctttataattattcatggcgaacagagtacttcgaatttcctcaagagtaggggccgtaaggagcacctcctgatcttcataagatattttctctcgaaaaagataattacagttaatcctctgatcaccaacagactcagagaagatccttttgaagaactcctggccaattaagtcacgggaagttatccaaatattatctttgtccaaaatactctcaatagcgtttctccttcctctaatagcggtcgtaaggaagaggaattcggaacacctatccccatctttgatccaagaaatcctagccctttgcctccaatcgaagctttccttctaaggactgttgagggatcttcggatgttactttcagtcttccagtcgcgagcaccgcaggtaaactctgcatcaatt

SEQ ID NO: 226006 - DNA, 3253 bp, Cannabis indica
tcgattggaatagtggtttatcggaggtcatggttgattatttccataatatattttctactttagatgtggattgggaaagtatggttgagagtgtccattgtttagtcactgatgtgtaaaataatgaacttctctcacttgtaagtgctaaagaaatacagactgctttgtcccaaatgcaccccgataaggttgctagcccaaatggttttagtccaagttttctatcaaaaatactggcacattattgggcatgatattgtgttagaggtgtagaagttctttgttactggttgatttcctttaggtttcaatgacacaaatctaattcttattcctaaaaataaaagtcatgcttatatgagggatttaagacctattgctttgtgtaatgtcatttataagattgaaacaaaggtgatagctaacaggttaaatttctttcttaattcaatcatttcagatactcatagtgcatttgtgctaaggagattaatttctgataatattctggtttcatttaaagttatgtattatctgaaaaaggaaacagttgggaaaagatggctatatggccagcaaactagacatgagtaaggcatacaatcatgtggagtggccgtttcttatggctattcttttgcggatgggtttcgattcaagatttattggtctaatttttgagtgcatctcttctgtgaggtatacgattgttaacaatggtagggagattggcctattatacccgagagaggtattagacaaggacctcctctctcgccttatcttttcataatccgtgctaaggtttttcttctcttattcgtaaatttaaatatcaagggaagctttatgggtgtaaagtggctaggggagctccttccattttccacatgctatttgcgaatgatagctattgatattgtaaggccaatgagagagaagttggctttgttattgaacttctttctttgtttgaagctcatttgggccagtaggtaaattatgataaatcctccatctttttcagtgttaatacaagtgttgcagttaaaagatctatttgtgagtttattggaattaaagaagcaggcatggagagtaattgcttcggtttgcctaatactatgggttgtaataagaaggccttggttggctttttgaaagagaagattcataagcgaattcaaagttgggatgagcgcttgttgtctagaatgggaaaggaaattcttattaaaattgttgtccaagcactgcctacttatgctatgagtatgttccttctttcattggatatttttaaggatgttgagcatatgatgagtactttttggtggaattcatagtctactaagaagagaggtatttcctagatggcttgggatcatttggctaaaagtaaatttgagggaggtatgggttttaggaggctgcatgaatttaaaattgccatgcatggcaagcaggggtggagattcttaactggttttgatagattgtttttttgtgttttcaaagccaaatactttccttgataactttcttaatgctgaattaagaaataatcttagctatgtgtggaggagcattttggaagcttagaatcttgtcaaatctggtatctgctggtgcattagcttgggttctcaagttaatgttctttctcagtcttagcttcccgatagtgcaaatccctatattgtttctcaacatcctggtttggatggtattactgtgaatcagcttatggtttttggtgagcatgcttgggataggaatattttggaagacttgtttgtggcaagagatattaatcttattttaagcatccccctaagttagagagatatccctgatagatggtattggaatcgagaaaccactgggagatactctgtcaaaactgcctacctgctacagctggaactttctggcgctccccaaattaataataactcgggttattggagaaaactatggaatttgaagattcctctgaagtgaagaatttgttatggcgtgattcaggcaactatcttcccacaaatgtcatgcttattaccaaaaaagtaagtattggtggattctgcgtgtcctctttgcgaacaagccctagaaacacttgctcatgtattggtggattgtgttattgctcgtaattgttggaagctatctccacgagggtacaataccagtttctaatagatatttttctaattggctgcctaacatctttgacaatttttccaacaaggttgcaagaattattaatgtcatctattggcaactttggagacacaaaatgaattggtttggaacaaaactactttagttgcttttagcattgtaagatcttttgttactctgtttgatctatggaatattgttcatgaagataaattatctactcctcaaagatctgttggttctgttagggaggttgagcacttgatgaaacctttgccaaatacgatcaaaattaacacaaatgctacaatttttgacaacacaacaaaatatggtttttccattgtcattcatgactctgctggtgtgctgatggagaccgattttgctgtgtggaaggccttgtgcgtgcggaggtggtggcgattggggtgaaagaagctctcagctggttgaagaataatcctattgttcatgccaaagtaaaaatcgaatgcatcaacgttgccaatgctaattataattctattgaaatgttttctatgtttggtattattatttataattgtcgagaactccttgcttctcttagaaatgtgtcgatttgttatgttaaacagtttgttaatgtggtcgctcattgactttctagaacatcttgttatcttcctgaccgtattattagagaggataattgcccatgtgatttgttgcgatatgttgattgtctcttttagagtaatttgcggcataaatacttaagtttaactcccagttgcaaataaatacctaagtttaattttcagcggtaataatacataagttataattttaaaacttctgtaggtacttggttaaataaattgccatgtggtaattcctgattgatccaaatcattaaatttttattatttaaaaaaaatagttcaaatataccaataagaaaatcatgttaatatggcttaacatttaacggttagatacctacagagttctagaaatataacttaggtattattaccgccaaaaattaaatttaaatatttatttacaactgaga

SEQ ID NO: 226007 - DNA, 1667 bp, Cannabis indica
ttatatatttaataatacttgtgtgataaattgtaatttaaaactatacatatttaattactattaactaaaattttcgaaaattgattataaaataattaaacttaagaaagaaatattttaaagaataagaaaattaagactttacatagtttagacgttaatgaatcttgttccacgagttaatattattgagctaaaaaagcttcaaagtatctttacacaaatatttttgtcctagcagatgaaccctaattcttagcatttttctcagaattgatttgcagtcgatccccttgtatgaggggatactgttatatttatagggtagaaccgagtattgatgaacccgaacccagtaggatttgaaggtgtcaactaggcccacagatggggtaaaatacaatatatattgactttggattgattgggtgacacccaattcatgaaataacggtcatccatacgagtgaggaccgattatatatgatgccacgtgtcacaagttgttgtgctggtgatgagaatgtcagataatatgtcattgacaaaaggattgttgcattttggtggtgtgcgcactctttgggcttggcgtatgggataaatccctgacatggtgggaccccatgtctggaggacgttacataggatgatattcgaaagcttatggatgtctcttcaattacccgtatctgaattaccccatgactgcatcaatattgatcttgatggatcatttgccttttgggccaaacattatttctcgaatcatagtggcctggcctcgtcacgtctgtaggctgaccttacatccgaattcaaagtcgtagcttgactccgtaactgggtttacttgctaacttgattgggcctgctaatattaactttggacattggaaaatgcacacgccatctatctaaaaatatggataacatgtattcccaagccttcagggctcgagaatcatggaggcttgtagcctactcccagattcactattggatatgaacccatgaataggtacaagctcttaggattctaaagtagtaagtggtggaagcttgcgatctttttgtctgatggaaatggagtacatgtgtcgtgaatcttttggtccgtgcacactacatgccttgaaaaagcacgtgaagcctgaggatgtgaaatgacgactaacttatgtcagcgggattttcgaggtgaatgtcatcataagacgacatcgatcccggatacatcattaactgcaacccttccctattctcaaactgttagatctcttttatgttttctaaattttaatatgggttgtcagattaaaagcacgtggatcaccactttgtatatgtagagtgaagattgactagttactactttcgtcactttaaatttctaagttcaaaatttccaaagggaaaaaatttcccaagagagaagaaatcctcaaatatttactaatgaatgtccaatatcataaaagaaattcttcacattcgatcaagactatagctagacacaccacccatatcccttaccatagatccttcaaagccatcgaagtcgatgggtttttaagcaaatttcgacgaactactaggacgtgcccaagattttcaggcaaggctcagacgtctcgatcgaatccccctgactatagttttca

SEQ ID NO: 226008 - DNA, 2499 bp, Cannabis indica
tttttattattttttaaaatttctttattgggtattggattatatttgagggttgacgtaaatgggtttttttttttttaattaaaattttttattatataggagggtttttaatgaattatgtgctttacgttgatggacgtgattttggcggcggctgctgattcttgctgctactgctgccattgttggcgccgctggtcttacggttagttccatcagagtatcaaatcagcgtcaaaaactgatatgtaatatacatacttttgttttgcggtttttgccatgcacatcttatttatactccggtaactccattgatttcttcttgtatattattattattattattattattgaacacttattctaaaaatataatattaccttatgttatattaattaagggtgttgataaaagaattaatccaattcaatttacatgatttaatctagatatttgtacttatgcggattaaatgttgattgatatatttgtaccgattgaatgttgattgagataaccaattcaatataatctatacattttttataaaataaattaaaaaaatttataacgcaattaatattttaatgtaaaaagaatagtaatttaaaaatttcatacatataaatataatataattatattttaaaacttcatacatcaaatatatattaattcttacatataatatttttttacggattatttaaaataaaattaaatatttctttatactacaatttttttattcttttaaatttattatttgttattttatttattttaatttattgttggagacataaaataataataattcattttattttgttactagttatatgaaaaaaaaaatatttttttataaatattaattaaataatttaatattcaaaagtaattaatttaaaataactgatctaatctgcacttgaacgaaattgattggatttgatcatttgagctattgtgtagatgagattggatccaaaatataaaatacacacttgatgcggattagattcactatgagcaaaatagtgcgaattaaatttgatgaacacccttaatattaattgtggttatataattaagagtgttattattttaacattataattatgattataatttaaatttaaatttattatagatatgtaacaaatatatttttattattattttttaaaaacaataaataaaaaaaaaagttttatgttactattgtgacaatcttggttaacaaaataatatttttttaaaaataaagaaaagtataatatttctacaaaaaataaaagtattataaaatttaaaggtatgattaaattaaaattaaaattattaattatatgttttttatataagtaatacttaaattaagtaatttttaataaaaactgatatgatttattaaataaaataaaaacaaaaaaattactcaatattccttcttgctcttctctttctttcttccttcttcttgtttttactaaattttttgaacctatatatatcttggtgttgatttctttattttttgcatttattgtttctagttttagataatctgtgttgaccctgttttattttcgattgttgttctcgatttgttaatcttatcattgctaattgtttgattgtttaaagtttcattgatttttgattctgcacttttagttgtaattttcctacaaataagttgtccctctcttcatttaaaaaaaaaagttcctctctttattaaaaaaaataaataaataatacaccacccttcccccaaaaatcgcccaacccaaattcggaccacccattccaagctaacacactgcacctcctcacagttactttgcaagcacttggatttcgaaaaaataatgggcaccccgagagtttttggtgaaattgaaatcggttgttcacatgtctttgttgcatgaaaccttcttgaattacttaatatcatcatttagaacgtttctgggttgatttcgtgtgatttggacgttgaaaattcttctattctatctaggtttttatcgggtccacgtgacccatatgcaactaaactgggtcgtttgacctatctggaggaagaagaaggagaaacgacatattgttttccatggcagtttacaaaaaaaaaaaaggaaaatttagaaaaatttcaaaatattatttttttattttcttatttttgttaatttagtcattaaattacatttgtttaaattttccatttttatttaatacatattttcatatattatatgttatttagtaaaaaataattacggaaattttttaatttgataaattaattatatgatttatttttgcttgaaattgtaataattgtgatatttaaagaatgtgaatattaaatattctataattactaattaaataatttattgattgaattaattataatttttcattaagtatatattcaggattttttgcatttaattcatttcctataattaaat

SEQ ID NO: 226009 - DNA, 1432 bp, Cannabis indica
catcacgaaaccgctgaatagaaataggatctcgcccttttttccattgtctaacctctcttttacaatttgaaatttttttgtttgaagttacctgtatactctcttccccaaacggtaagcatctccccacaatacttcagcttttcaataatcggttgaccactacaatgctcccaacagtcagtcacaacttgtaaacacatgggctcacgaagccatgcattctcaaaatggaattgtcgaaatggagttgtaaaacttcagatgataggctcaaggagtaaagggcaatggtccgaagttgtgatttcaagattagtgagcttagctgaattaaaccgttgaaaccattgagaacttaccaaagcacaatcaagacgaacttctatccaggcttcagtacctcttccacgctcctaggtaaaaggatacccaatcaagtcaagatcaatgagatcacactcaacaacaacatcattaaacccatccactaaccattgaggataactgttgcctcctcttttatcaagatgactagttacattattcaaatctccaatgacacaccaagggagagtagactctgacttaagagttctcaataaatctcaagttctacaacgcaagcttctattgggctccccataaaggccagttaatctccaaggggaggaagcagcttcagatatctgaatgtcaatatggttgaatgaatagccaagcaaccaagcttttgaatcattacgctagagcatagccaatcccccactatgacctctggaatcaaccaaaaataaaccatcaaatcccaacttaacatgtagtctttcaagtttctcttatccagaaaaagtttcacaaagaaaaagaaaattggatttcttttggaccacaaggtccacaaggaattgataaacccacgggttcccaagcccacgataattccaacttatgatactcataatgaacggtgggcctaggaaccagaacccaccgaaaggccattttttgagcccatattatcattcacatcaacttcttcactaacctccatctcactaccattatccactacaactttatcaatagacccatccacttgggctcgacccacatatttcttgtccatgttttctgtatgattttccactgtacaacgtcatttggagtctaaaataattaaactttcattcccatctccaactcattccccatcaataaattattactgtttggagcatagtcaaccttaccattatggcccatgatttgctccttaagtttaggagctgacaaaaaatctgtaccagcttccttcctatacgcatgcacaatcccatgactcccctccaataatctccacagaaccggcctattcaatggcatccccctgctgtaacaggcgaactggtattccgaccggcaaaag

SEQ ID NO: 226010 - DNA, 1780 bp, Cannabis indica
agttacatcaaatatataattatttatttttaatcgttagatttattattaaatattgtggttaatttaaaaattaattaacaataattaataaattacgcctaattaaaaaagtactcttcgataatgaaatcctgcctgaagatgttacacccataaggataagtgtaaatggatttttgtgaataagataaatactaaagggaagttagaaacctttaaagccaggctcgtagccaaaggctacacacagcaagaagacgttgactatgacgaaacattctctcctgcagcaatgcttaaatccatttgtattcttctccccatagttatcacttatgattatgatatatgaaaatggacgtcaagattacttttctaaatggaattcttgatgaaaccatttatatggaacaaccagaaagggtatgtgctaccaggggaaggtcaaaaggttcgcaagttgcttaaatccatttatagattgaagcaagcctctaaatcttgaaatattacgtttaataagactattaaaaagtatggcttcgaacaaaatgaagacgaagcctgtgtatacaaatacattaaaagtaatatagtagtattcctggttctttatgttgatggcattgtacttattggaaaggttatcaaacgtaaataagtggttagccgaaaacttccaaatgaaagatttgggagaagcaagttgtgttctcggcattaaaatctatagagatagaaagcgaaaaatattagcactttctcaaacaacttatatagataaggtgctagaaagattctcaatggagaattccaagaaatgacagttaccgtccagacatgaaattactttatgcaatgatcaatgtccaaattagactcctcaggagatggagaacatgaggaagtacccttatgcattagcaatttagagtttaatatatgcaatgttgtgtacaaagcctgacatatattatgttgtagggattgttagtcgttaccaatcaaattcaggtttggaacactgcatagttgtaaagcacattctcaagtatcttcggagaacgagggatctcatgcttgtatattccagaagagagttaaatcctactggatatactattctaattttcaattagacaaagatagtcgaaactcgatatctgggttagtattcactcttggtggtggagctatagtctagagaagcattaagcaaactagtatcgcagattcaaccatggaagccgatatatagcagcttgtaaaaaagctaaagaagtggtttggttgaaggaattcgacactgaactggaagtaattctagaagtaaacaaactattagagctctactatgacaacagtggagcggtggccaactctaaggaactaagaagccacaagagaggcaagtatattgagagaaagtaccatctactaaaagatatagtagagagaggtgatgtgacggttttaaagattgcgtcagaacatgctaccaacaaatttttttatgggtcatataactaatatgggattaaatgcccaatttacttttaggcaagtgagagattattagggtttatgccttgaaaagcttgtaaagatatttatgtttataaataagagttgaacatttttatatatgcttgaatgttaaattattaatattgaataatttatatatacatcgaaaaattccttattcatacttgaggatgtgacttgtattgtacggagaattaagatcacttagccatgaataaaacagtcagca

SEQ ID NO: 226011 - DNA, 2423 bp, Cannabis indica
gatgtaccaaaactgataaaacgccttgacagtatttttggaaagtacacagatgattatgtcaacctctgcaacgaaagacttgtcaacgggtaggtatttttgcatttgaacaactcctatcatattgtgtttttgatatgtttttattctgtttctagaaacctggaactaccaaaggattggccaccctctttggattttgttcggctaaaggatctctcaaacaaagaatctgagagtgaattaatttgttcatcttctgatggaagaagttatgtggagaattcgaaggtcagcgagagtttgctcctgatgaaattctactccttgtctcatggtgtagtaaaccacttgttatctgatcgtgatggtagggaaattgatcttccgtatgaagtaacagatgaacaaatggagaccattctgtttaataaaagcagctttatacttggaaggtcggggactggaaaaactactgttttgacgatgaaactattccaaagagagcaattgcaccattttgctatggatgttttctatggaatgaaaactagtcaaaatagtatggaacctgatcagctgttggagaagaggaatgaagttttgcgtcagcttttcgttacagttagtcctaagttgtgcaatgccgtcaagcaacatgtttctgacttgaaaaggtgtgtaaatgtgtttcaccatggtggttatatgttgattcagtgctaaactaagattgtatgttaattgtaagaactttttaatcatatatcatgatgtttttgttacttggacaggtttgcttgtggtggtcgcaatctagatgaaagtagtttgactgatattgatgatataggtgatgaagaagaacagttcaaaaatatcccagactctttttatgacatccctgctaataactacccattggtcataacatttcacaagttcttaatgatgctagatggaacattgggtaactcttattttgaaagattccttactgtggaagaactttcatctgatcaagttagaatttcaagatcagtgttgcttcagaacttcttaaggaacaaggaagtcaactatgagaagtttagtgctttatattggcctcattttaattccgattcaacgaagaggcttgatccttctcgagtcttcactgagataatttctcatatcaaaggtggtctgcaatccattgatgcaagcgacagtaagctaagccgtgaggattatcttaaaatgtcagaggggcgttcctccaatttaactcaggaaaagagagagagaatatatgatatatttcagatctatgaaaaaaagaaaatggaatatggtgaatttgatcttgctgattttgttaatgatcttctctctagactcaagcatgaaagatataaggcggatgaaatgaactttgtttatattgatgaggttcaagatcttacaatgagtcaaatcactttgtttaagcatatatgtggaaatgttgaagaggggtttgttttttccagtgacactgcacagaccattgcaggggagttgattttaggttccaagacatacgccatctattttacaagaagtttgtattggaatccaagaatgaaaatgaaaagagaaaagagaaaggattgatatctgatgttttccacttgtctcaaaactttcgtacccatgctggtattctgaaactgtcacaaagcatcattgaactcatttatcatttctttccgcagtctattgatcccttgaaaccagaaaccagtttgatatatggggaatctccattgctgcttcaatgtggggatgatgaaaatgcaatcatgaagatttttggcaacagtagagagacaagtggaaatattgttggctttggcgcggaacaagttatcttagtaagggatgaaaatgctcgaaaggagatcgctggttatgtcgggaagcaagctcttctactgactgtattggagtgtaagggacttgagtttcaggtaagaacacaatttgactgttttagatttttaaactggctagtgtttgagatatctcggtatagtgcatttacattcttaaattgttaaatattccaacataatgttaattcttttgcttctataggatgtattactgtacaacttttttggttcctcccctctaaagaatcaatggagggtcatatatgaatacatgaaagaacaagatttgtttgacaacaccatacctaacttcccaaagttctccgagtccaaacataatattctatgctctgaactcaaacaattatacgttgctgtcacacgtacgaggcaaaggttgtggatctgtgaaagctcggaagttgctgaacctttatttgactattggaggaagaagtgtcttgtgcaatctaaaccgcttgatgattcacttgcacaggc

SEQ ID NO: 226012 - DNA, 2301 bp, Cannabis indica
ttaattaaaaaaggtttatggatgttggtgcttgaagaaaactctgcatctatatctggtcttaatatacctccattttcaaccccttcgacatctattatatatatatatattgtatatgtgtacgtatacaactcgctcttctctctctctctctctttcagaaactttatattatattttatttatttatttaaaaaatgaataataatttaatgaaattgattattttaattgggggggctcgagttaaagcacgaggaatatatgtggttttatttttcctttcaaggcgtggttctgtgcagtttcccagttcttctgtatattaatattttaacctgtcgttctcctccgtttggtattttcaacacgtgttctttgcaaatttggggttacttaacggccaccttttaactctgttaatttcgatattggtcctttgattctattatattcacagcttttgtccccccgggtgggtctattaaaaaaatctcacttttagtattcaaatcttaataattaaattagggaaaagtacagtttggagagatggtatatatatcgtccatccatgtgattgcacacaaaattcctcgtgaaaatatggctcttcaagacaagcttcttttctagaattactcacacacttttgttgtcatggattattttattattacaaatatgagtatttttttttaatgaaaaaataagttatacaggagccaatatttcattataacaatagggatataatattgagcagggtgctacacaacagtaatatcttttagtaatttttttttaaatgtttaatctattttttgaaagattaaatatttaatttattaataatcaataatgttattttaatttttgttataatttgcatcataaaatattattgtgcattggagcacaataacaaatattgtaacaaagaaaaaaatttgaaaatgctcctcaaacagtgttagctaagtgtatggtaaccttttttctctttttatattgatcctccttgagagatcttgggagtgttgcattccctgtgtttgctttggtaatacactgctagtccttgtttgtttggtcagtggctatttagcatggcatcaaaaggtaaagaagtgatggacttcgttgaatccagtgtcagggagactcttactcttcctttcgaacacgatgacgaggtcagtctagatatttgggaaatataaacaacatatgcaatgtctagatgagtaatagggagataaacctgactgccaacgatgttgcgatccaaagtaggatctttcaaaggagatccatcgaaaaagagaatactaaacattcaactcggagaaagtgtcaacaactctagtatcaataagacgagcacactcaacaacatcagtagtgtactttgattgagagaaaagatagccttatggacagaaggcaacttcaatacccaaaaaataaacacagagacccaaatactgagaagctaattttgactttcatatttcaatttcctgtaaatcatcccatgtaataatcataccatcaacatataaggaaagtcgaatacgacctgcagatgtgcacttgacaaataaagttgaatcatgatcacttgaaacaaatctaagaaacaaaataatagtagagaacttttgaaaccatgctcggggagcttgtttaagactatacaagattttttttagcttgcaaacctcgccttacttatgagaaacaccaggaggaggaattatgtacttcctcatgtaagtcaccattcagaaaggcattcttaacatccatttcagatatatagtccattaatgaactgatgccactgatataagagtacgaacaatagttatttttgcaacaggagcaaaagtctcctcaaagtccataccatattgttatgaaaaatctttagccactaatcgagccttgtaccgttcaatagatccataagacttggtcttgattttatacctccaacgagaaccagtaacatgcttacaaggaggtaaaagtactaaatcccaagtatgagtcttttgcaaagcaaatagttcctcattcatagcacgctgccaaagggggtcaataacttcctctttataagataaaggcccagaaagacaatgaatagatgctaaaaataaagtaaaataagaagagtataaaatttagttggcgagtagacttacaaatgcgttgtggatggtagggttgtacaaaaaaatttgtaaatcgcccaaaccgaataatcctcccaaaccaaatcgaaaaaac

SEQ ID NO: 226013 - DNA, 1820 bp, Cannabis indica
caaatattttgaaagcattgacaatatcacgttcccggagtagccctcaatcaacgaggtataagttctagaatctggtatgctacccattttaatcatctcatcaacaatatctctagccttggacatcaagtcggccttacaaactccatttggaatagtgttgtaattgataagacctaaccttataccatatttaaccatttcatctttaatcctacaagcctcttccacattaccaattttcataaacccatcaattagtggattgtaggcaatttcataaggcttcaatcatgcattaacaatttcccttaacaacttacttgcaactaccagtttccttttcccacaatatccattaataagggttacataagtatacttgtcaggaactaaacccttttcagccattgacttcttcatttcaaccgcttcaccaacaagcacagctctgcataaaccactaatcatcatgttgtatgtaaccccatttgggctgcaacccttttcatccatttccaacaaggcccctttagccccatcaacatcaccagccctaaaataagcctcaataacattagaataagtaaacacataagaggatatcttcatcttcaacatcccatcatggaccttccaaaacaatcccatattggtagtcctcaataactctttcagcaataaattgcatgaaagcaaactaggcaagaactcaacacttttcagacccaaaaacacatccacagcttcatcaaacaaacccaatttcatatacctatcaaccaacatatcaaaaatgacaggtctagagccagcacattctctaaaacacctagcaacacagctcaaaatatcaaaaggggacttccattgcttaatcatacgatcgataatatcacaggaaggcaaataaaaacctgagttgctaagggaaatggcaagaaaagacaacacctccaaatcctgtgaagtacccactttggtttcggaccatataaaaaagtcaaggaggcgtttcggctcaaccaacctattatggcgaataacggagcgaattagttctgggtttagcttattgggtatgtatgatgagtccataaggaacttccagttcttctgcgtgagaatgttgcaaatttctttaaccgagctctgggattgcatactgcaatacttaatgcttgtgcgagcatcaactatagggttgggcgtggcgcttctagttggaagccagtacaactttttgggtatgagtctccacatcttttctactaccacttgtacaaaggtagaattgagactataaaggaagcaaaccaaggaagagaaaacaaagctctttcatcaatctcaatccaaaatataaaatacaaaattgcaaaacacaccaatgtcaaacacaaaatacaaagctataatacatgcatattatcaatatcagtcgattcagtttctgaaaaacaaatgtaccaagtaaatctaatgctttaaaattgactagcataggacttgaatctttgattttatcaacaagtacccaaactaagattcaaacaaaattgcaacaaagtaaatcatatcaaacccacttaaaaattaaataataatgataactaacacttacaaagagtatataagacaggtcttaggaaaataacacagaaatatataaaattgaagattttcaagcaatttagttaaaaagtgaaaggagaagaagaacagtatttgtagaatataagaaaaagggtctagactattacttgattgcaagatgttgtatgtcttaggtaaagtagggagttttaccaattcat

SEQ ID NO: 226014 - DNA, 1906 bp, Cannabis indica
agagtttatataggcaataagagccgattacaaagaccaacttgaccaacttgatcaaagaataatcctacacaaacttaactaacttaattaacacatgtgctaatactaacctccaccaattttagctcacaattagaatgctaagtaattataaactctatccctctctcttttcaaccattcctcaacctaaaattttcactataatttttataatcatgcaatcaacaaaaaagaatatacatattgtacatatgacataatgagtagtgcgatagaacaactttaaaatgtaattaggataagaatccgcatcggcttgcccattaatatgactgctgttatgacttttggtagctagtttgagtctttccataacgcaggggacaatgatgttgtttgtcgtgctgctacagtgtggaaagctcgcaataatgtcgtttggaacaagcaaatttcaacggtgaatgatgttctagtttctgcatcagttactcttgaccattggagaacagctcaggataaacatgctctattatcactctcgttcgagaacaacggtgatggggctgagctttggactaaattggcattaaatcacatcaagattaatgttgatgctgctctattctatcaagacgctacacacggcttcggtattgttgcacgaaacaacctgggacacctaatcgaagctaaaacattcagctcgggtggtatttattcagctgaagtggtagaggctttggtgatcaaggaagctcttagttggattaagagcaaaaattggcataatgtagaggtcgaaaccgatagcttattgactgtccaagccatccgaagtaatcaagaaatgtcctccgtctttggattaataattcatgattgtcgatctttattatcttctctacatgatgtaagtttacattttattaaacgatcagcgaatcgagttgctcacgcagttgctaggcattctcgctttctttctggctgtagcattttcgaacataatgtttggtctgacttaaaggctctcttgtattcataatgcatttaattcaatgaagttgatatttcatccaaaaaaaaaggataagaatcctccaaaatccaataagagactttaaaacaataataccactgtccagtagcattagtccctcaaaatcaagtttaatacgattccatttgtctcattccaatttcaactatccctcacactctttgtccatttggtattcaaacactataatacttgaaatcaacaatgtaagctcatatatcaaccccaaagctaaaataaacaaatacaccatcaaatcaaaacaaagagacatacaaaattctcgattcttcgcaaaacacatatagtttacaaacttaacagacgtgtagccttaaaacaccctaattcacaagaaatgaaacctaaactgcaaaattcataaactgaaaaacatgagcatgtatacataattcaaataaataaaatcaaggagaaatggagagattacccacaaatcgcttttcgaagaaaaccttaccaaatatgattgagaggaggcatacaatagagaatcaatcacaaaaaattatggttcccaaccccgaatgccatagctgaaacaatgagataaaaagctagagagagacataaatattgaagcaaagctactgaatgagcattgagctcttgaaggagaaaggaaaggactcacgtcgagctattgaccgaagataaaatatcacagaacaattaatcctttcaaaaaaacaaattaaccagtcaacaaagggcaaattgaccaatcaacagaggacaaaattataaatacttaattttacaaaggcaaaaaatgtcttcacaactatcatctcattaccacacttttataatagt

SEQ ID NO: 226015 - DNA, 4954 bp, Cannabis indica
gtccttttttcactagctattcaaattgactaaaagttgattacttataataatatacaataatagtatcctttttcggcatcattataataatttagtagtcaatctttattacttagtatctgtatgtgtattgcagctgttctccttaattatttgtgttttggtaaattggtccaaattaaaatatatattttcaattaagatgattaaaatattttacagcacccctttaaaataaatacatatgcacttttatttatttttgatatctaaaataacgttttagttaaattttttctcataatcatgtacgttataattatttaagacatccaacgaaatttgaagaaatttaaaaaaatttaacacgctgaaaatagagtttaaaaagtatattgcacacataattatttattttatacgcgtgtgaaatagactatttgaacgctatttttttatgttgtaaattactctaaatttcttataattttgtaaaatatcttaaataactataacgtaaacgaatatataaaaaaaaatagactaaaaaattcttctaaatactgaaataaataaacgatgcatcaatatatctctttttaaagagtacatcgcataatcacccaaaacaatattattattaataaatagtgaagaagtcacgtgcttcacatgtgactccaactcacattcttttttatatatttttttgcaaagtacttgcattctttatgggtagaaatttcacattattttattatgttattgaacatatttttttttttagaataatcaataattttgtcacctgaattttcgacaatactaatttcgcttcttaaaatatactacttgttaaaaatcattcctgaacttttatatttatagaaatttagtcctgctgttaggtaccatcctattattccgtttaaatgataatttgtaaattagtaattttttgacaactatcaaatcatacaccctcaaaataaaaatgagaaagattaaatatttttttttagtaaatataaaatataatttatgtcttaaaaaatcattttgaatgattacgaaaattaaaatttttgaaactaaataagcgatttaaaaaattagtttttttattaaaaatttcatttagatacaaaaaaaaaactaatattaaaaatttaatttttttaaaaactatctaattttttttcttccaaaaatctagatttgtttaaataaacctaataatttttttttttttcaaataattttatatatttttattgaatttttattattttttaaaatatgattttataaatataaataaacttgattttttcttcaaaagaatcttaatttgtttaaattatttattgaattttcaataattttggtttgattttttaagatacatggttataaataaaataaaatttgaaaatattttttttaaagaataatttaggtttttaaagtaaactgaatattttttaattaatttaatatttttattaggttctttgataatatttatttattttttcagaattaacagaatattataatttttaaaattaatttttttatttaaattttgtattggtcaaagttcaagcggtaaaaatgctaagaacctaataaaatgggcataattatgtaactgttatattttaagaaaaatttgtaacaagccgtatattttaattaaggggcatgatcatgtagtgttgaaaattcagaggacaaaaataataattattctattatttatggtggttttacgctgcacccttcaaaaattggatatagtgatgcacttcttttgtcgttttaatatccaggaagttattattttatttttttacatgacggtgtatattgtggttttttaaaatatcctgcaaaattttgagaaatacagaataatttataatacataaagtagtgttcaaacagtttaattctcacgtgtataaaataaaagaggcacgacgtgcaatatactatttaaactttatttttaacaccttaaattattttaaatttattaaaagtttacacgatcttttaaataactactatgcacactatgatgtaaaaaaatttaaattaaaattaaaactatttgaatatcaaaaatacaaacgaaatgcattaattcacccattttctagcagtgcaccataaaattttctttttatttatattgatgtcacaaatgttattaagcaggtgataattaataagtaacaatttgattgttgctaaaaagatcattaattggacgttaccttccttcacacacatttttacatcgtattttgagacaacatatcacttgttgacttatggcatggcgtaacggcccagaggaatgaagcaaggtacgagaaaatataagctcagggaatctcaggaatagcatcaatgatcataggaaagataaggcacctatatgtgatgaggcctaacttattgttggctcaaatagctgacctacagaaggtaacaacctgtcttacccaaaaacaaaatggtgaagactctcactcagacaatgacgatcgagggccttttgcagaacatatactggaagtggagctcccaaaatgtttcaagatgccagaattgacacaatatatcgagacgactgatcccagagatcatttgtcaaggtaaacaagtgagtctgagcttctatagctttgggataatgttatcagtgtttccaacaagggacatgtggattccaaatagaagcttaaggtccatcagtgggccaaataacataaaatgtgtcgagcccacgatccattttgccttctgggagaacaatagcaaactcacccaggcgaagtttcgtcaagcctagtcagcattcgaaaggtctatctccgtgtatctggaagaggttgtcagtgtgtattcggaagcctgttatagtatcccatttactgccttgcacaagatcacgaattacttcctaaaatttcggacaaagaataatatcttagtaaaaggagaaattaggtaattggaaatcaagtaattaatatgtcactaattacccttgaatataggacatagtatgaacaactagctcatgataatgcctccacatcagcatgtacaaggtgcctcatgggttatatttcaccagataagtaagtcaatgtattatttgtaaataccctattaaagggaaaatgataactagtatgacctttacgacactataaatactcaatgaatccttcatgcaaagggttggaaaatcttgacttatttgctcaagaaaagaatagagtgattatacttattgtaatctcaaatgatttttttagccaacttcataatcagggcggatgtacattagaacttatggtggccttgcccccctagctttctacaaatgaaatatatgtcatatataataataattaacaatcaatattaaataaaacaaattaagttgaaaagtcaaatgtaagtatagtaaaatcaatagaaataaattaagtgaattactaattgtgcatttcaaaacgataaaaataatatttaaatatatataataaaatataatttttcttaatattaataaaatattaattacatttcaaaaagacaatatatatataattagttaaatgaatatgtataagtgtggttctatataaattaacataataatttaaagatacttaaaaaaatatgtatgataattttaattaaatgattcatatatatttatcttaatttataatatttataaaaattttaaattgaatttagaagaataatatattggatcaccaatgaatataattaacaccatctacaaataaaaattttgttcaccaaaatttatagatatgaaattttattttgcatgtgtcgctcgttattggccctcctaaatatttaatcctggctccgcccctgttcataataatattaactcgtagactaaggctcattaacactccaaagacgtaaaaactcagagtgtcttcttcatatatttcattcttaattggattttcttgagctcttatatttaataattagttttttgaaaaacctagctagtaaattggtaacaaatagcaccaggtctacaaggacaggtcaagcttcctcagagagtagtgccaccaccaacacagaacccttaaatgctccatttgtatgacatccaagacctgggtatccattgttggtatttatggtccatattagagttagaaaagcaaaagtgaatttgataaaaataatttttatctaatatgaaccataagcccaaagatctcaatataatatatagattaaatctagactaatgaaaagaagacaatacttcttgtagcctataaagggatcctttctatcttttagtatattacaatcatccaatccaagaactatcattgaagaattcacattgcaattttctaagctagcctcaatactcaagaatagagtgggatattagatcttataggatgaacaaatttatgtattacagtgtattctcaactcatgggatactataattgagatagtgttgaacactatctcacacacaccttgaatggtgtaggtgtgtgagatgaggagagagagggagagagtgaggcgtgtagaagagaaagaatgggagtgaaaattaattttatttctctcaacttgttactatatttctcatcaggtttttgttgtctatctatttataatactatatatcttatacttagtgtcataaaaaatccttttaatcatttattaaaataaaaaaaatgtctaatttgatttaaattcagaatttaaattcaaatataaatatctaataactgattaacagaaatcagttaattttattttattattatcttttttaattaaatacattatccaataatatattcaatttcacaattaaaagataattaattaa

SEQ ID NO: 226016 - DNA, 2042 bp, Cannabis indica
cccaagcacccatcgcctaggttgacaatttgtcaatctaggcgccttccaagtatccaattgaagatcctagttttgcattgaatctgtatcatcaaaaacggagaaataggtccttctagaggaaaaacaacaattcatgggcataaataacaagacctagtgcctttgttgacacctagggctggctctacacccagattgacaatttgcaaaccttggccacaaaaagtggagtttttctttcaagcattatctttgtcttcggaaaatattgagattcaactatttccggtgaccaaaagaaatttctgaaggggcaaaactaggacccagtgcccaggttgaaacctagggctaggcccagtgcctaggttgacattttgtcaacctaagctttttccaatccagttcaacaaaaagtgtttcaggaattttcatcatcattaaaaataacgaagattcaagtaaactcagggagaaaactacaaactcgagttcctggaaatagggcccagcaccaaggttgacctggtgttgggcccatcgcctaggttgccaatcaacttgggatgatgccttgaattactcaaaagtcaaatctgatgcgaccgttaaatatagcatggtcgaaaacaagggaagaaaccccatcctcaagtttaaaagccttggaagtataaaaaaacagaatcccaaaagctcggtttaaagggcccattgccaaggtgaacaaatggcctggttcgttttgttatgcttatccgaaactgatgttgttttgaccgtcaatctagtttttcacaagtgcaataatccatgaatttagaataatcaaattcacaacttcaatttttttgcagattgactaactcagaaatcgcaagttttgagtcttccatttcagtaaaatagcaacatctccaagactggtgactagctttgctagaacatataaatgaactatatggtgttaaactattacttaggcatctcaaaggacaccctttggacgtttctacacttatagaacatccagattgacgtcagatgtcaatctgggcactggaatgtcaacctaggcgcttggacttgaattggctttagtaaaatggccataactcactcaatttttatccgattgacgttattcaacttttatttagaagttatttaagcattctatcatgtcatgtctcacactccagacataattctaaagatatcgttatcaaaattcacccaaagggagttatgaaaataagccccgggtaatctgcagcgggactcttcaggcaccaaaaattggccatcatcacaagaagcttatttttaccgttagatcatcatcaacgatggaaaataaattatttatattttactcctgttgttgtgagcctccttcacctataaatagagagctcccttagctcattttttacattctaaaaactactcacaaggtgagagcttatctctctctagattttagagtttttgataattagtctactgttgtaattaccatcttgtgagaaataaaaacttgaagtagacgcagccctattattatcgcgatatagggggtgaactactataaattttgtgtctctctaaattactacttaaatttattaatcatctcacaaatctaacgaattaatgttgaccactttttcagcatcaacaaattcttactgcttcaaaaaaaaaaaaacaattaaaaaagaaagggaatagaggaagagggcttgtatggacccattacatgggtgtgaatggagctgaggaaatggattattcaaaactatttaaatttatttgaaaacaaaaattatatgtctcaatattagggtttttcataaagtatctgattcgatccgttctgcacgatccaatccgcaaaatgcggatatccgtacttgtgcggattggattggattgaaaaatctgaaatccgtacttgtgcggatcagatgttgtttgacctcaaaaagtaaccaacccaatccaatccatacttaattatatatttaaaaaaa

SEQ ID NO: 226017 - DNA, 4698 bp, Cannabis indica
tttatttaataattaaagttaattatcaaatctatttattaatttgtaaagaccgcctatgttgatatgttggattatcaaataattagagtttattcatgagatttaattattatttataatatacatattgtggagatttatttaagttttacatatattaattatgctatatgtaaatttttcattttttgtgattgtgttcggtagcggtagaaagtgtcgttgggccattagagagtcacgttttgtgtgtgatatagaattttattaatagcggggcatcattgttaagtgtttgaaatatcaggaattgttgggggttagaatgaccaatttacccttgcttggttttaggcatttgatttatgttaagggtaaggaggtcatttgatggtttattcctttgtcttttgtggacatttaatctgaatatatgatttaattaattaatgataaaaggaaatgaatcccttagaaacacttagaataagctagaagaaaggaaacattgatcttctctttctctctctctctctctctctcgatttgtgatgaagcaagctaaggcttgattcttactcagcttatttcagagggtgataacaagatttgggtgtgttagttcaaggtattaattcttagctttcccctctttgtttttcttgaagttgaagttaggttttgatgttgaatttaggttttatgtggttgtttgctttagaagtatttaaatttgtattctaatgttagatggaggttatctatgatgttttaagctatgttgggtggttattgttttgtttgaaccaaattggagtttgagaagtccaactttgagctctaattgtgttttcattttttgagttgtttgtggtgttatattgcttggattgagtttattggaacataaccatgtattgtggagagttttacaaagtttgggtttgatttgagttgtgggtagcatttttggttcatagtactgaaccagtagaccggttaacggggacctgtagtaaccggtagaccggttggtccctaggaaaccggacttccggttgggatccggtctgccagttgggctatttttcaaaaccttagtttcacctatttttgtgtcatttgggatattaccatcccatttatcgataggattattcctagttttgattttaagtccctgataagtgttttagcgtgtctctcattaaattttgaatattatagttagagtcctgtaaagcgtcgagctgcaattccactcaagctgagcagcacacttgagcacggaaacgaggtaagatagcataaataatatatatgtgaaggtatgcttgttattaattgtttacactactaacactaacggaaatgtaattttaagggtgttagtgcagtgtaggattttaggatagttacagtgttaccaacacgagtgccaggaggtacatcgtgcatgtgatacaacacttagtaattcccgggagtacgataatggccctagaaacacgagtatgaagttggtactttagtgcatatggtatagtggtcgtattttcgttggagaacgttcttaaccatttggtgagctcggttattgagctcaggacggcttaagcataagccggtatagcattgcttatatatatgttatgcatatcttactgagtctgttgactcatcagtttgctaccttgtgtaggtaagggaaaagctaagctggaggagcagtgagttggagcttgagagtgattgtacatatcgcggcagtgcagcctagaaggtttcagtctttcaacattgtgagttgtattttatagttgcctgtcgtttgtaaaaaaaaaaatactacgagattttgtattagtaaatgtaatttcaactctgttttaaagctcgggatcccgacccataagactatataaatataatataataagatgaatttttggtttagcaaattttcaaatacgggcgttacataattagaccttacaaagtctcttaattaataaataaatcctaaaatttcttttcttcacaattaagcccttacttagtgaaaattcataaataagacagtctaattttagaattataattgatcttcttaagctccaccagctttgataccatttattgtagattaaaccttatcaagaataccataacaaagaactcaagcaatcaatagcatcgtgacaacaattcaacaataatcaatgaacaaaaagaaaatgaaagaatgaatctttatttcataacagtttggtaagaaatttaggagtagaatatacaagtgggatcaccaatacactagttactagattacaaatcacagctcacaatgagagaagtcacttctagagtgaacaatctatatttacagccctcaacgctcacaaacacaagctgaaaccataaacttcaacaatggtgatccttcttttctctcttttctttctcctctgtagaactctttcccatttagactttttctaataatgcgaaaagagaaaaaggcaaaatgaaaattgtattattgaatgaatggaaaagaactattttacaggctatatatacagggcagatcaggggtgacacatcaacccagtttaacatgtgcaaaacaccaggacaagaaccaaccgactcaacaaaataactaacctatctgacatatctaaactgaaataaccgattgaggataaataggagaagcagttaggattagtaaaaaacagctgacttagtattctgatagccccccctcaagagggacggtaaatgtcatggacgaacatcttggcaatgtgagaagagagtgtagtagaagtcagcagttttgtaaaagcatcagcaagttggagggaactgttgataggatgagtcgtatggaggaattcttgattttgtcacggatgaagtggcaatcaagttctatgtgtttggtgcgttcatggaacgttgggttgttggcgatgtgaatggcggagcggttgtcgcagtagataaaagcaggaccattgtgtagtatgtgaaagtctcgaagtagatattgaagccatgtaatctcactaccagttgcagcgagagcacgatattcagcttcggcggagcttttggatatagtaggttgcttcttggtgcgccaagagattaggcaatcacctaagaagacacaaaaacccgttgtagagcgtctagtagttgggcaagaggcccagtccgaatctgaaaaagctctgagatgtaaggtggagtttgtgctatataggagtccctggcctggactgccttttagataccgaattaaatgatggacagcttgtagatgtggtgtgcgcggcttggacatgaattggcttaggttgttgacggcgtaggtaatgtcgggtcttgatagagttaagtagagcagcctaccaattagttgtctataaggagagggatcggcaaggggttctccttgttcatcatcaagtttgaggtgtggatccatgggagtcttggtgggcttgctgcctatatacccggtgtcttcaagtagttggatagtgtattttctttgagacaagaagaggccttctatagagcgtgctatttcaaaaccaaggaagtatttcagaggaccgagagctttgaggctgaatctattgttgagagactcttgtaattgatgaagaagagaaaggttaggtccggttatgacaatgtcatcgacgtagacaaggagggcaataaaagtctcatgtgacccttttgtgaagagggtgtaatcagcaagagattgttgaaagccttcttcgagaagagcatctgaaagttttcgataccattgtcttgaggactgtttaagaccatatatggacttatgcaacttgcaaacaagaggggtgttgggtggagtggcagtggacaagttaagaccttgtggcaatgtcatatatacttcttcttgtaaatctccattgaggaaggcgttgttgatgtcaagttgaaggataggccattgtttgatggtggagatggctaagagtaacttgaaggtgaccattttggcaactggagagaaggtgtcaaaaaaatcaagcccttcttgttgtgtgtagccttgtgcaacaaggcgtgctttacatctttcgacggatccatcactattatatttgatcttgtagacccaacgacaacctatggcacgtttgtttggaggcaatggaaccacagtccatgtcttgtttttgatgagggcaaagagctcagtttgcatagcgtcgttccatatcttgatatgcacggcttggttgtatgatgtgggttcaaagagtgccgtaactgcaagaataaaagccctgtgagaatcagaaagtttatggtaagataagaatttatcaagtgagtgaggtgtagaggatctgtcatgaaggacagagtgacactcgtaatctcgaaggtatccaggaggctttgacactctgctggtgcgtctcagatgcttaggagaagtagcagcagtagtgatgtcaatggttgttggtgaagtatttggtggaacattctcggggcattgatccacatttattggagtaaaaagacatgaataaggtgcgctgatggtgattgaaggaattgttgctggtgtgtctgaattgacagcatcaggaatgtgtggttgcattgttgctggtgcggatt

SEQ ID NO: 226018 - DNA, 1612 bp, Cannabis indica
ccgtttattttcaagagaaggaggaaagaggattatgcaagattgaaagatagtatgactaagaaactggagggttggaagatgaaattgctatcttacgtaggaagattgactcttttaaaatctgtagcttcttcgatgccgatttatgcaatgtccacaactaagatccctttatccagttgtcgacaattggatgctttaatgagaaagtattggtggctcggaaatgtagagaaggatagattccttgctctaaaagcttgggataatatttgcactccgaaagcttcagggggtctcgacttgagaaggtgtgaagatatgaacaaagctttgatggctaagttggcttggtttcttgcttcgaacaaagatcgaccctggacaaaatgtttgctgaaaaaatactgtaaatttgaaagtttctggagtgttagttcaaaaagtaatgattctcatcaatggaaggccattctagaaacaagagatattttgttaaggggctcaatgtttgtagctgcttcagggggcaccatcaatttttggacacaaccatggataccttggttggatcatcatgagttcacagagctaatgcaacaaattcgattgagaagatacacgatttcaactctagctgatgtctccatagacaatgaatggaatgaggagatcatttttcaaatatttggagaagagctagggaatcgtatcattcaaatttctagaataccaacccctttctcagatcagatctactggaagaatagtctcacggggcaatttactgttaaatctgcttattttctagaccaatcatggaggtttgctcctcctaataaggtctagaattggatgtgggaaggagggattcacccaaaaacttcaatcctcttatggagactgctgaatgaagctattcctactaagaatagactcccttttgttggggataaagactgcatcttatgcggcaggggaggggaatgtgcaattcacttatttcgggattgtagttttgctaaggcggtctggtttggatgcagtctacctttaaagattgattgtattccaggcggtaacatgcttacttttgtggagaattcgatatcttctctgccatctcaggacagaaaggagttgcttaatttcattgggtgtgttttctctgaaatttggcatcagagaaatgccacttggactagaaacttggttgcgaatcccacttcagctatcattaacatcattagtgcagttcgagagatcaagaatgcgcttgcttgttcagaagggacaatcatggaattacatccaaaccatatgtctttaaaagatgataatatggatatgtgctctccaattgaggaggccagacatgttctctttacggatgcttcctggattaaaggagtggcaggaattgctgcaattggagtggagcggtcaactggcaggtggtttgttaaagcccaaagatctcattcgcaatctgttccaaaagcagaattaagagctattcttcgggcgctaaactaggcgattgaggaaggctggaaagaagtccacattctctcagattccttggtagctgtcaaggctctttctactc

SEQ ID NO: 226019 - DNA, 1555 bp, Cannabis indica
aaaccgtatttttgttatttttttgttatttttgtgcatttgtaaaattaaccctaattaaaaagcttagcaatattaattgaaaaacgaaattatttcaattattaagtgagttatctattcctacaagctatagcatatagctttagttaaatcacgtgcggaaataacttcatactacaaatggttaaaataaaaaaataaatgcatttaattaatagtagttaagcaaaccaaacaaacaatcattactctgtgtcctttcactatggttaaacttttacatctttagtaaatagtaatcgatgcttctattgaaactttattttttaactcggatcccaagatttggatctagactcgggacccgaaccttggagttgagattcaagatttgcgatttggacctgggacccaaattcaaacttggacccagatccgaatctgactaaatatattataattttatacaatttattcatacaagtcaatcttaaatatagtattgtattaaataatactaatataatataatacaatacaatctagcacaatataatacaatacggcatactaaagagctctatatgagtgaaatagtactgaatagattggataaactactcacatattattaatatgggataaacacactcacataagtttccttttctataaatcacactatatagtatttattcaattattaaaattttattataagattatgacttggtaattattcactatacgagtgtaatataaatatgttgtataaattacttatatgttgtatagtattcactataaagaagtatatgttctatagtattcattatattcattattttaattatatttatatttacaaaaaaaaaatgcaatttaaacaaagtgggtttgggaaagggtgatccccttctctgtcatgctctaaacgggttatggttaaaataattgttatattttaatttagtaatatttgataaactattaataatctatttttatcaatactagaatgtacaactgcagggagaaaatattgctaatgataatcttttttaatattactaaaagttagttggtcaaatagtgaaaagaaaatctcttgaaagtaaaaactgaaagcatataaaaatttaccaagaagacaagacttttaattttattaattatagttaaataatcatctacttgcaaccaactttatttgttttctaagttaaggcgatattgccaaattaaatcatttccaataaatgaaattagtatatcacataaaatggcgctatcacttggagatttcaagggatcctaaacttgcaacactcaaaggctcaactacaatgaaaataatttttccacctaaataattgttacttaaaaatagactaacacatagaatagatttgatgaaatagaaaatagagaaataataagtgataaaaaaaaaaatgagaattttatttaattgcaattttgagaagtcaactattaaccttataaaccgatttttgagaagtcaaagtatgaattttaggtgcaacctcag

SEQ ID NO: 226020 - DNA, 1782 bp, Cannabis indica
taaaataatttccaacaccatgatcttcttcaacttctgtatgaggatcatccttgccttcgtgctagtccgtcctcatctagtgacggtctctcaaattcaagcttcgaagatagggagataagcaacgaacacacaccttctccagaacccaaagtgcaaaaccatttttaccccagccagatcgaaggtgaaggctacaaacatttcatctgggagctcatgaagggctggaggcaatatttacaatccaactggacatatattgcgcgaccagatatagttgacactttacccataggccgtccaaatcctactgctgtaggtacgcccattgctacattcgatgtaactattgccagacataccgatcaagcttcgtccaggaataatggctcgcactaaacaatcagtgcgaaagtcttctctaactgacccacacgtagcttggcttgccacaatgccgagtgtggagcagcctcagcctgttgctaaggaggtagacattaagggggacgctgaagtccaagagatggaggatcagggcaaggtccgtctcgatactctttttgaagctaaggaggaaggtgcagctcggaggttgccctttggtggcttcaatgaggatggaaaacctgtgttcgagaccggtgaagactacattattgtggaatacaccgaggcattccttagagaagacaaggtgccgctggagcttggtgggtttctcctccatccacagtgacccaagaaaaaatgaagaatttgtagaagcacgattacttaagggatgtttaatgcttccttccctctccaaaccaccgatcgaccagtccaagggagaggtactgcgcttggtcaggcgcccacactaagtagggtgctatactgcccttgcttctgtacttcaaaagaattgcggattattaccatctctgccagacccaattcacttcgaagggcatcaagtatttgtctcccctgttcattctttatgcctcatagggatggggtgagccatctccgcacgacaccaattggctttttgatctgaaatcaaccccaagcagaaaaggtcggggtatttctatttttctcagatcaaagaaaagtggctgacgggcaccgtggactctgatgtgagaaaaatagggaattttgtggatgagtacaacttcatccagggcatggataccgtctacactcggttccagcagattccctcgtactgtcgccctcctttcacattggagctcagggagagagcacaaaaaaattcttcaactgccgaacactgctcggaacatcattgttctggccactgaggccaattatatcaagtaaaaattcttcccagaggattttgtgccgaggcccatgaagaagaagaaggcaaatcctagccaggtcgaggtgaccgagcaggagaagtcgagcaagaagggaaagaaggttcttcctagtgaccaggcaccagtggagcatgctatcatgattaaggaagctaaaagacctgtccggtcgtccgccctagtggaaggaaaagggaaagttgtcctgatcgaggaggaagaagactcttcagatgatgaggctccgtccgttcttgttagggagaatgctcttgcccaagtgcatggtatttttgacttgtatttatttctttcatgacatgctttatattacacaaatgaaatttcactaaatcaatctccggcaacggcgccaaaaacttgttgtgaaaaattgtatacgcaactgcacgcaatcgtaacaagtaat

SEQ ID NO: 226021 - DNA, 1635 bp, Cannabis indica
gaatacaattatacaaaacaacctcgggttacgaatagcaagataagccacctcgcgattctaattaaagaggtttgacgaggcgaatcatctgttaacacttagcgatctttagacatcaagatagataaggataatgactcgaaagttaagtaagatacaaatacaattgtccaaatcaacattaaccatcaataaggataagaacaaaaagcagttaagcagttatccagtactatcccacatgcaattaaatgaaacgaaggaattgttcacgtttcatgaacggttacattttaaaccgatccccattgtaaataactgccaacctatattcatataaatagtggcagattccacagaaaaattggacaaatatttttgagggaaaaagattatttattgtatattttatctatcattcagaaaatatcataataagatagactcgtagagtatgcagatttaactgcataactacgtaaaattcttagagttatttaaccatttattaccatttctgtgatataattattacataaatgcttattatttttagttaacgaaaatctgcgttaacagatttgtattacaaaatgtaaatatattaatgtgtattagtattgctattattttttttttgaattaaagttggatcattcaataacaacataattcaaccattacaatattctttaaattagatgaagcgctcagcttattgaacgtacaacatgatataaaacaagaccctgatctagccattacatattaatgtgtattattaatatagtattgttgttatagtagtatgtaaataaaacaagctaaaaaaaacttatgtgtgtatattttgtcccacattactctcatgtgtttgacaattagataaatactaagtgtaattaaaattaaatatatatatatttccctattccaaatcatgaagagaatgaatatgtgaaatccatatcaattataggcggatgaaaagaaaatattcaacatttagatgaagccaaatttgtagtaaaagatgattttgacaaattatacttattcatacaaaaagaaatgctgttgaaatttatgtacattttgttttgttctctcatcacactctaatactactagtagtagtagtagtagtagtagtggtgttggtccacaggattttcatataatgggagtggtgagtgggtataaaggtcacccacatatgataatgttataattggagtcatgtgggcatgaaagatagaatatatggaaatgaccccaccaaattgtccccttttgtcacttttcatatttagattcccatattcattttgcatctactatattaaccatcttattcaaattatgcttctttagtctcacccctctcttccactatccctttgcctttgttaatccataccatatgtattcactctcctccatcatgtcaaacaactagtgcttctttctttcactatttttttaattattattattattatttcatgagtttataactagtaattaatttttaaatcattacgcaaaaaaaaaaaaaaaaaaaaaaaactagaaagtaaggacttctctgtaatagagtaacaattgagttacacttaaatattacaactc

SEQ ID NO: 226022 - DNA, 3117 bp, Cannabis indica
tttttctcaaagctatctctgtcctagcaagaaaatgcttcttaggcgtcaattttgggaaattgggcttctgtataagctgattttacttgtgtttctctcattgttagtatttggggaagctgaagtagaagtgagaagtagaagtttggtggtaattggttcacacgatgatttgtcacctagtttacatgagaaacagctaaagagaagcttgaggcactcgtttgacgccttgttttcgagcaaaagaaaagttcctaacgctgctgaccctctccataatcgttgaaccttttctcttattcgttttccatttttgtaaacaagcctttaaatgtcaaaacaaagaaggcttctctttcgataagtaatgctaagttttttttgctgtagttgaagcaaaattaaaatgaagaaaatccttcttgcctccatcatccatcatgtactgtattcttttttcctctttgcttacactatatttgtagtatggataccaaaatatatgtaaattcaacatatgtttaatttaatcaaccaagaattttagccttgttaaggatttgtttttgggttgggttctgcaccctttattaggtggttttttgtctgcttctgtatggatttgatacttgtttgtcttaaggagttcgacatattctgatttagtctttctatgatctcacccataaagattatgaatatatgaacacaacatggttatcacttatgttagtcttcatagattgtcaatatattatttgccttaaatacagataatttcagtcttcaggtatatttatttgcttgtttgtttcaactgtcattcagttcagcgcctattatgcacaaaattacactgatcgcaacaaacacaagagaagtgctaaaaagaagactatattttgcactctttctttcactctctataattaaatgacaaatgtcaaatttttaaattaatttatttgtaattattaattaacgataataatacaattttattacaattatgtcattttaataaaattaatgcactaattataatatgaaatattatatataaatgtctaaataaccaaattaattattattattaatacttgattgtatttttttttttattacattcatttaatctagtctctttttgtaagacaattacaaaataaagagagctattctatattttgaatttcttcttcttcttcctcaaaattttcaaagccatggtgaattgagagtatatctactcatgtcaaagcaatacctaacatagtgaggaagactatgtctaactaaattgaaagagagaagatccagattcagatcttaataattctctgctacagacaggaatcaaaggctagagatctaaatggaatgagtcattattattctactgtcatcaatataaatatttcttaatctcttatgtgtttatttcatcattttagaaaatttatatttaagatgttagattataaaattataattaacatacatgttagtatctggatcctggtaaaacaagttccaacaattgacctcagagccatggtaatgatttatttcatgaaatatagatttaaaaatgtttgtatgatttggatgtgttcatgttagtttatgtgcttaactgatgattgaatgttaattacgaattttctacaacaattattttatttttgttctggaagtatttttctagaatgttggtaaaaaattaatcaattttaggctttttacagatctcaatttggattaaattgagtgagatatgatttttttgataaattggttgtcaaagggctggccgagagtaccctacttacgcgcgcagatcagacaagattttgtctaaaaacctcggctatgcgcgcgcgaacacctttttttttttgcctcttttgctcggtcaggtccgaattatgtgccctaacttgcatccaaacttgatttgatcatattttgagttttaaaaattattttttaatgactaaaaagccaaaatttgttaatttattttatgtagaattcaaatttcaatttaaaaactaaaatatcagaataaagttaatatttatttattttttaaataataaaagttgtttttagatattaggaggtttaccaatttgaaaattaatttttccagataaatttttattatggtttaattatttattattttattatttattttaaattataagatcaaagattagatattagttatattttagttaaaattgaaatattatatctaattatcttattagtaatttaattaataataaaatatgataaataatctagataatgttaaattactaaccataaatatcaattttttcaaattttgttatttttaaataaattttattagtttaaactataagtgttatcccaatttttgtcctcctgacgtggcacagttacatggacaaaatcagtgcacatagcagtatagctcaccaataagaaggccaagtcagcacataagcaaacgaagaccccgacactcaaatgggcatcaagtgacagaccagctacctcacaagagctggccgacaacccctggtcggccctatggccagccaaccttgagactgcaccatggcgggccagcttgccctccacaggggcttagccgaccaagacgtgtcctgcagggtttcctgtacacttctacacatggagaacatcctctgggctgcgaattgggccttaaaagcccaacagaatagctgaataatatctaggttcaatgtcattttgttcttttgtaattaactaataaaatatactaatatctagggtttcaagttgtaatctaggatttaggcctcctacataaaggctttaactctaacctagaaagcctaagcttagttaagcctaagacttgcctccaagctctaagcctaagtctgacaacttctctcttcttcacttcccctctcacacgcccatacaagcattatctctacacttaagtttttccattcttgattcatacattacattcctaagggtgctatagcagatcccatctatagtgatctggataatattaactcttgatattaatacaactaaagggggagtagg

SEQ ID NO: 226023 - DNA, 2786 bp, Cannabis indica
aatcgattggtatgcgctttttggtgcaaatacgcccgagcagtttgcgtcaacaatcttcatgttgactagaatgttgcttctttgatgcaaaaaatgtgattatctaattcacctatcaactttgcattcgattagtgagatggattatatttttttttgtacattatggtgatttggaccgaataaaatcggatttttcatggacgaaatgccaaactagccgcccatttagcatcctttacagataattatttgtctaattatatatcagctcaagccaagtatcgccacatctatgttctgcttctaagacttcaagctcctcagttatctcttcaccgtggctaccacgtgacttagggaaacataaaatgaatatagatgcggccttggatactcagtggaatataattggagttggtgctgtggtttgtgataatggaggccaagtaattgctgccctcttaaagcctctcactgggaactttgcatcacatgaaatggacgccaaagtaatcttccatagtttggttttggcattacagttgggactacaaattgctcaagtagaaactgatgctctcatgattactaatgccttatatggtcgttccaattttattggcacttttaatgatcttattgtagatatttcttatcttctttcctttcttctgagtgtatcgattatgcatgtcaaatgattgaggaatatgaccgctcatggtttggctggatatacgttagtgttggatgaagcttgctattgggtggagtctgttcctccatctatttactctgttattgtaaatgacctaccagtttaatttataataacaagtatttattctaaaaaaaacctttaatttcctttgaaaaaaaactttatttatttatttttagtaaaaattacacattttatgatttttatataatttgtgtaaaaatatgattttttttaaatagttattttatgaatatatatatatctttatgtataaagtgtgattatgtaacaaaatttttggtttaacggtattttttggttttatatattaactttaagagaatatactattatttaatagaatattcctaattaattttataataatattattatatatatttaaaagtaaaaattatatagatatttttatataagaatattttaatttttttaagtaaaatttaatttaaatttaaatatataaataaaatattatatataatatattttctttatttaaaacattttatcaaatatttaattttttaatataataatattatttattaaataaattacatctttatttaatataacagttaaattttaaaatccatccactaattctaaaaaaaaaaaactaagcatacatacaaatcgtgcattttgcacgcaacatcgatctactatatatattaaaaatagttaaaaaaatatacataaaaaacaatgaaaaaatataaagaaaataatataaagtaattggttaatcttaagaatgtagctcattactcttttaattattgggtaactaatcaccttaaattattttttttacacaatgtgagtgaaagagagctagaatagtaaagtaagatattaatattacttagggatttttttttggttttttacattttaaatcagttttttattatgtatttttacaaaaatttaaatagcaaccaacggaacaacttaaattacaatctaaatttacatagtaattaccaagcaaccaaaattataaaaataaaaaaaagttaaaaaataatatataaaataatttctagataaaaaacaatgagtacatataaattttaaatcaaatattcatcctacatagattattaccaaatgtacctattgggtttaatacttaataataataataagaataatatacttaattttaattttttgctgaatattaatacttaatatactttggttggctgtagtcctcgtagttatatgggaaaaaagagatatgtacagacagagcaagagagagatgagatattatataagataggatgtgttggtcctctcaaaaaaaaaaaaagaaaaaagaaaaaaagataggatatgttggttgttggtggtggttggtttcttttctaataattttatcttatatatagattctccaataataaagcacatgtattaattcatcaaactgtcaaaattaccctccaacaatattacaattttataggatatatatattgggtatatggaaggaaaatatacagaataaaaacatattcaaaaaatggataacaacaacaataataataataataataattctaactcttattataagaaggatgaatgaagtagtagaataatagatgattatttatttatgaattattttttcataatattcaaagagggagtagatttataattttcaacaacaataggaattattgaaagttttgaatgaatttgttattctcatatagtttttttctctcattcaatccttaatcttgttaccaaaccaaacaaggggatttattgagaaagagaaagagagagagagagaagtgtgtgtagtatttttaattttgacatgtttttgtttggtaatattttaacattatatatatacaaaatcacctggagacaggaaaaaattaaaaaaacttgagtccccttctcccctccccaccctaccctattaattatacctaataccctaaataactatagctaatagatatgccctatttttactctttcactttctctctctctc

SEQ ID NO: 226024 - DNA, 2862 bp, Cannabis indica
attggagcttagaattgtaggtccatggtccccgaatcgctaccttgaaacaatgtcaagggtagggataaagatttgcataaagatgttcgaaaaaaatctattttgaattagcaaaataataattatttatttttgtaataaataaataatttttttaaattaactaaataaggaaaagacaaaaattgttaagacaaaatttgtaaagacaagattttcaagaaaaaagttatcaggacaaaagacacgaaccttgtcctaaagacaatggtaggcacctaagctaatgtcctgtccctatagagtttgtctttttgagttaattaattatttaattaagttaattaggtaaatatctaatttaaaaagtgtttatagatatttcaaggttgttgagatattctctcaaatagttgagagattttctcataaatatcggtaaccgaattcgactatagatatttatttatttaaacaattaaataagatttaattaaagggatttaactactataaatacaaagaaatcaaaatactcttttgaacacttaattttcaaaattaaaggagagaaaaaagaaattggtttttctctcaattgttcctgctcatgtattgagaactcaagaagaacaaaagttatacactttattttaatagtgcatattattcattgtgtgtgttgtgtcgatttggaagacactagtgtttggggctttcgccatctcctgagattgaaggtatttggggccaaaagagcaactgccacgattgcttctgcatcacagactattactatggaacggtatgcggccttacaaaaaaaatagagtaggcacagcaggaatctcagtattcgaagcagcagtatgaaacacaacaactctacatcaagtaatttcaagattagttagagtatttctcttaggttgtgcttggtttcaacaggcctcctacggatcatccgtcatttccccactccttttggtgctagatcgtcatcgcatcaacccgagactcagaacaacaatgacggtgacattacttgtctttagaacaatatatattttataattaactttagaacttaattttttttaaattccgaacatctttcaatattttgcttatatttttttgataacttagaacttttaattacttactacaaatcgaacatatttgtatattagttcgattggaatactttttaattataaatttgactactgttttttttaattatttctttaaaatctaattttaagtttaaaattaattataatattttttataaattattaaaatataataatatttaaaaagaattaaaacaaaagctttatcgacgcatttttgcactagcacaaactcaacctaaaatcctaaacaaaaatcaaaaccctaaactctaaactttttaccggcgcacaaaggtcatttgtgcataaatctaaatggcagcgacaaaatcttgtgcgccatttatggaaaatgcacaaaacttttgccgacgcatttatgcggcgacaaagttatttttagacaccgattagcggatttaggaccatagtttacaccagggtatagttttttcctggcacaaaatagcgtcgataaatttagttttgccggcgcaaagataaattgtgccagcaaaaagctttttactaaccgagattcacagatagttttttaccggcacatacttttgttggcacaataatgcaccgacaaaaatagtatttcttgtagtaaataaaaaaaacaatatcaaatacccttttaaactttctaatgtaactttgttttactattttttcatgaaaacttgcaaaatgataagaggtggcttggcttgtggcagtcagagtctcgtgatctataaaggggaagactaggtaagatgtgtaataggtcacttaggaaaagtcaagtgtgatgattttaggatgtgtaggtatgagattatagaattatgatacgtttactaagctgtaattggaatcagaataatcaatgggagaaatgaatcggtttaaaatagaaaataatcaaaaataatatttttattatgctgtttactaaactgtccggaaaaaaaatagaatcaaattattttgtttacataactagaaaatgtaatcatattgctttaatttgacaaaattatcattattaagacatgtaattattttttgtttatagatttttaaaggacatatttgtcttttttatttttaactaataaattaaaattaaaataaattaagttaggaaaggaaaatgtattctttataaaaatgggggagaatctttccctttgttttctccctaatttgtgtggaccccactacttctctcttttcaaaatttagtaaacaattgtatgaaaatcaatatcatactattaattctcaatccttttaagcaacatgccattaaagttgacttaaattgatgtatgggtgttactgatgataacaagatgcatcttctagcctatcactcaaaaatttaaagttaagcgtgcttgacttagagtaaatacaggatgggtgaactttaaagactcgtgttggtttacaggatcaactgtcattccaggaatcattcaaagtgacgtactcgtgtataagagtcataaatccgtgagagaatacccaataaaacttgaagtaagggtacaaagactagcactgccactctcgacaatttgcaatagaagattttgttttcgccaaaaacttaatcagccttcacaaaatgtgtccaagtgtgtgcctgttcaaaaattaaactcttatacattttttttctttgtaaggacacttaaatacaatttgtttcatcactttt

SEQ ID NO: 226025 - DNA, 1949 bp, Cannabis indica
ccatttgatattagagacatttttcaaaattgatggtgtatattataattataacagatatattttatacttaagcggtttttaaatttgaaattaatttatggttttaaaaatagagttcaaactaataatttattgcacgtgcaatttaattgtttatgttgaactttgttttcaacttttaaattatttagaattttttaaaagttgaatgaaaaaaaaattgagttatatatttccattaccgaaaataaaaaacgcatgtttcaaaaaataaataaataaataaataaataacgctcctacctaataaaattttccaatatttctcatatatgtgttgttgttttattttatataaatgtgttgttgttgttaaacaaatgggtgtaatttgatttgggagtaagttaatttatagtgtgtgaagaatatttaaatagtattaataattgggtaattaaaataattgaaattatatttctaatttcacatttattgttaaatctctttttatttttgtttgcttaaattatttagtttcaaaatgtattaacaataaaaatgtatctttggagtgatcatcaagtcatattagtaggcatatatttatatagctattttctctaataaataggaatacatttgctgccatcattataccacacacaaaaaaaaaaactgaacttaaaagattgcatttaatttcatgtctttaaacacaataagtttctttagacaaatgaaggaatttttattcattgacaacaattcaagatgcttcaccttctttgtctcacagccattattatattatattgtatttgtatattaaaaattttataagaaatttataatttacgactatatatacatacaataattaacttaattatcccatcacaatgaataaaactctaataatgaaatgtatcatcttttttttatgataaggtgcaattctttaaaatatttttagcaatttaaaatctgttaaatttagatttttaattggatatattctgttaaaaactaatatataagtaccttgtaaccgtatcatatttatttatattttaattaaaggtaaattgttaagcaatttagggagagtagttaataagttcactatttaagtatattacatcaaatcaaacataatattattatccaaaagtaagctaataaaagttgaatctttcaaatatatagattaaaaaagaaacagatataaaataagaccataaaccaaatttacacattaaacttctgcacaattaagttgtgtaaagaaacaataaaccagaggaaccatcatcatgctgtgatctgtccatgttcagtcttagggtccttttctacctcctcaaagtaatcctcacgggcattgtcagccaacatcagtgccaccaaccagaaaagtgctgaatcaagggacacaaaagcaccaccaccgagcagaccagttttcgcggtagggcaatcagacttgttgcggtgaacattgtgcatcaggtggaattgctctgtgagtgtaggccacaacaacagggctgcagctaatcctgctgtgaacaaagcaatgttgaagaataccataaaggtagtgctcctgaataaagcaccttgtggaatggactttcccttgtatggataaaacaatgaccatagcccgaaaactgttgatactaagaggaatgcaagggatagataccccaacactactgttggatcagaagggtatttgcacataacaacacctattcctgggactggtgtccctgcagcaggctgtcaagataacaagggtacaatttgcataataaaaacaacattgtacttaaagagattggagataatttttggtaaacatctcaaacaaataaaccatttctccacaaccaagactagaattttgtgttcaaatacacatgcattctattacatgt

SEQ ID NO: 226026 - DNA, 1896 bp, Cannabis indica
attttaattttgattgagtttttctctattttttttctcatattctttgttcttttttagattgtagggtctatttgttcgtatataatataaatagaggttgttttcacttgttcctttgtgacctctgagtcttcatataaatatatatatatatatatatatttatatcattattgccttctttatttatttttttttatatataaatatatgaataatgcatctataaatatataattgaaaacgacccttaactgttttgaaaatatatacatatagtaaaatggtgtgtatcatacttgtttcctttgccatttaattttttttttatagcaaatatcaataaatatatatatatatatatctttatatatatatatatataaatgtgattgactttgtcttctaataatcttaattagttaaacaactgaaatattatatagaagtttctaagaaaatatatatgtgaatatatgtaacaaatgattttgaatcaaaccaaaatttccatgagaaccaaaggaaaataatttatatttatatatatattgaattaattatcttgtttgaccaatatattatatatgaactaaatttgaaccttttttctttttcattattaagtgccaaactccactagagataaaatttgtgaccttatcttaattaaagagaagagtatgaaaaagaaatgatctatagcaaaattgactccaatgagtttttttttacaagggagttgaacagtcatatcaagccaatgtcttttgattatatttataatttattttatttaaaaaaattgaaaaagggtgcaagagatttctgtttgtcttgatggaaaatgaacatcactttcttccaagaaaagaaaagaaaagaaaaggtagttggggtggtagcatccagcctgtttatgcatataaattagggtttttgaggggtctcaaaactcacaacaatcattgaatagaaactacaacttgattagaaaaaaaaaaagtgaaaaaaaaatcatattgaaagtactaaagcttccaaatctatcattgtcatggggtataattatatgaaggagtgggaattgaacactcattacattcctaaagtctttttttttttaaaaaaaaaacggtgatagagttaggggtgataattcgtgttcgcggggtcatattcgtgtcgtatctaaatccatgtataataagtatatgctcgacccgaacacaactaattaataatcgtgtcagaaattgaaacctaaatacgacccgtttttaaatgggttgacactacacaacccgtgtaacccgtttaaaaatatattttgtttaaacatatcaaccaataaaacgtttatgaagtattcaacatgtttatagtctatttatggcatgttaaagtactaaaataactttaaatagatcattaccaagttagtttcgtgttagccgtgtcaaaccgaacatgatccgcttattaaacgaattaaatgagttaatccgaacacgacctaaacccatttaagacaaacccaaactagctctcgtgtggactttgaatcgtgttatcgtgtctgactcgttttgctggctcaagatagagtaaatataaaattagacctcaatatcattacataaaacatttataggtatataggatactgtcacaaaactagccctagggtaaggcaccgtgtctaaagcccacctatcttaaaagtccaactaaatcttttaataatttttaaaaatactatttattcttattgtcattttttttaggctaattagtaatttttccccccgaactttgacatgtactaaatcatgccccctgaacatttttggccgttaaaaaattcccctcgaactattaagattgttaaat

SEQ ID NO: 226027 - DNA, 2220 bp, Cannabis indica
ttactatgcagtgtaattactatatgctagtaattacataattattatattttaaaaatacaaaatatgtttggatatcaagtggtaattatatgtgaatttttattgtatgtttggtaagactcttggtaattaattacataatacattaatattgtgtaatatttaatataataattattattattattattttgtaacatatatttaaaataattttatctattaataatatttaaaataaataaaattctcttcataaaataaaatcaattttttcataaaaactttgtaataaaaatataaaataatttttctttatcgactattcaattatcttgcattttatatatcttgagttatttcatttattgcatggtatttcagccttagaaatttaagtatttgttctatataaattaaaaattaataataaaataaatttatgctaaatcatgaataagtctactaaatatttaattcaaaagagaactttaaaaatgatgttaataaaataaaaaaattaaatatcatatattcgtatagtagtttttttatttatttacaaaaagtataataaaactaggctaaataatattataaaatagcattatacacatatgataaaaaaaattatgtatataagaaactaaaataaaaataaaatactaaatcatattaaataattattagattaattaaataactaaaattattttttagcatgtaattacactaaattcttatgggggtataaaggggggaaaaagagaaatttgctttccatgaaagatgtgctaaaatgagacttaatcatcttaactttgcggatgacatttctttattttgcaaaggagatttcaagagtgtgtattttttaatgcaaggccttatgctcttttctcttacttcaggcttgaatgttaataaggagaaatcaatattgtaatattgctcgggcatgacagatagagagatccaaagagtattagatatgtttggtttcactagacaaagtgatccttttaaataccttggagttcttatctgtgcaaggaagattaatgcctcggattgcagtagcctagctcaaaaaatggctgctcaaatcaaggtatggggaactcgaaacctttcttttgctggcagattagttcttgtgaattcagttcttatctcaattcatatttactggagtcaaatgatgataattccaaagaaagtaatgaaagagattgaaaacatatgtaaaagtttcctgtggactgggaaagatatgatgacaggggctgaaagcatttcttgggagaagatttgtacccctaagaaagagggtggccttggcataatgaacatagctacatggaacattgcagccatggttaaacatgtttgggctgtggctaataagaaagataacctatgggttaaatgggtgtattgtgtgtacatcaaacaacaagaatggtgggagtacaccgctcccacaaccagcagttgatactggaggaaaatggtggaaataaagaacaaggtgaagcaggtgcaacaaccaggccagtttactgctaccaattatcaaatcagcatcggttatagctagtttgcttcgaattttggcagagttgtttggagcaatgaggtctggaataggctcaattctcctaagcacagtttcttgatttggttggctgtgcaaaatcgcttgaaaactcaggaaagacttcataaatttagaatcattgactctcccaattgtctattttgcaacaagtttcctgaaagtgtagaacacttattcttcaagtgtgaaattacacttgataattgcttgaagttgttgaagatctggttgcattggcaggttcaatcggacacattacatggattgctgaaatgtatccgaaagtccaaagactccagatttcgcaagagtgtgaaaatggcagatgttgctgcaatggtttatgtaatatgaaaagcaagaaatgactttctttggaattcaattagccatcatgctgcttaaatggtaaagcaagttacatggttgtaaaaatagaatttgtttgtattaccaaaaagaaaaagatttagaatggtttcaagaattgtaaatacaaagttgtatagataatttttaaggccttgtttggtgcttataggttgtaaaaaagagatttgtgctaatgaactttatctattcatcaaaaaaaaaaa

SEQ ID NO: 226028 - DNA, 1791 bp, Cannabis indica
tccaaccaaaataacagatcagataaattctagaaaagagtctatattgcaaagctttaaaccatcatataaaatgaaagaccaagataaccaatatagtcaatgaaaacaacaaaaataagatcaaaacacaactcaaaatcttatcaccagaataacatctcttaaaaaataaatggttgaatgaggttattaataacaaaaaaataaattgcaatgtagaaatatcaatatacctttaagcttgatgtaaaactcctctaaaatcaaagcaccaaaaccagtatatgtcgaagtggaaacagagtaaatccttttaattgccttatcctcactgaaacacaaaaatcatacaaaaataaatccatttaaatactctcttatttgtcctcaaaattcaatgataacaatagagttagcgtagtaccttcccagaaccaaagcaagggttttgacgaaagaatcgaccatttcatcttcagtagttttggggtcgttggcgaactccattacaacaagccagtgctcatagtcacagccatcaggaagaatggtttctttaggcgggggattgctttagtttggagaagggtcgttcagcggcgagtatccagatctggaagtcttgaactcgagcgacattttgattgagtcgaggatgaaactccaaatcaacatttatattcacccaaacaaatcaattcaaaatatgcacatatggatatacacaatcataaactgaatcttatattaattaatcaaaagagaaaaataaattatatactgaatctcttggcctattccctctaaactcaatcgtatacattagaagctttcaaatcgtatccatcttccttcttaatcccaataaatgaggatcaagaatatctcaacaatatcgcaaaaaatggttttgatttagaatttaagggagagaaaagaggaatccatcatgcgttgtaaattgaatggaaatagttaacggaagggttagcttccgttaaaattaacagaataaaaataacaaaacgttaaaccaagaattgccgttagataggcacttttaatatataaagatatatttgttatctacaaatctctccaacataagattgtgattattttttattcaccaatcttacttgactcaattacaagtgacttttttagttcacgactttatttaatttattatctttgaattattagcgattcttttggtttgttacaatgtgaaagtgtatggtggaggaattaaaaataagtgaataaagaatcaattaacaataaaaaaaataactcatacaatttatatatagtattcaattttcacataagattttctaattcataaattagcaaagattagttcatgcaatgactgataaatataagccattgccagctgtatttttcatcagcctaaggacaattcatttatattataatataataatataggaaaattctataataataatacactcccttaaaaggaatacaccgatacatctctatctattttagtattcgaaataattttttagtcaaatttttttctcatggtcatgtaaattatacttatttaagacatcctgcaaaattttgcaaaattttaagaaatttgaaaaagtttaataccgtcaaaaactgcgttcaagtagtgtgttgcacacgtgactattttattttatacgcgtgtaaaatagactgtttgaacattgttttctatattgtaaattattccgaattttttaaaatttggtaagatatcttaaatagttataacgt

SEQ ID NO: 226029 - DNA, 3122 bp, Cannabis indica
tttgatttttctcattcctaaaaaacaacattctaatactattacaaattttaggcccatcaatccttgtactactctttataaagtcatttataaggttctagctaataggttaaaactgattttggataagatcatttctccctttaaagtgcttttgtcttgggtcaagttatttttgataatatccttgttgctcaggaagttaattatgcattaattctaagaaagtcggaaaattgggttgggctactcttaagcttaacatcgctaaggcttttgataaggtttagtgggattacctagaaagtgtcatgtttcactttaatttttctttcagatttgtctctttagttatgaaatgtctttttactattaatatttactttttaattaatggtgttgttaaagggaatatcaaacctttcaggggtcataaacaaggtgatccattatccccttatctgtttattctctatgttgaagaactttcttcccttcttcgtgctaattgggagagaggccctcttaaaggcctttctttctctagacgtgctccctctcttactcgcttgttgtgtggtgatgactgtctcatttttttagcggataggggttcctattcgggtcataatgatttttttctacctactctaaagcatcgggtcaggttattaactttgctaaatcctccattttttctctccaaatacttcctaaaatattagaaacattttccatagtacctctagccttgaagacagacatatcagtaaatacccaggacttccccaatatttttctagatctagagataattcttttgccttcctcaaagacaaagtcatctctatgcttcactcttggcactctaaatggttctataatgctgggaaagaagtcctccttaaagtagttattcaggctatctctgcttatgctatggcctgttttagattgcatgttaagctttgtaagggtattgaggttgcaatggcccgattcttgtggggatcttctagggactctaagaaaattcattggaaacaatgcagagttatttattaggccaaatttatggggggtttagggttcaagtctctaattcatttcaatctaagctatgcttgctaagaaagcttggagaatctttagaaaccctaaagtgttgctcaatcttattcttaaagacatagacttccctaactcttccattcttgaagttgttcctggtcacaatccctctttttcttggaagtgtatcatttggggtaaggatctcttagcctcgggtttgatttggaaaatttgagatggttagaacattacaactgttaaagatcattggatccctaacaataagtttaaatcatttcgtcatgattgcatcccaaatttgaataagctttcctttttaattaatgcttatggatcttgagatctgggcaagcttcaggaatattttgatgatagtgtgattgatgatatttttgatgatccgatgactggggttaatggtacggattatttggtttggggatgggagattctggcccttttagtgttaatcagcctaccaccctgctctctccaatcagtataatattcctttagcttcgtcctttcacacttctaaaaacttttagtgtaagatttggaattctagagtccctcataaggttaaacattttatttggaggattattttcaattctattcatgtcgctgcttcactctttcagaggcatgttcttagctctcctatctgtcctctatgcaatctatacaaaatttagtaaatgttttctatgatggtttctcgatgggaattcaatgtgttctcaatggttttttgataatatttcatatgaaagctccagattctgttattacaatttttaaaatttatctttgataacaaggaaaagatacactaattgtctctaagggctcgtttggtacgccgtattgtattgtattgtattgtattgtattgtattgtattgtgttgtgttggattgtgttgtattgtatcgtattgtattgtattagtattatttaatacaatactatgtttggtattgacttgtattaatagattgtgttgtattgtattgtattagtattatttaatgttggtccagttcccgagtccgggcttaggtctcgggtccaggtccgggtccgggtcagagttcgagtcgggttctaggtccatgtctgtgttcgggttcgggttgaattcttggtccgagtccgggtttgggtctcgagtctgggtccaggtccgggtccgggtctcgagacggggtctgggtcctgagacggggtctgggtccaggtccaggttcaggtctgggtctcacgtccgggaccgggtcccgggtccgtccagggtccaagtctgggttcgagtcctgggtccgggtccaggtcccgggtcttggtcctgggtccgggtcctgggtccgggtcctgggtcccgggtctgggtctgggtctgagttccagtccggattagagattggtgttgaccctaaatcctttgtaaatattataatacaagctaatacggaccatgtgttatgtattaaataatacaacatacattgtattaaaaattttggtcgtaataattaatacaatacattactttatccaaatatagtgttatttattatttaatacaatacgacccttatacggcgtaccaaacgagccctaaatgtataaaactatacaaaatattttctaatacaaggacactgttattttaatttattctactgcttttttaggttggctttcaaaaatagtaaggtcatgggcgtcacattcatgatgcatctcatcaacacccatctcaatcactatctcaacatcattgtatgtgattgtcctagcatacacttcttcatctaggcaaggaaataaccctctcataacaatcaattactgttgaagaaaaaacttaaaataaatgttagaatcctatcgaaaatatatcgacgaccaatcgaaaacctttcaacaaacagacataacacaacagagggaaacaaacacaacttatcaatgataccaacaaaagttaaacattacaataataatagaaataaaat

SEQ ID NO: 226030 - DNA, 3403 bp, Cannabis indica
actagaaacaaagagtgaaaactaaccgaaaatatgacccgaaacttagactaattttagcctaacaaccagaatagaagaaagatgacattttagttcctgcttgggtgtttgctttgacctaggcagaggctgatgttggtccttctatcgtgacaagtcaaccttttatttatgttaccttgttgattgttttaaattgattctggtgcaatgtattattcataggtgtcgagtatagcaattggaaatctgcataaacttggagatgctttaccaagaggttttggtaccttactgcctactggagaattgttatctccagtaggtgggtaggtcccttccagtgtttgtggagggaagggaattgtcggtggattcgattgaactgaacttagaggattttgatgttatactaggaatggactggcttgcaaagtataatgtaaccatcgactgtaaaaggaagattgtaacttttgaaccagagggtgaggacacatttgtgtttgtgggcaaggttcaaggatcttagattccattaatctcggtgctcaaggcaagagatattttatgtgatcaatgtatcagtttcttaaccagtgtagtggatgctacaaaggaaacaccaacaggatcgaaacatgttccaattgtacgagaatttttggatgtctttctagaggagttaccagggttaccaccaaagcgagaaattgatttagaaattgatttgataccgggggcagaggctgtatctacagctctgtatagaatggcacctaaagagttgaaagagttgaaggttcagttataaggattgttggacttgaaatttaccagaccaagtacctcgctttggggtgcaccagttttttttgtgaagaagaaggacagaaccttatagatgtgtatttactactgggagttaaataaattgacggtaaagaccaagtatcctttactaaggatagatgatctatttgatcaataacagggaaagaccatcttctttaagatcgatcttcgatctggttatcaccagttgaagattcgtgaggaggatattcccaagacagcttttcgtacccgatatggacactatgaatttcttgtgatgtcctttggattaataaatgctctggcggcattcatggatttaataaaccgagtgttcaaggattttttttaagatgattttgtaattattttcattgatgatattctgatcttctcaaattcagaggagacacatgagaaacatcttcggatggtgttgcaatgtctcttggagcataagctttatgctaaatacaagaaatgtgagttatggctgccccaagtaagtttcttagggcatatggtgaacaaagatggtgttttggtggatcctgagattgaagcggttcgggattggcctcgacccaagtttgcaaccgaggttagaagtttcctaagattagtaggatactatagaagatttgttgaaggatttgctaagatttctacgcccttaacggaattaactcgaaagaattaaaagttcatttaaactgacaagtgcgagagtagcttccaggaattgaagcagagtccaggaaagttattgcctaagagcctaggcaattgaaggattatgaacagcggtatcctacatatgatatggaattggcagcgacaatgattggaactggttaaagattatgactaagagatcctttactatccgtgtaaagcaaatgtcgtagcagatgttttaagttggaagggtccaaggcaagtttatgaattgaagaagatctcaccaaagttggctgaggatatgaccagagcagggattgagttcatagatagaaaacaagccaatattacgatataatctgatttgttagaaggaatcaagatagcccaacagagtgatccaaaattacaagactataaagaaaagcttgaagtcaaggcagcaaagagcttcttaatttcattagatgaattagtacaatttagagacagggtttgtgtaccacctgatgatagtattagacagaaagttctagatgattttcataccatgccatattcactacatctggggacaactaagatgtattacgatgtaaaagccctgtattggtggccagggatgaagggtgatattgtggagtatgtgtcaaaatgctaaggaccagcaaggttacttcaacctctaaagattcctgagtggaaatgggaagagataacggtgaactttgtggttggattactaagaacagtaggactttatgattccatctgggtaaatgtggattgatatacaaagttagctcactttttgctagtgcggactacgtacacggtagatcggtacgctgatctatatgtcaaggagatagttatgtttcatggtgttctaaagtcaatcgtttcagatcaagatctaaagtttacatccaagttctaggagagtttgcaatgagcaatgggtaccaaataaaagttcagttcagcttttcatcctcagactaatggtcaatctgagaggattattcaaatacttgaggatatgctacggatatgtgtattagactttgaaggttcttggaacaagtaccttcctttgattgagttttcatacaacaatagttgtcagagtactattagtatggcaccgtatgaaatgctttatagaagaaaatgttgttcacccattcattaggatgaagctggtgaatggaggtatctaggacctgatgtagtccaaagaaagagtgaggccattgagaaaattcgagcttgtatgcttgcatcacaaagtagacgaaagagctacgctgattcaaagcgtagagataatgaattccatgttggggattttgtgttcctttgggtgtccacaatgagaggaatctagagatttggaaagaagggaaagtttattcccagatttatcggtccatttgaggttttggaaagggttggtcaggtagcctatcggatagtcttacctcctgctgtatctggagtttataatgggttctacatctcgatgctttggtagtttgtgtctgttacgactcatattttgagctatgaggatattgaacttcaaacagatctgtcatacgaagaacaacctgtttagatcctggatagaaaggagaaggtgttttagaagaagactattctgctagttaaaatgttgtggaggaacaacaagattgaaaggcgacttgggggttaaagtcacagatgtgagagctatatctcgagatgtttagataaaattttgaggacacaatttctataaggaagggatagttgtaatatcctggaaaactatactaagatttaaatggacatattttattaaatatgtaattatatggatattggtagattataa

SEQ ID NO: 226031 - DNA, 1812 bp, Cannabis indica
gtttaagcatataaccttataattaaattttacttcatggttagtatttaaaatcccaaataaagatccataaaagaaaaataaaatgaaaagaggaaaaaattaacgattttgatattttgaaaattttaaaatcaatcaagggaagcaattcgagcacttttgtggtagccatttggtatttgacaatatattttagtaacaataaaagaacatagattattttcacacaagaggaaaataaagcaataaaaagcaattactacactttttttttaaaaaaaaaaaaaattgatagtaatcaccaataaaataataacataaaactttattgagacatctccttttattggaaacatgaccataattaaaataagaaaaacgagccaaccaatcgactgtctgcttcccgaatcgtttgacaaaagaaactaaaataaaatcatattattgcaacatcacagttaatcttaaaaaccgcctatattcaattttttccaccgctcagaaggcacaataattgaaactgttacaataagttcattaaaccccttagcttgagcactcaactattgtgcaaggtatgtaactgcaccactaacaacccatttaaaaaatttaatattcccatccactaacaacgatttaatggcgagtcattgaaaaacaaagaaaacgaaccaacaacgacacaaaataaaccaaaatcatgtcatcctaacaagattaatcacaataacataaacaaaagacactcaaaacatgtaaagacaatactcattgcagtaacaagaacctaatcgcaagagcaaaacctaatcgtagtagcaaaactacagacctgaccaagctacgcctaagcctagggagggtagcgggcttggccaaagaaaaaagacaacctccaacagctaaagatttagaaacaagaaaccccagctatttggagaaaaaaaacaatctctcattttttataaagcaattactgcacttttgtaacttaataataataaatgagcaaatcacgagaacaaaattttaacacacactagaaaacagaggtaaacaaaaactaatactctcttcttacctgataaagggacgaaagttaacaaaacttgaggagaaaaaaaaaccaagacaaaacaataccccaaaacaaaaaaaaatgtaaaatgttgtcgaaagactcaaatcgaagtttatcttcatgcttgcttcttcttgttcaagcaacccatgatgcaccaatcatgctctaaatcataaacatggtatgtatgaccatgctcatgtcatgcctaaagtaaatagatacatattatttaagcaaaactccaaaaatttccaataaccaatataactatttctagagcaaaagtgggattttttcttttcctttccactaatgaaacatcatcaggcatggcatttctcaaaacaaatcacacataaaggtctcaaaaccatgtaaactttatctctttgtttgatatcaaaaatcataggagggagggatattccaccatactctttcattacaaagaaaaaggtccatataatatagccttgaaagagcacaaaaacatagcaaataaaaaagatgaacagtttcatatgcaatcgatttagtggctaacttataagcggaatgtgaagcatcaaagatcgaaggtacataatagagaaagaaacctgcaagaggatctcacaccactatcctgcaatattgttaagcaaaatttgaaaagttgttccttaatcagaatcttcatacacttctccatcgtctgatagctcatcgaatgatct

SEQ ID NO: 226032 - DNA, 2327 bp, Cannabis indica
ttttagcataacaatttctgaatatgtagttcagtcatatataataaaagtgagaagttggacttttttgacatgagagtgcccttagaaatgttattttgaatgatgttgaagccttgaactctaaactactatcaactcaaataattatcaagtcttgtcgttgcgtgttattcaacaatgcaagacatatttttgttgtaattcttgtattttctttccttaacatgtatgtagtcccatttttttcccacattctaggtgtcttgcgattttactatcagcaatatacacggggttattatatggtctatacgttcctgattggaaattcaaagtgttacctgcagcctcttcacttccatcaaatgatacctctgtttacatggtaagataatttcatcgctgaattcttaaatttacttgattttcttctgttatttcatcatttatgttggctattttcagattaagccaaataaagtttatgatataatacaacttcaatcttttaatttgatagctgttagtcaacaatacgttaagtacttgatttttctataaatttgactcgtaactcttgttttgtgctatgcttcttatatgtttggcacaggtgaaatgctctgtgagaggagatcttggacctgcttgtaattcagctgcaatgatcgatcgttactttattggtattgatcatttgtatgcaaagccagtttacagaaatttgaaggtatctgtgtaattagaattatgtacaatattaaatgttaaatatgtaattattgatagttgtcttattccaaagtttgatttgtaggtgtgcaatatgtccaatggccaagttccggagagttcaccatcatggtgtaacgctccatttgatcctgaaggtattttaaggtggtcattctttctactgtgcagtcataataagtcctctatattgcttagatttgtgtggtgatattttgtgtttcgcaaaagtagatgaaattttaggattctaaaagccacaagaaacggaaagttgaacacagaggtttcattgaagccttcaaaaattatttgtttaaattgtcatgaaaagatctttattacagtaatgcgatatgttacttgataggcctggccttaggattttttataagaggggtatgagggtaattctaatttggtaatgataatatatatatgagtgaataggtaagcaaaaggggagaatgaatttgtaagagagctactgctctttgcttgggagagcactaggtctctcgaatacccagtactttgttcatttcaatttcccactatcaatatgttagctattttcctctattttgctactgtttatacgtaaatggtaggaaattcctatcattactttttctgcctttgtgtgtaggactttatctcttttatgcacaactcatgtcaaatatttgttgtatggtatcatagttctttaacagctgcagtgacctgcataattggacttcaatatggccatattcttgctaacttacaggtgaaagtgaaatttatatgattctggaaacataattttagttattattactcaaatattatgtcatgtgtctggcacagaagaatgcagcataccttataatcatgctaattatactatttaagaagcatcactactgacagtttgtttactgaaatgatattcaatgattttcaggatcacaaaagacggttagagagttggaccttgctttcaatctccatttttgctattggattgtttttagccttcgttggtgtgtacctatggaatatatttttctcctttgcgtttcagtgtatcctaagaaacttttactaaactagctatggtatctaactctctcatttctttccaggcatccctgtaaataagtctttgtacacacagttatatgctaattacttctggttctgctggaattacattctgtattatgtatctattggtgagtcctcgtggtttgtttgattctaataatcacaacaagaatacttctgtcatcaaaattttcataacaagtagcgtgtgattagcgagctgagttgtaaaatgtagcattttcatgatgttttttgctgtgcaggtggatgtatatggtttcaggcgcttaacatttttgctggaatggatgggaatacattccttgagtattttcgttctcgtcacttctaacttagctgtcattgcagttcaaggattttacttacacagtcctaaaaataacatggtaagtcctgggactttttggtattcgaaagaataagtaacagtaacacacctttaatctcttctcttc

SEQ ID NO: 226033 - DNA, 1870 bp, Cannabis indica
ttaatgtacaaagggtgtttgatgttgtccaaagatagctcacttattcctactattttttgagaataccacaactctcatttgggtggacattacaggtgagaataaaacttttcgtaggaatgcttctgattttattgggtgggcatgaaaaaaatggtggctgattaggtttaagaatgtgaagtgtgccagaaatataagactatgaatacttctcctacgggtttattgcaacttatagcattaccctcgctggtttaggatgaattgactatagattttatagaaggattgccctattccctcgaaatggacattgtaatggtagtggtgtatagattgagtacatatgctcatttcatattgttaaagtatccttttactgctcatagtgctgctgaagtgtttttaaaagaggtggtcgacttcacacaaggttttgataagtcatttttggcaagagctctttaaggtgcaaggtatcaagctctgacatagcacggcatatcatccccaaactaatgggcaaatagaagttgtgaacggttgtttaaagacttactttcgttgttatgtgccagatcagccacaagtttggatgcgtttgctagcttgtactaagtattggtataatatttcgtttcacccacagctagtgtgtataacaattttggcaacctttaggcttaaaagaaccaaaattttgattgtcttatatgtgatggttggtccaatatataggccaccaagaaatagaccagattaatgggaacccatgcagagttaatctccaattaagctcaccaatggagtgggattacatgactaaacgagactgacttccccatatgttggtccaatgggttagtcctttcttcatggtgatgttgacaagagccagcaacctaagagtacaaccgtttggaaaaaaggtgcacacgttaagtatcaaagtagtaagtgcacgaatcccatatttatactccgggcttactaagatctttagaggctgttttttcatcccatttcatgaaaaattgtcctttgaatcgaaattcataactgaagtactgagatattatagatcttttagataaacatttgttaccgttgctccaggatcaaccagtcaatattcaaaagataaattattattagattctgcaacaatttcctatgatatttttttggtcaattttgaattgatatatgaatatgacagtatacttgactggtgattgctcatgcatacatgttattgttagctccaatcggttgatacatataaatatttatatattatatatattataaatatatgtcacgttctttattatatttatatacaatacgtataaatatatatcatgttggacacattctatgattagagagcgacttctcaatgtcatattaaaaatggtcgatttcaattcatgtgaaattgtgaagaaactaaattaaattaatagtatatgttggtacaattcctaacttgtaggggtaggtagcaagttatattcctatttgtgtgtggttgacacgtttaattagccaattttaacccgatcattacatatttcgttgttaagaaatctcaatcttatcctgactcggtgtgttgcatgttgactatatttatcttacacaatatgttgatcaacataattactatctcacatttgatttttgtaaattttgtttaaataatttttctttctaatttttcagtaaaaatgaatacaaatttaattataaattagtacttttagtaatatattaaatataacaggtttatttgtgttacatgggttaattctaacccaaacttaaataattatcgtgtcattcggatttaactcaattt

SEQ ID NO: 226034 - DNA, 2301 bp, Cannabis indica
aatggaagctaaaggcccatatttgcatcgaattcatttagaagaaaatacaaagccatctcgtgagtgtcaaataaggctaaattgaaacatgaaagaggtagttaaagaggagatacttaaatcattagatgtacgtataatataccctacttctgatagtttatgtgttagtttgatccatgctgttcttaagaagtttgtgattactgtagtcaagaatacaaataattaattctcactaaaatctaaattggatggagagtgtgcattgactataaaaaactcaatagcctcaccagaaaaaaaactattttcgttacccttcattgactaaatgcttcaaatattagttagtcatgagtattattattttcttgatggttattcaggatacaaccaaatgccgattgtatttgaggatcaagaaaagaccacttttatatgtccttagttatggaatgttgcttatgatgaaagtcttttgagttatgcgatgaaagtcttttgagttatgcaatacacctgtgacatttcaaatgtgtatgattgaaatttttgcaaatatatatggttgaatgtgttttttttggagatctttatgaattatttttctttatatggatattcttttgatgaatgtttataccatttttttcttgtcttgtttcattgtgaagagaataatttagtgcttaattgggaaaaatgccatttatggtaaaacgaagaattattatattaggacatgagatttcatcaatggaaatcgaagtttataaagctaaaattaatcttattttagaacttcaccacctaagatagtgaaagaaattagaccattcttaggccatgccaattttttacaaaagatttataaaaggtttttgtaatatcctggaaaacaaataatatttgaatagacatattttattaaatatgtaattattttggtaacgaaataagattgtgatcttacttagggtaactaccgagagtttatctaatgacctataaagcgcaatttatcaattacggagattatgttgggatatgtaggtatcgaggataccattatttttttaaaataaaatatcgggtccagcgatttttgttagaaatgtcacgacattgatggaagaattaatttggggatattctggactagtttataattttagaatgtcgatttcatagattagtaaaattaccaaaatgcccttaggttattttagagattatttagctttgagggtaatttaattattctttaaataaatattcttttattccttttattattattagttagggttgtgattttaaaaattaaaaatagaaaagaaaagaaagaaaaagaagagaatttttcttatttaagttacttggaagctaagtaacctcaccattcaactcctctccttctctctctctcgtgcaagcttgaaccagccacttggggacttcttttcttcagcaaacctcccatttcagagctgaacctaaacccccagccaacctagaatcttgaggtatgttcctccttatgttttttggtgaattcctaggtttctaaagctaggttttgttaatttttgtatgttttcagggctgtaggcttagatgagatctgagtatgctatattagttgagttaggtttgtttgtgtatgttataattaaattcatggttgttgggattgttttgtgagtgaggaagctaaggaaattgagtttccttcacttgaacatagattttgagttagagattgaactactgtaatttgaagcttgggatatgttatatttatgttattatactattctggaaagtttggttaggtttggtggagttttgggtcgaatttggaggagagaaccttttgaaaattttcgggttttcttcaggttcagtttttggcccgggaagtggtgtatcatctgttttaggttgtttatgggatgtttgacctatttagaagttgttgggagctagattatgcttgattttgagttagggtttttctttcggaattttggtttaagatattcattgagtttcaattgttgtgacataggaccgggatcgcctagcttgttttccactcaggtcggcccgtacgtttgagttctgaactaaggtaagaaaagtggtaagcaccgtatgtggctaaatattaatgattgaatggttatagccttgattattatcaagactttgattaaatgttagttgagcctaggttatgacctagggtgggaaacggttaataccgttatgagtaattactcttgaaaccgc

SEQ ID NO: 226035 - DNA, 2471 bp, Cannabis indica
tcctccccaactactactctccagtatatctctctacctactgatgtatcacctgtcccacaaaatacctcactacagccacgtacacaaccattaccaccatctgcacaatcttcttcacaccaggagcctcaaacagatcccacacccgctcccacaagacctcttacacagcctatcttgcccattcccacaacaacaacctctacacaacctactaataccactataccagcaacatccactgcaatttccactcatcccatgcacaacaagatccaaatcaggcattttcaaacccaagattcttgcagcagagttacaaaagtatgaatgttatattaaagaacctacctctctcaaaatggctctaaataatcctctttggaacaaagcaatgggagaagaatactatgctctcaagaaaaataatacatggatcctagtaccatatcatcatggcatgcatgtcatagacaacaagtgggtttacaagattaaactaagggcagatggtactgtagaaagattaaaggctcagttggtagccaagggcttccaacaaactgcaggcatagattattttgacaccttcagccctgttgttaaagcaagcaccattcggattatgtttacacttgcagttacatatggatgggacatacaacaacttgacattaataatgcctttttaaatggggacttagaagaagtggtatacatgcagcaaccacaaggatttgaggatcctaattatcctactcatgtatgccaattaaagaaagctttatatggcttgaagcaagcacctcgagcttggtatgataagctcaaaaatgccttaatctcttggggtttcaccaattccatttcagacagcagcctattcttcacaactaaaaatggtcatcttcttctccttttggtatatgtcgatgacatacttattactggtgccaattctcaagctgtcaacaaaatcattcatgatttacaagcatcttttgctctcaaaactcttggttcagtaagttactttctcgggtttcaagcagcaagatcaggtgactccctatttctctctcagactcaatatgccatagacattttgcacaaaacaaacatggatacctccaagtcttgtattaccccatcttccccaggatacaagctatttactgctgacagtgaaccctttcatgatcccacattgtatcgaagcacaattggctctcttcagtacttaactatgacacgtcctgacattgcattctcagtaaataaactgagccaattcatgcagcaaccgaccactgctcattggaatgcgtgtaagagacttcttcgatatatcaaagggactcttgacatgggattggtattcaaagctgcccctagactcaacctggaagccttttctgatgcagattgggcctgcaacattgatgaccgcaaatccactacgggcttctgtgtcaaacttggtgggaacttaatctcatggggctctcgaaaacaaaagtcagtggctcggtcgagcactgagtccgaatatagatccctttcaaccactgctactgaagttgtgtggattctctctgtcttggatgaaataggcattaaaccagttggcaaaccagttatctggtgtgacaaccaaggagcacaacaacttgcctccaatcctgtatttcactctcggacaaaacatattgaggtcgatgttcactatgttcgagaactggtcactcaaaacaaacttactgtctgttatattccaactgaagaacaaccagctgacatttttacaaaagctttaaccttccctaagtttaacttcctgtgtaacaaactgtctctgggaacctcccagctcagtttgaggggggatgttgagaccgttactgaaaacggttaggaagttagttaggtgtcagtattctgttaaggtggttagtcagctggtgtatctagctgtgtataaatacctgtacatgtactctctttacatacagaaataaagattcactttctctcttgctttctctctgtttagtactctgttctttgttcaactgtactcatgcaaatggcagtaccaacattaaggactgcagctggtttagggaatttcaattcagagcttaaacacattcaactatgatttgatccgacgaagagaacgtacacgaagatttaacgattcttgatcttgattcggggcgggcagaggttgggatctagcaacaaagctaatttcagagttgaattttatcaaagagtgaattgaagtactgcttggtgatatgctgcagatcaattctttaattattctagcttcatatgtgatttgaagaggtcaaaatgtactttctcagccaattaatatatgaggaaattcaaactaacataatggggttagttcataagatgttactaagaaagatcaaaggaaagcaataatgagtatg

SEQ ID NO: 226036 - DNA, 2600 bp, Cannabis indica
ataacagtatattagtttatgcatttttttagttgtcttttatttaataaatgagatagtggaactagtctttgaacgttgtggtggtttcctcgagaataggatgcttcatgcttagaattaggaataagttgtttttctgaatattatatatgtaatgaccattgattaataaagggagtcatattttaaatcatcacttggtttgattttcaccctaagaagatctacaattttcctagtttaattctacctctgactgggacctatcagtggtatcagagcgggatgacaactaacaaagaacgtattgaatccttagaacagggacttggcggcttacaagctgaagtgcagcgaatgggactcggcatgggcgatcacctgaagcgtcttgaagattctttgcaggctttatccgaagcagttctttccaacaaagcacaatcttcttcacattctgtagagcgggaacagccccgacgccaccccacggaggacaccgacagcttacgcatgcataatcttccactacggaccaaacttgagtttccccggtttgccggagacgatcccacagaatggtttaatcgtgttgctcaattctttgagttccaaagaacacccgacgaccaaaaggttggcttggccacttttcatttggaaggagaagcaaaccaatggtggcaatggatgcatcggacttacaaggaagaaaatcgtgcactcacttggcctatgttttatgaagagttgtgggcacgatttggcccaacggatggggaggattttgatgaagcattatctcgtgtacgacaaattggctccttacgagactatcaacgcgaatttgaaaagttgggaaatcgagtacaagggtggtctcagaaagctcttgtcggcacttttatgggcggtttaaaatctgacatcgctgatggcatacgcatgtttaaacccaagaccttaaaggacgcaatcgggttggctcggatgcgagatgaacaactcacacggcagcaaagattcactcgaccaacttcccaattccgttcacctaccaagggcccttcggcaccaaggaactcaccgatgccccctaagcgattgagttgggaggaaatgcaaacacgacgagctcaaggtttatgctttaattgcaacgaaaggttcaccccgggtcacaaatgtcaggtaccgcaactcctacttcttgattgtcatccggagatcgatgctcatgacgaccccttgaagactgacgaagaaataattgaagccgaaccaggcgtatcaatgttcgctttgacaggatggacctcacctcgaactatgcgtattgcggcaaaaatcggaaataggaagctagtggtattaattgatagtggatccacacacaattttctcaacaataaactgtcagattccttaaagcttcctgtagtaccaaccaaagctttcaccgtccacgtcgccaatggagagaaattactttgtcaagggcggtttgatcaggtaccagtagatttacagggcattcacttttctcttacatgttattcattacctttggctggattggatatggttttaggagtccaatggctcgaaatgttggggtccgttgtttgtaattggaagcaaatgacaatgaacttcacatgggagaatcgagcatgtatgttacaaggaatccaaacgggtcttcaacctacttcagttcagtccatcatgaaggagtctcgacaaggcaacatggccttcgccatctacattcctacaattacagaacatcaatggcgtgatatcccttcagacatgttgcgagtcttaagcaactatgatgagctattcaaagaacccacccaactgccaccgttgcgggacattgatcaccacattcctctgaaggaagggactcaacccatcaacgttcgaccataccgatatgctcattttcagaaagatgagattgagaaacaagtgcaggccatgagggatatcggaatcattcaaccgagtacaagtccattctcctcacctgttttactagtgaagaaaaaagatggatcttggcgattttgcacagattatagagcactcaacgaagccacgatcaaagatcgatttccaattccctcagttgatgacatgttggacgaattatatggagccaaatatttcaccaaacttgacctcagagcagggtatcaccaagtccgagtccatgcacctgatattccaaaaacagcttttcgaacccatagtggccattacgaatatctggtaatgccctttgggctctgtaatgctccttcgacctttcaagctattatgaattctatatttcgtccttatctacgtcaattcatattggttttttttgatgatatattaatatatagtccaaattgggacttgcatttgagtcatgtcaccaccgccttagacatactgaaacatcatcaattttttgtgaaagccaccaagtgtgactttggcaagcaggagctggaatatttgggacacgtggttacatcccaaggtgtcaaggttgataataaaaaaattgaagccataaatgcatggccatcacctgc

SEQ ID NO: 226037 - DNA, 1289 bp, Cannabis indica
tccttcttaaatagtttctctggccgctcactcaaatttttcacattagtgagtggcccctctcttgcctccttgacatatcgttcttgtgattttctggagtctcctgcgatgtgaggtcctccaatgattgttactatattgcgaggagttcttgaactactcgcattattattttcttccttgtcatccacttggggacgaccttcctcattcttcttgtatttgccaaaatttcctcgcctgattagttcctcgatctcgtcctacaagaaccaacattccaatgaggtatgaccaatatctttgtgatacttgcagaatttcttcgagtctcttttgtcgcaatttcccctgattgggggaggctttctaaaaactccattattttcttcaattgtgtaaatatggtctcgtggaactgctaattatgtatagttcacaaaacgtggacctcctttcctttttggagatgactctttcttcggaggggatttggcgtgcttcgtactccgctgtctttggggactgcatcttctagggcttcttcctctcgaatttttctctctaggactgcaggatcgtgatcgcggtacaggtgactcacgtttatcctttcctttctctagctcggccagagaattctcaatcctcttatgtggctcagccatagcgaagaactcgactaacgactcaggccttcgagcttgtaactccttccagaaatcggtcttggcaagacacctgtgatcaacatgcaaactaacgaagacttgggggccttttccactttagttacttcagcattaaaacgtttaaataatcttgtaacgactcacttgcttaatattagctagagtagtataaggagcatatacgtcatcgtggcttggaaatgtgtgagaaagaggtcgacaaaggtttcccatgtcgatatagatgcttcgggaaattggttaaactaatcatgagcattatcttccagggttgctgcaagaatgcgacattttgcaagctgaggtacctggtctacttccataattgtgttaaatttctctaaataatctatgggattagtggtacctttatattttaatgattcggataatcggaatcccttgggcaaccgagcctgtcgcacctccgtggtaaagggagaagtgacatgcagcttgtaaatgggttttctttggtgctcgattatctttagagcctacaaaagaataccctgatcgatgccccctggaaggacggcggtgttctggatcatcgcgggtgcagttgcaacg

SEQ ID NO: 226038 - DNA, 1785 bp, Cannabis indica
acagggaaagaagatcccttgtctcacataaaatatattgaaaactagatggattttaaaaatgttaaggttgatacccattcatgaatcttcctggcaaccttaactgagattgcacagtagtagttttccaaacttgtgaacagaaggttccattcatggtactctttcacaagagagttctacacacagttctcgtcttccaagcaaacaccttatcggctggaagacctagtggaggtcatacagaggtcagaggaacctcttaaagactatctccaaagatttatgactgaagctaccaaggtcaagaatctgatggaggaagaaaggtacataaccatcatgagtggcatattacctttgagtgagttatggaaggacatctgtcgatactcaactcaaaacatggttgatttccttgatcaggaagaaggctttgtcaagcttgaataagctatctgacaagcctaaagtgggagacaagtaagtgatggacatgtcctaagtggtggaaaaccctaagttttgtccaacacacctgctagcataggcagccagcgcttcaaaggccaaaaaattggaggcaagcgtggcaataataactctggccaagcaaaaggcaaaaggaagaaatttaataattccccacaccacaagactcaaaagagaagaaaaggagcttcacatgcttcatcctcctaacagaaactcctgaaacagtctacggagctataaagtccatagttccgtacatgaagcctcctcccataaggaaaaaaataagtaagagggacacctttaaattctgtcaatttcactattattttagtcatgatagcaacgagtgcaagaacttaaagttcgaaattgagttcttaatcagaaagaacaattcccatctgtgttgttatgtgcaagacgaccagacataggcacaagatgcccaaaatagagacccaataccactactagtggtgggtcacctacgggtcataattggcgaaccccatatatcagccaaaacaagcaaagctatggaccgctatactcggaccctccatcatgagcaaaaaatcaatgtcctagctgtagagaaaagagataaacaacttaagcttggagagcctgccatctccttcatagagggagaaattggccaggtcaggttccctcataatgaccttttgttcataacaacacagattcggaatatggaagtttccaagtgcatgattgacaatggagcctcttcaaacatacttttcaagtcaacctatgaaatatggggatctagttgatagatctagcaccttatacacaactgatgtatggattctttggccaaggtcttgcacccttgggatacatctgggtgcctttgatagttggagaaagtcccacaacaagaacactgatggctcatttcatagtaatcaatgtgccatcagcgttcaatgcaataataggtcaaccacccctatacgacccgaagcagtgatgtcaatttaccacttatgcgtaaagttcccaacaaggcatggggtagggtgcctaaagggagagcaaaaatcttcccggcattgctacaacttggctttgtccaaatccaagaaagaaatgatgcctgcaaaaagctctaagcaagagttcggccaagggaagtgaagtttaacccaaagtgaggaggcagacttagatccttgctttggggatcctgtagtgagctttggaccggtagaggagttagaagaagtagagatcgatcccatccttcagactagg

SEQ ID NO: 226039 - DNA, 2007 bp, Cannabis indica
agttcataataaatctcgccttggcaattagtctgcctcgctctttctctggaaagcatactgtcttgattatctgggtcagatgttattttgtcctatcgtaagtgggactcatatcgacttcgatctaataataattgctttttctctaattgagtgtgctggttcagttatccgccttaacgacagaaaaaaaaatctgattaaaagtaactctatcttactctaaacccatacacactcgactcggccacccataatgtgaatgtgcctcatatgcctttgatgggtcatatttcacgttaacatacttgaatcgtattctcagtcttgttttcctcatacttgtcgtttttttcttattttaccaattcttaatcgacttatattttatgggtcttccttattttttttccatgtgagctttttattgatccattcatttttctcccacgggactcaacattttatgaatacattaaagtttaccaatgtttgataaaaaaaaaaattagaccaacgtttctccagtctccattacatttcggcatgtagttaatggtactacattagaagataatactattgcaatggcatgcacaaactacttagaggagctccaataccattgtttaggcattgtttgacagaaataaagctatttcaaatagtggcttcagtgttggactgaatttggaactattgctcctgcccagtatcatggtcttgaatatatattttttattttattttatttttttttcataaaaaatacttattaacatattcaagtataaataataaaatattagacaataatagtaaatttagagttatttaacattagagttagttttagaatgaaatttgctaaaatgatgtggatgagggaattgaatgatgtgaaatattttggcaacttctagtgttgctagtattagtgatgctcttagcgtgtactatatacttagagctagatacatggataaacacaccagctcccatatccaatccagaatatattgtacaggcacgtctttctcctctttcccccttattatgttttttgtttgtagaaatggaaaccacacagtttggccccattttgctgagaaaatgttcaccaatcacaaagctcataatcaaagccttggaaggcgcctattatttcatgtctacattcaggtaattaaatcattgctttctattattaaatgaataatatagaagctttatttacgtataacttgtacaatattgtacactgtcagaacaaagattgaattggtcttccaaatccaatgattgatcaatactaaatttgagacctctgtgaacatggctagctaatagcctaataatttgttacgaatggaagcatgttacaggaaaatctagtgttgaatgatttctttcaatattggtatagaatagatatcataaaaagatttttactgcctatgtttcaagtaacacccttgaaattccattctattgggctggcctagaataatagggactttgttgctatttctttggtagtgaagcttgtagttcgccaaaacttagaagaagttgaggtgtaatgattggatttatagctgatcagtagagagtagtgttagaccattgatctccaattgaaaaatgtgctaaattaattagcacatacaagtaaaaaataaaaattgcaaggacatgtaagtaaatattatatctatagcacaatttttaaattgttaactcaaaaactttctctagtgacgtggatatcaatgtttaacacgtggtaaaaaagataacatcccagaattgagtagtcccgagtcgtagcggtcgacctgggaggggtccctagccttgtgcctaggttgactctgggagctccaaaataaatgttcgaattctaataattcgtttctaactcactatctttcagtattttgtaccatgaagacttggagcaaccaagaccaggccccgtgagctgaaaatacacgaatcaac

SEQ ID NO: 226040 - DNA, 2238 bp, Cannabis indica
cccaaaaaccaagtctcattttcgtagtttttatattaatctttatttttataaggattaattggattttcaagacaaattatccaaatcaaaacttttttttttcagaaaaaatctattattataaattaaagctagtcatttataacaaagagaaaatgattgagggaatctcctctaatcaaatataattattatccagcattaaaaattaaccgagagcagtttgtttgcattaacttttattattatgttgctctcttaatgcaaaatttaatatatcatttaatatttatctaatactctattaaaaatatataataataaaaataataatacaaaaataaatgtaaaatttaataataaaataataataattaagaaaatcatttaatgtaaattagtatgctaactaaattttaataataaaatatgtataatagtaaatataaaaaacataacatttattgtgatacaaattttgtatcatgctatattgtaaggtaaatttaaatcgcttttgattatgtgagatttttgcactataatttagcacattattggagtagatttttaataaagtgaattatatttttgcatctccaatgaaaatgtataataaaaattgatgtaaaaatatcacaaaattatatttggtgccaaatatagatcaaattctatatcttctattaaaaatggtcttatagttctattttatgaatatggcaatgttgttgtaataatacttatcccctgatccggctgctcaaacttttggtgttattcacaagtatttcatatatggttcatgacacgtaattttattatggtaagtttatttatatattactgttagttatatttttatatttgaatctttagaatactaatttgagacttaaagttattgttgattagtttaataatagttgattcgatttattaacaatatataactgcatggggtcacaatatgttattttccaaatgttcaatagttgcattattaaacatgtattgtttatgtcgaaaagtgatcaaccgataacgaaattgtatgaatctgatatttaccacatgttacagaatcaaatttaaaaagtaaagaatacacaaaattttatagaagttcgacctccttaattatagggtaataacctactccccttttaattgtattaatatcgagggaaaatactattcagatcactataagtgggatctgatatagctctcttaaaaatataaaataagaatcaagataacaaatctcaagtgttgagaatgcttgtatgggcgtgtgagagagtgagagtgaggaagagatattatagatttaggcttagaatgaggccttaacacttaatgacttagaggctaggattagacttaggtcttttaggttagaattaaggccttttatatagtagagcttagatatttgtattttaaattgattaattgcaaaagactaaaatacccttaaacttagatattttccaactactttattgggctgctagggcccatttcgcagtccacgtgtaaaattgtacagaaaaccttaccgggtcctttcctggccggccaagcacctgtagggagcaggctggtcggccaacttctttaagtagttgaagcaagtttcgaccctgctggaggttgaaggagatctaaaatgacgtgtcgttttttatttttatggcagccatcgtttatgtaaaacgacgtgtcgtttttcacactgcagaaaatgacgtgtcattttttttcattgtgggcaatcgtcgttcatatattgtttaatcagtcttctcctcatgtaaaacaatgtgttgttttgcctatagcaaaaacgacatgtcatttaaggtagtaaatttttttttttcaaaaaaaaaaagaaaattaagaaaaatttaagaaaatttagaaaatttattattttgatttataactttattttattttctcatttttcttaatttagtcaatattacatttgtttaaatttttcattttttatttaacacatattttcatatatgttatttagtaagaaataattatgaaaattttttaatttggtaaattaattacatgctttatttttacatgtaattataataattgtgatattttaagaatgtgaatatttgaatattctacaattaagtgtgcaattattatatttatttaccaattaagtaatttattgattgaattaattgataatct

SEQ ID NO: 226041 - DNA, 4580 bp, Cannabis indica
ggcacttcctacatctaaattctctcattgcttgaagttgctgaatgtgttggatgtccaacaagattgatttaccacattgtttgactgttaatttgtggatattacttgtcaaggtggagaattgttagactaagtgtgactttgtaatatgtcacataagcaactgttttaactaacttctttagttagttaaaaccgttaccctatgtcggtttctcttgtacataattttagctataaataccttgtaattgcattgtagaaactaatcctttacttgtaattcagatacataatcaataaataaagagagactattattcaatcctaagttctaatttctggtgtatttttggcattaacttttggttttcgattaagtgttttgtggagtgttcttagatgtgtattgaactctcttggtgtgagagattgaactcgaattctccaacagtcatggtccccaaacaatacagcatctcgaggtgggtcctctggttatggtcgaggtcagaataccaattgggaacaaaagccacaaatcagttgggccacattataaaagcattatttttatcgcttcgataagtcgttcacagggcaagaatccttcaccaactttcctccaatggacaatatagccgagatgcaagtaatttgtgtgctggtccaaaatctgtgagtgatgagagttggtatcctgacattggagctactcacaacttgacatcaaattttgcaaatctcaacaacaacaattcctactcatgtaatgaaccgattattggttttatggtactaaatcagattctcagcgaaagagttgtgattgattatcattgtatcatatacctaatatcaccatatgtatatatgttaaactaaaactaaaagtaaatagataaaaaaaatatttaccacttgaagcctatcaacatatctttgattcttttcgcaagttgtatcttttttggttgattagaaaactcatattgtagccttccagatattctaccacacaaaaaattagtgtaggctagtaagataataaagtgtgtagagttctttaatttatctcagcaaatgagcaagaatttttctttttagtgatagagagaaaatattaatcaaattaatctctttaggttttccaaaaattatacgtaataattctcattttttgaatttggtttataaggtatacaaaataaaaattaataattattttatcttaaatttaaatctattaattaaatcattatttgaataattaatataactgatttcgttatagatatttatttgctataaccaattgagaaaatctctcaactacattgagagaatatctcaaccataaaaaaatatttataaccactttttaaattcaaatttaaataaatattaatctttagaattaattaattaatccaaaaagataaaatcagtggagacactcaatgtaggtagtgtcgtctagacacagtgtaggttgtgcctcccttgtctctattaagacaaggggtgtgtcttttgtcctgataacttttgtctttttctaatttatttaatttaattaatttaaaaaataaattatttattacaaaatcaataatcactattttgacaattcaaaatagatttttccaaactctcatacacatctattttctcttcctttgtcagtgtttgatattggcaatccatgactatggacctataattctaagccccaataaactagattcatttattgagtttcatcaaataaataatcttgcactactaaaaaaatgggctttagaggcagtctttaagggctttcagcattagtttttgtgaaattcgataccgatgctattttaggtgacactgtagggggaataaccgataaacgtcgtagggggaaagcattaacagaagatattatactatcggttatttcataataaccaatgacatagggggttatttatttaatgacgtgcttttatggcgtcgattattagcaaataactgacgtcatagtattttatggtaggttattttcaaataaccgatgtcgtagggtgttttctaaagctgaaaattaaatatttttgtttatttttcatatattttatttttccttatttttattaatatatttaaattaaatattaattacatataattaaaaataaattaaccatataattaaatgtatttataggcattattctaaataaatatattacacaaatattttaaaattaatccaagtggttacaagttattatctaactaaacatagaaaaatgaggggaaaaatatttacaagttatataattatacatagaaaatatgggaaaaattcttatacaattcagaatcattacaagccttcgtgaatcactgcaagtcttcgtgaatcatcgtaaataattattttatccaatgtccttgtaattcaatttttacatcgtatgtcttcttatatccccaaactataaaaaaaagtatattttcattagtatatattaaaatgtttgttaatataataaataagataattaatagttaaaacttataacttttatatcgattaagtatttattaggatttacatgtgtgacgatgtcactgatgtattttaatacataaaaacaataaatttatagtagttcacttcctgtatcgcgacaaaaatagaactatatctactttgagtttttatttctcacgagatagtattatagaaataggctaagtgtgagaagctctaatttctagagatagaagctaagaaaactacccacaagatcagagcttcttaatcaccatcaaaaactaggatttcagttttcgagattgtcttaataataatatattaattctatgtatacaaaaaataaaaaataaataaaataaaagttctcaacacattatttttgtaaaaaaaatgttataaaatgtacatggatttaaaatttatggtattaatttagtaatattaatgataaatataatgagaaatataaatttaatcaattaattatctttccgttaaagttgatggtgaaaactaacaccgttaaatcaatgaattaattatcttttttttttaagaaaaatagttttaaatatctaaatttaatttatttattaaaatataacttaaattattatttaaaagtataaaaaaaaattagattattagatgttaattcaattaattaatcgtactttataacaaatatattagttatattgtttaaaatatttaaatttatttactcattttataatttaataaattagttagacatatatttataaataaattttaagctagattaaagtttataaaaatataattgaattgtattagatttaatttttatttctattatttaaattaataattaagtaataacaactctaatataaatatgcatcacatgttactataatatctagtacatatatatatatatattataaaaaatataattttgtaacaaaattattggtttaacagtattattaaattttttttacgttaacttaaacagaatatactataacttaacatgatatttattattaattttataatattattatatatatttaaaaataaaaattatgtagatattttatatatgtaaggaaatttaaattaaattaaatacttaaatatgtaaataatttaatcgtaccatattttaaactttgttagtttaactttgaattaaaataactcacttgagttttattgtttatagatagtcacatctaaacaacacaataatgtagccgtaatagctaaaaaaaattacgtaaagatattaaaatctcaaacttcattttatacattatttaattaaaaaaaaatcaaacatacatatatattacacttagcatcacctaattttataaaaatctaattatacttgcattatacataataccaacgtagtataaaatgtcaaacacttaataatgttgttccttatattaggtaaataatatttcatatgtctagctaagaaccattattattattattaattgactattattatttgtctactaaagacgcatggtccattaatccatgaatgattccatatcgtaaagctggattttgttaatgataataagttggataatgataaataggagtagttctaaatacattatacacataccaacaactcttacattaattaatattaatattgttttttttcttatagtctaacaagtatataactcactgcctttgattagttaggatcaataattttagtgtaccgacttataagttggtatgccctagccagttgaatagtatcgttatggatttacccaagttaaaatattgtaaaaaaatattgtaaaaagtcaaacactaggcttggaaatttggtataaaggtgctttcattttcagtacagttgttttattgtataatttctcgttcatatatttaagatcatgaatgttatctttctttgttaatatattgatgattatatttagattaagtatttttcaatacactattcagttataaaacttggactttaaga

SEQ ID NO: 226042 - DNA, 1970 bp, Cannabis indica
gagctgcacagtatgtttaaaactcacgtaatacgcctatggtagttagggtgttacaacaacaccaagatatatacaagtgaaagtcctataaatcgatgttatttatgactcttctctagttctagaacaccacgaaatcttctttattgatagagcaagaacaaggtacaatagagtcgagatagactctctattggattgtcaccaagtgtttatctctcacactcttacctaagaatcgttttcatctacagaagattcgtcatacaaaagtcaaacccaatctgtctcttttctctgtacccctctctctccacctctaaatctttctctctcaagatcacctctcaaaactcgtccaatctcattctctcttaaaactataagtggagtggtatttatagatcctaaagtttgtggttacaagtgctaagttgttaagattgttacgacttatcaaacttaaaatactcctcctaacagaaactccacctcatcttaagttatagtgctcctggatgaagtgaacgcttcaaggactatgaattgaagcacacgctgaaggatcttcccaaatgggaatagagatagccggagtcgactatctgagactcccttctaggagggaacatctagccaacctgaactcctttctagaggaagactagatctcctaaaaattcctttcgggtggacacaaaggccttccgagaaagcctttcttagagataactaactttgcagaaagataaaaaaactacggagaccttttcatttggaggaactataccacaaaacttaaaggcaaaatatcctcatatcagtagtctccacctcccctggcacttaaatgccaagtgagctactagttagttggattagtagggtggacatatatctaacaaccacgaggtgtgttgcgtgagttaaattgctcataaacacactacaataaatgccacttttactggaccatatatgcgcccaaaaaaagtaggcacaaagcgccaacatagttttgtcaatgaataagtgtgcccgtaaaaagtgtctgtaatttttagtcggtaaaagattttttctgccgctactgccaattgtgtcgcaaaagtaagttttttctagcgagcttatgcgctgagaaaaaaccaaacgctagtgtaaaaaagttcccaaatgcccccacgacgagaaaaataatttttatcaatgcaaaaaatgcgacagtgaaaagtttgtgcatatttttctaattggcaggtaaaggtttaccagacatttggattatggcaggaattagttataccagcacacttatacgcaacggtaaaaggcttacctgccatattctttaatgggtgggtacatttttattagggtttataccctaaaaaactacaaagacattttttgattattaaataaagagttaaatatttgatatatgtatggatgttaagttattaatattattattgaataatttatattaaatatcagaaaactccttattcagatacacgattgtggcttgtagctgtacagagaactaaaacaacttagctatgaaaaaaacagtcagcaccatattaaagttttggaatctttaatcaattgttgctagtagggttcactgatgcctattcttcggtgaaagtaatctcaattcagattacagctgtagtatgacatcaaagtgaatgtgctatatataatagagattttatatcacaagaaccgatatgaatgaagttgactttattaacatgccaattatcataaagacaaaattcatgtcataatgatgattaatagtatatcgatctaaatcttgagtaatcatgaactcttgttcatgttatcagttttttattcaatcattaaagtttcttagagaagataaatcttaagacttctattttgggaatctaataatgtggatggctgggaacatgatttataattat

SEQ ID NO: 226043 - DNA, 2292 bp, Cannabis indica
ggtaagctgtgcaatcccacaccgcttagggaaggtcaagtggtatgattttgagactgtgtaggtatgggatggactacacagttgaatagagcttaaatagattgattggtattacctatatcaacaaggtgcatcttatttttcagtagcctatcacgaaagaactcaagagttaagcgtgcttaacctgggggtaatttcaggatgggtgacctcctgcggataaagcacattggaaacactcgtgttggtctgtaaggccagtcgtcaatccataaagcagctagagtgacgtactcgtgtataaaagtcattattccataagtataaaaggccaataaaaacttgaagcacgaacgttacaaacatctttattttcgctgtaattgataatatgaagatatatgaaaataaaaaacccaaattaatatccatattcgtatacattattattacttttagggaatactcaacccaaactaatttgtacaatccaatttaatctaagtgacaaattatattacaatatatatatatatatatatatttatatatatcatattttggaaaacaaatagatgacatgtctatattgtcttgttataaaaatatataatgatataaatctaattgaagccagctaattaagatatataaacacatagacaattaaatataattacatatattcaagcaaattaatcttgtctagaggtcgtttttagccaaacaaagacatcatacatttttaactaatttcatgaattataattataatcaatatatatgtatctatttattcatctacatgtgaacccatgctctcatactgatcaaacacaagtcatcaaaaatagaaacaactcactattaacttctattgttattatagctttattagttgaaaacatgatgatgaaacaagttgtttacttctcatttctatttctctgttttgtttaccattgcaagggagccacattagctcactctccagcccaagctccatcaaaaaatgtagccatagccccaactaaggctaaggccttaaccccaaccaaagcaccaacatcattgccattgccagtgccagtagtggagccaccatcacaagtgccactcgtccaagcgccaccccacaaagccctttacacaccaacagacgtcaccaaaatcctcgaaaaagccggtatcttcagtgtcttcatccgcctccttaagagtacttctgtaagcattcagattgagaatcaactgaatgtatccaacacattgaccatttttgccccaacaaatggggcctttggtgctctgaaacctggcactctcaacacactctctaacgaagacaaagtccagcttgtccaataccacattcttcccactttagtttcactccaaaactttgagactctcagtaatcctgtacggacacaagctagcaacaccaatgacttccctctaaatgttactgtagaagggaaatcagttaacatatccactggagttgttaacgctaccatttctggtactgtttatgaagataatcagcttgttatttataaggtcgataaggtgttgttgcctttgggaatctttggtccgaaaccgaagacaaagcagcacttggcgccttctcccacaccattgaagccttccaaagatactaattcgtcttcgtcttcgtcttcgtcttcctcctcttctgaagaatctattagcccggatatggcggaaggggacaagtcctcaaagtcgaaggctattgttcttatgaataatagtgttgtaaatattggagttgttatgattgttgtaatgatcactatgtggggttatttttagtttaattatgtaaatttgttgaattatggtactttatgttttcatgtttcagccatgctttaaaggcttgatttattttgtttgttaaaaatgaaagaatgagaaccttaaaagataactagagtacctaattcatattcttatacattactcgatattttaccatttatttcatataggagagtgtctcacaatacaatacgaatcaaagtagacaaaaaaaacaaccattagtgatctcaatgaaagacaaacttgaacattagttccatcgaaaaaattaaagacaaagcaatatttttttccataggtccagattagttggaagatatccaattagtgcaatggttaatcaataaaattcatatcaattggtacaatgggttaatcactgagattcatatgtaagtgagattctacttttcactacaaaaaattttactt

SEQ ID NO: 226044 - DNA, 2034 bp, Cannabis indica
gacaaaactgcaagaagagttttgctatgctaattgccaagccgagccatatcatatcatcatattttctcatatttcacaatcccagagctcttggagactcttataaggacttaagctttgatgaagtgcgaaatgcccccggagcagcctttgctgtgtaaacataatcatgcaaaatatattgcttgtgaaagcaaaattaagtgaacaagttgaaggtaagagatttagttttacctgatggattcctaaaaaatttagagaagagttcttcggtaattaaccagtcgaacaagctcagattttccttgatcctagactcgtttacactctttggaagaacactatgtccactttgaataccccagcgaagagctacttgagccgttgacttgtttagcttctcagcaatctcaactagtaacggttctttcaagatttctccttttaaccaagaccccggtgatccaagaggagaataagcctttaaaaacagaatgaattcacctcagtctattcaaaatttcaaggccaaagaagaccactttctctaatggcatattcaacaaactatggtctaaaagtaaacaataaaagtctaattcaatcaatacaaagcgtgtaaaaagtattaagtaagatgaacaccagtggatttgcacaagctgtgaaggccaggttgctgccagacagggtgacactctacttgattcacagcaggtggaattttggcataggaaagcaagtcttgcagcttcttagtcgagaagttgctcacgccaatagctcgagcctggccagacgcataagtctctccattgtagttcatgtctcaggaagacacaatggagccatgacttctggggaaaatctcgctggcccaagctttgtcctaaatggccaaattgcccctaagacacacttataagcatattcacatcaaaggaccatttttccatttccactcacacacacaaatcatattttccatttaacatataaaagccataactaaatcccaaaaatgtattgtggccctcgaacccaattcggcccaaaatattcggttgtgactatagcgtatcaacttgtttgaaaacacatgcagaaagacaaaataaatataatatataataatatagtctataagcacaatataccataaaattatgattttaccctttcagggtcaaaattataaaaatgcctcgacaccccaacgggggtcttaaaatgaaataactcataataatttcataaattaaatcatataataatataatttctcattaacacttaattaacttagttagggttgctaatttgattattaaaccatagggtattgcagatctacctgagattgtaggagcttcaacaatcgtcattacaccctataatatagggatatttgctttctggttactcctttttgtggagctaattgtagctgctagtttttatggtccatgtcagagttataaaagtggaagcaaaatttgataaaaatagtttttaacttttatctaatatgaaccatgtgcccaaggatctcaacatatatatatatatcgattaaatcaaaactactgaaagaaaaattatagctcttgaagcctatcagagtatctttgtttcttttcgtatatttatcgaacaaacaatccaataacttcgatgaagaatccacaccttgatctttcaggcaaacctcaacacttaggtgtagagtgggctattagatcttatttgaatgaataaatttacgtattattacaatgtgtacttaactcatgagacactgtaattgagttaggattttgatctcgcaacagctgatgtgtacacgtgtgtgagagagagtaggactgagaaaatcaattcctattttctctcgactttgttatacctttttcgtctgttttaggttattgatttatgatattatatatatatcatatatgtagtgctataaataaagtattttaatcctttatttaaaataaaagtaaatatctaatttgatttgaa

SEQ ID NO: 226045 - DNA, 2156 bp, Cannabis indica
aaaaaaaaaaaaagaaattacacgtaaagataataacaagtctgaaataaagaaagttactcccttctgatcaattctgggaattaccaccgtcaagttccggtgggtatggaaacacttggttactcatagagaaatggggtttcttctttccgaagaagaaagagaacccctgttttagtatgtagtcaaggatcagagtcttgacgagtctctttttcgccggaatcaggctaccggatttgagtttgaaacgaggtttgtcgtcgccggaacccagttggttcgaattcgccggcggcggcttcttcttctgggtctcaaacttattacccatgcccatttcttctttttcttcttgttctattgggtttttttcttatataattgaaatagggaattattcatttatataggttttttattttggttttttgtttttttttaataataataataaataagtaaaatttcttggtggtttccgaatcttctcagttaaaatgttctcttagaagaaatttgggtggacggtgatcatgtggttaaaaagcttaaaaaaaaaaaaaacttgaaatttttcattttttacactttaaaaactaaaataaatttttttatatatatattttacgaaattctacataaaaatttatattccaactaacggaccaacctattagcaaccgaaattcgtatagcaacccacataaaaaaaaccacaaacaaaccaatttagaaaaccaaaccataaattttaaaaaaatataattaaaaaaataatatacatgataatttctctaaaaagatataaaatagagcaaaaattttaaaaatatatatataaaaatagttcaacacccaaaatttttcattttgactctttaaaattttttatttacaaaaatacctcttcaataaaaataatttactattttttaattgttttttagtttatttatagttgtgttatagttgtcatgaattatatttctgattgttttatagtttatttatagttatcatgaagttgatttctggtggtttttttttaaatattttcttactatttactaaacaaagtgtatttttaaaaattttaaaagaataaaatactattttggaccttgtattttataaaaattatcaattaaaccctctattttgttaaataacaaattaccaattagatcttctaaaactcatagtaactaacactattatgaggtgttatactgatacaatttaatatttatcttacttattttactagttaggttttacgaaaatagaatgtatattccatgatattgataatggatcacttaaaattaatatgctagactcgtggagtatgtagatttaactgcaaaatcacataaaatatctagtgttattattatacttattatactttattaatttcttataatttttgtgttaaatttattacgaaaaaaaaagcttactattggttaaggaaaatctgcgttaacacatcttataaaatgaaaagtacattttattattaaaaaaaataaacttaaataatttttaaaaattacttttaatatattttaaaaatttttcctccaattattttatgttaattttaatacttattttgattttattttcatattttattttttcgaaatcatgtttaagaaaattttatataattttttattttaattttattataatatttaaaatataattttttttaataaaaatattttttaagaatatgaattagaagaaaaaaattaaaaatacttaatacaattaaagatataaatgttatataaaataaaaatcattaaaataaagtgttttaaaaatttttaaagtgtaaataatttttttaattttttagttaaatatttttagtcaatttttttaatatttttgcctctcgaactttgacattactaggtcatgcctctgaactttgatcaacgttaaaaaatccccctgaactattgaaattgttagatttaaggacttttgtctaattttagtaagaaaagtctaacatggatgaaagttcagggggcatgatgtgacacatgtcaaaattcgagggacatgatttagtagatatcaaagtctgaggaacataacttagttcatggataatcaccgaattagta

SEQ ID NO: 226046 - DNA, 1787 bp, Cannabis indica
taagaaaggataatgttatttctttgacaaagactgcaagccttcgccactatcaagtcttggaagcttggggagtaaatattattcatgtttttggaagggtgacacatggcaatcctgactgttaagttaatccgttatgggctggttaaaagctctaccactaggaaaggcccaacccatacaaaaggatgggtccaagcccatcctgggcccaaaggacacactttcgaggcaagatttatctagattcgaaaagacccctgccttcctaagaaggagtgattaaagctctccgaatgagcattaagatacattcagagagggcattccaagaggcgcctcagagttcttttacaagatggtgtagatgtcctctgaaactaaatcccacaagatcaggggtttgtcccctatgtcagagcctaagagtgcgtgcaccaccaaaagtaaaccacccttttatccaaggacacaaatctgacactacaacacatataaacggcacatgcaagatatatgttaaggatcgtgtgatccctagacgtacggaacgccttcgccccacgagctgggtttcagttagtgggccccatagtcatgaatttcatgtatagtgggccaagtttacatgcaaccctcgcgggtcacaaatacaccctggttcatagtctataaatactactttataccctcatgtaaaggttgacaaattcatgataaaaacaatatagcaagaagttagggttcttaagcttgtaaaatctccattgtaatacatcaaggtcgtttgactaaatacaaatgactcatggactagggttcattaacacccgacaacgtgaaaattcttgtctctactctttacaaatttaattagtctcttaactctgattataatctgtttttaaaaatctcaataaacataaaagtattacggttaaacttaaattataattatcgataaattttgaatattattatattttctttttataaataacacgtaaattaaatatttttaattagaaataatttgtttaatgaataacataaaaacttaattatacaactaaaaatatacaattccaaaataaaaactaatataactaagtatacgtgcattgtacgtaatattaacccaatatatttaaattaataacaaaataaataaataaacatatataaaagacattaatttgaaacaaatccttatataataaaatacaataagaaagaaaaatatttataaaaaaagtttattaattttaaaaaactaatttttaccttatatatataaaaagacataataaagaaaaatattataaaattttaattaaaaatataattttgtgaaaattaatatcattgataaataattattttataaaaaaaatattaatttcataaataaatataagaagatatcaataagaaattattatatgaaaaatacaaattgacactttatttataaaaatatctccataaggtgtggacaacatttacatattttatgtgcttttaattattaaaataccccttacactatcacttacacaatcagacgatggttgctgggtggttgctaggtggttagccgaaggttgcatcacacgaaagttttaatcagacgaatgttactgggtggttggtcgaaggtttcaatcagacgaaggttgctgggtcgttactgagtggttggccgaaggttgcatcaaacgaaagttttaatcagacgaaataactattagcaaaatatttatgcagctgttattttcataact

SEQ ID NO: 226047 - DNA, 1465 bp, Cannabis indica
aaggaagctttggaggagtttcagggggtggaatgagtgccggaagttgggttttggggcctgtgctgctggttttctggtgtgggtgtcgattctgctgggtttgggcaggggcaatcgaggaggggggacgtgaggcttgctgaggacggtggtacctgcctgtattggatgagtttgtgttgttggttgatgcgacagtcactccaggtaggggatttgcggggttttgggggggtggggttattcgaggaggcgagggtgtggtttgggcggcatgggctgttggtggtgtcggggagtttcaggtggtggtggcggagctccttgctatgcgtacgggtctattgtggacaactaggttggggttcaagttggtgaaagtggagacggactcttctgtagttagctcttggattaattgtcctgatactatttttatgtttaaaccaattgttgaagagattatttctcttttagctgttgttggtggtggttcttgttgtgccatttcgcgtgatgcaaatggtgtggcccacgcactaacaaagtctgttacaagttctatagaggttcatttgtggactgatgcttgtcttaaatttattagtgctcctgtaacagctgatttgatttgagttactaacgtgcttttctaaaaaaaaaaggtgatctggtttagttcaagtggttgaatagaattctaaaatggtcactgaacaagaaattataaacattttgaattagtcaaactattggtgatgaatttatttaataccatctcaaataatttaatatggattgattgaagtattgaacatggattccgaattatacaactatttttttcttttctttttcttttataacaaaattaaatttaatttcaataaaagaaagggaaaagtcaatagtcgttgcttcacaggtctatccataaaagagaggcaaagaatgaagattgcagattcagttctcaccaacctcacatctcacatctctcatctctcatctctgtgcttcttttctaaggtatggctgctattttccttctaagaaaaaagtttatggatatcaagtattattttttctgggtttgttttgaaagtttgaactgtagtaaactacaatttgtataggagaacgttttgtttaatacaataattaagaaactgtttcgggtgtgttatattttgtttattaaatttaaaatttttataagttttaatttaagaatgtgagtaactaatttattatttataaataatttattttttataaatatatattactcttagtgttcaaaatatatattgtttgaataaattaaattagaattttaattttaatttcaatataaaattgtattaattgttaaaatatatatatatatatatttttgagttataaaaaatatattttttaaaatatgcttccttgaataaaaatatattaattaataatt

SEQ ID NO: 226048 - DNA, 3361 bp, Cannabis indica
agtctactattctttatttaaaaaaaaacttaaagtctactaattattgtgtggttgacacttatttttttttcatatttattttcaagccttatggtattttgacaagttttgctcaaagtttgttgtatttgtgatagtttaattatttagtgataggccaaaccacataaaccacaaaaactgcacctcaccacaccgcactattttttgcgttgcagtttttgcgggtttttaattttgcgatgcgggtgcagtttgggaaatttgaaaaaccgcatgtgcaggttggtttgaaaaaatagtcaaaaatcgcaccacccgcaccgcgaacacccctagctaccgaagtatggttgtatttacttgtgccaacgttttgcaaaaagaaaattaacatgtttactttttcaatttttcatttcaaatttacattttgttgggtttatccaaattctattttccaatgcattgacaaaatcatgtttattgataggttgtgtagttaagtcatatcagattttaaatttaattatttaatattaattttaccattttgaaaaggcaacacatcaaatccacaagtactatatataggtatagctctccttcctcattcacaagttaaattagtcattttttcttccctacaaaagttatagatgtatgtataacgtcaaaaatataagatattaaaatatgtattgttgttgcactgcactgaagatgtgtaaaaaaaggattggtatgtactacaatcgtgtgttgtaggtgcattaacgaaattttaacaatccaataaatcatctcataacaaattcgggtaataactctactctttatatctatttatttctacgctatattattagtatttgtttctaaatttttttatgtatgtactatatgtaaatacagcaaatgttgacagggacttcgaatgggtggactaggctggatggaactacttccaacacagccaaatatgacatccaactgaagctccccctctcgcggtccacaacgccaacatgggatgagcgttcttatacttgagggaccgaccacgggtgcgccaaacccttgaaaaaaatcgagatgcaagaggaaatcataagaattgagttccacttaattgtgcctagttgcaattttgtaatggtagttggttggttacgtttattattaaaaatttgtaatgttgattacattgttaagaaatatctattttgccctatcatgttactttgaattccattggaaatattgattgtaataacagtgaggatattttcgtatacatacaagttactttatctcattacaatctatatttacagtgtcaaataaagcatcatattgaaatacctcaaagcaaacatcacctaactttgtacccttcattacacacaaaaataactttcatcatttaagcaaaagtggttcctacaaattaattagcaaataataaagatttctttattctaataacgtatttctaggtaagtcttcaccttcccagcgtatatcattaagttcaaagttttgaaaatatgtacgtcaaggtctgtacacagtacgtcacttccaaatttcaataatgcgtgacctgttgagggcatatttgggtattatgagaaaaaatgaaaaaatattttcaatttacaaatctttttcgaacatgttacgttttctgctgttgtgttaatatttgatatggtatttttttaggttatgaaagtagatagtacaacctactgatttgatcttatacggattgatgggaaaatattattaaaataattattttaatgaaaaactaaaaatatagttgtcagttatttaatatcgtactttagggttttttaaaaaaccgcaaacactataacatgtattgtttaaaaagtttattggaaacacaaggccttttgaggtctttgtcattttcaaggctatgtatagaaaagttgacaaaagcttatgtgaagattgtgttgtattgggtatgtctttccaaccctaaacttaaatttgatttggaataatactttcaatgttgaacctcctagaggcagagcattaacaacataatcaatttcatgaaaatatgtgaggaacttatttcaatgtacgttagaagttggatcttctatattttaataagttcaagtttgaaaataatgtacatcaatatttgtacagagtacttcacatcataaatacagtatggtatcacctgtttactcaatatttggatatgatgagattccattttaagtgtaaactttaatttcagacatatttattcgtagaatactttaataaagtttaaagcatttcccttttagaagttgtactaatttttgactactacccattcttaattgtccccgttcataagttgttgggaattatttaaaaattatccaaataatgtaatcttctcaacgatctctgtactatttactctaattttaaaatctaattactcacttactaaaccagaggatgtcttatcactttttaattttctatgtacgtcccactgtgtaattactgacgttaaatggggtatttcctatactttcaataacgtacgtcagggatttcacagtgtaatgtcaaatcaaatttagtaaattatgacatgcagatcttataggattcccttatttataatttacaatactatatcaaaacacgaaacctactgatattactttgggacatttagtatttttgggttctgatatactaatatgacctttttcttattaaaaattggacaaatcaattaggttagaattaatatgatagtattacccaaaaaaattaacaaaactaagttaattaactatgatagtattaccaacaatgaatattatgtcaaattttattaaataattaactaatgaaatgagtggatgtcatatcacatttttaattttaccattttaaccatgtacttattatttcaagacggtgatgtgatatttttatacggccgtatcaactcaattgactttattcattatctctttcatgttcactaatactttaaagcattttatttttactttaaatgtggaaattattatttaaatcataaaaccgtacgttgatttgtttttaatatatatatgtcacatcatatggtacttttctcatatttcttggattttgtttgtggaattttatttaccttgtccttgtattaaaattgtttaactattaaatggtttaattgggattttatcagattgtagtaattggatttatttccattgtaaaaattgtttagctattaaatggttaaattgggaaaaaaaatctattatgtgtacatgaacctcattacgtg

SEQ ID NO: 226049 - DNA, 5087 bp, Cannabis indica
cattttgttcatgtgtatgaggatatgcaagtttgtgtataatgcctgaggactctgtaagataggtaaaggctctaaattctccaccccaatcagattgtaatgctttaatttgataccctaactgtagttcaacttgggatttgaatttggtgaaagttggtaaagcttcatccctagttctaagcatatagatccatgtgtacctagagtatgcatcaacaaagcttatgtaatatctgtacccatttgaggaatttatgggagcagggccccataaatccgagtgtatgagttgcaaaggtgcagtgtatgttgttgtggagtgagaaaatggtaatttgtgtgactttccaagacaacaagcattgcaaatatcaggaaaaactttattaggtaaatgtatattacaattggagagggcaagttttacaattttggcacttggatgcccaagtctactatgccaaagagaaaactgagtattaggtacaaatgtatgactgtgaaaacattgaatatgctgcgtagatagacttgtaggaggagctttagcttgattgacagagggagatgagagatgaagggtatcaaatttgtatagaccattttcaagcttcccaaccaataagatctccttggtgacctgatctttgacacaacatgagaaagggtgaaattcaaagaaaatgttgttatctttggcaaattgggaaacactcaacaaattttttgtcatggcaggtacatgtaagagattattaacaaggagagttttggaaggaaagagagaggaaaaggttgtgttacctatgttctcaataggcaggcccatgccattaccaatcatgatctgttcttgccctgagtaagatgtactggtgtcaagattggagctgtttggagtcaaatggtgtgtagctcctgagtccggataccaagactcatctgcaacagattcagctgaggcaaaataggcctgaaactctgcaacattggcatgaccagcaaagggagcaaattattctgggccaaggaatgacttatcaaacctgtaaaagcattatcgaacaaggtggccaggtttattgcagagttgacagactggtttttgaccataaaaaccctggtttcctctactaggattgggaccacctctgccagcagggttaggttgggtgctgcgattgttggggggaccattcttggacatgtttggttgagtaaattggttatcattggtcctgtagggaggaccgcgattgttgtagggaccctgaaaattggaggaaaaagtgttttgaggatggaaattagagaaaggaggtttagtttgagaaagattagcttcacctttggttatctctagagtcttggcattcttttaacatattgagccataaggagagcttcgatctcggcaactgtgtacacctcttttcttgttgtgacagaggtgacgaatacatcatactcggggggaagaccattgaatatggcttcaatgtgatcttgaggggtttgcttgtgttcaatggtggctagcagatcaacaattcccttaattttgagaagaaaatcgttcagggagcccaccatttttgtgtttcttagttgagtcttgtataaactgatgttggcagagttgagtgtagtatagtattcattgagggaactccatatctgagctgtggtgtcacagtcaatcattctgttggttgtcttttcagacatagacgaaagaagccatgaaacaagaaggttatcctgctgctcccattctttgtaggcaagattaaccgagttagtagattcatctgcagcagtgagaaatttgacatgtgtttgagatggatcaagatatcattgaagacgactccctttaattgaggcaagaacttggtgtttccatgggagatagttatgctcatcaagtttaatggagagggagtgggtgaaagaaacagggtaagatctagggaggggaatttcttgaggatttctggtgtgagcttggttcaatcttaaagctccaccattgttggttctaggattctccattagtgaacgattggaggctctgataccatgttatgatgcaaatagagagaacagaatgaaagaagggaatcactgtttcattgaattgaaaatagagtacaatggttaatatagaatacaagactcatgaaagagaaagaagacagtcacaaccgaaaataaacagaagtaactaactcctaactaacacaataacagtctttaaccattgtccttaatagtcataagttttgttgtgactaatttttttttatagtatacttatatgtagggaactaaaatttattagtaaaaaaaataaaaaaactaaattacattagtactataaaaagttaataaaaagtatatgtttcttccgcttgttaaacatggactcatgccattaatttttggcaataaatttatttttatttttgttattcctatacactcaacacactccaaacatcttctatcacatatttatttttctttagttttaatatttccctttttcttattaaaaagaagtttcctatttataattttattttttctttacatagagtattttttagtattatttttgtctactttatacccctttagaagaatattttattttgtatattattttcgtctattttattatcttgttaatatatgattttcgttattttcttattttttcaatgcatatatttaacattttattagtttattctttatttgaggtagaaaaatatatatatttgttgcacaactgacattttctttattttttaatgttttataaccaatctatttattttacttaaataccaatctctttttgttgttttattttttaaaattaactttaaattaaattaattttattttaataattctgttgaaacaatatattttaattacttagtaagttcattaaactcttttccataatgaatttaattaactctacatgtttaatcatgttaatttcgggtttgtgtctgacacatttataaaatgtgttatcgtgtcgtctaatctgctaagaaattgtattgtgttcgtgtttcaaatcttgacataattaataatcatgtggtatcataaacgtgtcgacacaaacataatacgataacacaaattgtcagtcctaattgtagttttaattttattttattaaaaaaatgtaaatatcaaatatatatttgttagcaaaatataattaaaaaaacaagaaattatatattgtgggtttcaatataatttgtctggaaagtgaatgaattttaaaaatttgcttgagtgctaataataatctcctattacaattttttaagtcaacctccacacttgaaaatatatgatatcatttctgtaaattttttaaaaaatcgaaataatttacagtgcaaaaatagatttgaaattttttgaacatatggtggtaaattagaatatcaggaactatattgtcgatactgtaaactatttttaaaaaaataattagtatttttgccccttgaactttcagccctacctgattttgccccttaaaatatacgacttgttaaaaattttccctaaaatgtaacagttacataattatgctcctaatgattagatccgtttcttttacaattaaaaattagtatttttaccccttgaattttaaccaatacaaaattttactcacttttattaaaaaaaattaattaaaaaatgttaattttacttaaaaaatattttcaaaattttatttatcaacacgtatcttaaaaaatcaaaccaaaattattgagaatctaataagtaatttaaatgaactaagatttttgaagaaaaagtcaaacttatttatatttataaactcataccttaacaaataaagaaaaataattaaaaattcagtaaaaatataaaattattttgaaaaaaattataaattaaactaaaaaatgttatgtttacttaaataaattaatattttttgataaaaacaaaatatattcaagcttgttcttgtaaaatttagtttttaatatatttttacaaattaaattttaatatattttttaatctctaaataaattttctaataaaaaataaataattttaaatatcgcgtaatttgttttaaaattttaatttatttttaaattttcttaatcatttaaaatgaattttcttaagatctaaattatttttaaagatttactaaaaaaaaatattgaatccttctcatttttattttgacaaggtacgatttaatagtagtcaaagtttagggagcaaagttgctaattaacaaagacacgacaccatttaaataaaataatgggacagaacctaacagaaggactaaatttcggtaaatataatagttcaggggagattcttaacaagtcgtatgttttagaggcatatcaatattgtcaaaagttcagggaaaaaaaattgttaattattctagaaaaaaattgaaaatttataggcttaatattatagctataacgaacatcgccacgaaaaaaaaaattagaaaaaaaaataaatataggcataagttttcagacgtgaaagttgactaagaggttgaaaataggaggttgacggtagcactcctctatttatttttttagtttgatcccaaaaggatacctcaaccggccccaattcttttttttggttacaacaaacctaattcaataataagaattatttcaaaaaaattaaattcagtgataagaaaatatatttaaataaaaaaaaaataataaggaagaataaagttacattactaagatagaaaaaaagtagttgatacataacaagcaaactacataatattaaaatgcatgacttagggaaaaaaattgacaacccagtaaccaaacacagaatgtacaattcagtgagccactgccaaaactctatttgaaattagtaaacgtataaaaattgctaaagaataataatataaagctcgaccgagtgacggaactatgaagggctaaggagtggccttggctcccctctaatttttttttttttat

SEQ ID NO: 226050 - DNA, 2039 bp, Cannabis indica
aacaagccgtatattttagggggtgaaattaggtagtgccgaaagtttagggggcaaaaatactaactattctaaaagtaattttgtgaatttattacccattaagagtttagggtttataatacgtattccaacaagaaactaaacatcctaatcaatttacattaccattcttattctattgcatcattattactattaccattacattctaccaaactaatacatcacgtgagctctataattttctaaactcttatttacttataagaaaataagaagaaaaactaaaaataaattagcaaaaaaaattgaaaaaaagaaggaaaaagataggtaaaaaaaatgtataaaagattaaaaaaaatatgtattgttgacctcagatttggccaaccgacagcagaattgtattcaatgttgatgcttgtcgcttgtcgcatgttacataataagaataagaaaacaaaaaacacaggattttatagaggttcgacccccttagttagcgggtaatgacctactttccttttagttgtattgataccgagagataatactattcagatcgctataggtgggatctgaagtagctctcttaaggttacaatgtaagaatcatagatggaaaatctcaagttaagagagaagcaatgatgggcgtgtgagagagagagacacttagagcttagggtttgccacttatgattttagacttagaactcagcttggggttttaggtttagttaatgctctttatataggagagcttaaaccctttaattagattaaataagcatatatttacatattaaattagtaaaatacaaatgtctaaaatgccccttaaaaatagatattttctctctatttttgtgggctgttaaggcccaattcgtaatctagcttgctgaccacgcatgaagctatacccaaaatcctgtcaggccaatgtctggctagccatgcatctacaggatgcaggttggtcggccttatgttgtgcagaagctggccaacctatgttgtggccagcctccttgaggtagctagttcgtcattcgtcgtcccgtttgagtgtcagaactccccgttggttgaagtacttagtaggtgacttggccttcttcttggcgagttgtactgccacgtggcgttaatattggccacatagacatgccacatcaggtgggcaaaaatcaaaataatatttgcccccaagtccctgtgcggatgtatgtgcgaatagggactttccagcatagttgagactcatgtagccttaactgagtaaattttgctgcatatttagtctttgaaataactgtttttgactgtctaatctcgtttgttgcagtaagttaactgcatcgtacttctacatgcattttagttgaacactgcatggcaagtaaagaagtggttccacaaaagctatataagacttatggagggaaacccctcttcattttgcacatttcattctctcactagaaaaagtaacttttgaaagctcctccttctctctagagatcgaagcccacattgctccatctctcgagattcttacactatttcgacgatacaagcttcccattctcttcgtgaaaggtttcttgtactaggtaagctttctaatcccgctatttatttaatttagtttattttgccatgattgcatgaagcttttctttactttgaatgttttttgattcccacgttagattgtaatcttttcgatattttgagccgcatggtactcttaggatgtataatgtgtgatttctagacaaaaaggatctgattctaaccttcattgtgattcttggctctttgagtcacgaagaacacaaagaacgtgttcaagttcttgaaaaacacatgtttagatccaccgtataccttggccggccatggaggttttgttcaagacctggccagccatgggtgttcaccatggggtttggtcggccatagaggcaccataaaaagctggccgccctatgcctggaaataagattcctggctggccctaggct

SEQ ID NO: 226051 - DNA, 1998 bp, Cannabis indica
gttctatttatagaatatagaaattctatagacagccacaaagtcaaatctacagttgtacaaacttttctaaatgaaaatcttgttttgcagcattagagataggatttgctggagcaaaccagatcagaaaaggaaacttaccaaaaacgtgtccgatcatgtatttggtcttgatacctgccaaaaatagtgtatttaatctgatcttatcaagacacaatcaaactcattaagaaaaataagaatagtcaaagtttacataaaaagcaaactttccataagagaatttcttctgttacaacttacaagaagtttctaaacaaataaaatgacacgtggaaaaaaaaatctttcctaagatagaaaaagaacaataaaatcacttaaataaggtgagaaaatcaattttataaaagccaacaaatcacaccataaataaaaaatattttggcatctaatttaaaaaaaaaaagatgactttccatatatcggtgatggggtgtaaggtacttcaatccttcttgtattgtagtcacttttttatatttctttcaaaaaatcaagagttttatatatattgtttattttgtaataatatatataattatgtacatagtgattggtttgaatttataaaggttattatggttatttttatagtacaatttagttcaatatttttagaaattattttaaatagtgtataaggtatttataaatgtaaattgataaaaaactataacgatataataaataaatcaaatatttacaaaaaataataactaacaagaatgtatataacttaaaaagttaataatataacattataacaaataataataatattataatttaaacaaaaagtaaaattattaattattatatgactttttaaatttatacgactgtataacctaaattaaaaaaattgacaatttttttttatatttataatgtttttttttctttataaaagcattgataaatacataacttctcaataaagatgttattatcattaaatattattttaaattagcttatgtagtgaaaaaagtgtttattatatgagttaaaatttaaataatatttattttatttttttttaaaaaaaagagttcaaattacgttcaaaaatttctcaacagcttatatactatgcaataaattttaccaaaatagatagacccatattgtagggatgattttatgtttcttttcgatgatgtaattctcaagtcactatagaaatttaacttttagttataataaaatttgtgactaaaagtgaaaaaaattatggctaattataaattaatattttaaaattccgtaactaaatgtattagtcataaaaattacaagttgttatggctaaaactaaattagtgacaaattatattcaaatattatattttaaatatttcaaattttattgtgactaaaaattatatttaatcataaaaattgttacttaaatataggtgtttattgcagttagtgtatttctcatctttgtgatgaggagtcaaattaattatttagggtttttgagtgaagtacgtgtgtaaattattgttgttgttgttctttgtttttatatataaaaaatacatgtaaattgttgaataaggtagttatttaatttagtccacggttgaccattcaacactgaactcttacacactgctcataattattttatattatttattaaaaaacaaaaactgactttctttaagctgccataattgatgacctgaggactacttattgactagtcatatgtaatgtgtggattgtttgactataataataactaactaaaaacccaaatgtgtgttttgcatctaaacaaaccatcttcaactatattttactagaagaataatatgaattatttagaaaaattagcacaccaaaggtgctaaaaaacaaaaaacttctggacagttcctctgaaggtgagtgcgatctagggctcaaaccttgcgc

SEQ ID NO: 226052 - DNA, 1920 bp, Cannabis indica
tcatgtcgatgccctagtaatagccgcaaatattggaggggataatgtacatcagtgtctttgttgacaatggaagctccgtcaacttactttttatataaataagtgatccaaatcaaataaaccaaggagaaatcatttgcaacagtggactaagaagtcgagatttgactaaactactatatttctttgtgtccttattatttctagttcttcttctgtttttgatagcttattgttgaatacttgctattttaagtgagtgttttacacttttttattcaaattatttaatatttatacgaattttggtgttgtccaaattcttcttataataaaggctatagttgcattagaagaaaaaagtcacttaactaattttcttttaatttgatgattatacactaaaatagtaaaacatttccataaatattttcttataataatgaagtctcacaaatttgttaaatttattaaggggacgtttagtaatacttttattttttatttttttaatcacaaaaataaaagtaaaatttgtttttttaaaaaataaaaatgagttctataaccacttttgctttttaatttttttaaaaaggaaacaaaaatgtgttctataactttcatttttattttgattttatttaagtcggttctaggttcggggctgggttgtggttgtggtcgtggtccgagtccggtactagagacggagcctgagtttgagtcacaaggttcaggttggggtcggagtccaaaatattgattaagaaaaaaaaatgtttaaaaaatttttgaaagtgattttggttttgttcttaaaatttttaaaattttgattctcaattaaaaaaattgaaaagtgaaaacagttttatagaatattttattaaagagaaactgattagaaaagtattaccaaacgtactctaaaataattataatttttatgtaaggtaaacacaaataaaaaaaaaatctaagttagttcaaaaataaataaacgagttgcatcactgaatacaataataataaatataggtggagtttggtaaaggttttttttatatattttttaatcataaaattaaaagtattttagtttttaaaattttatttttcaaaaataaaaatgtgttttataaccacttttatccttcaattttaaaataaataaaaacaaaagtgtgttctgtaaattttatttttatttgttgattttatttccgttgggtatggggtcgaggctgtggtctagagttaggatcgggttcgggatctgaggtccaggtttgggtctaggtatgggtttgtggtgcgggttaggtcctgagtctagtttcacttttgagtttggggtccgggtgcggggtcaagatcggggtcgtggtcggggtgtgagttctgagctaggaccaagttgaggtccatagctaggactaggttcgagcttaggggtcaggtctagggctgggtctagatctgggtccttgctcggggtcatgtttggagccaggaccggggctagggtccagaattgggatcggattcgaggtaagggtttggggtctgggtctaggtttgggtcgggctccgggttcaagttcggtttggggtcaaggttcgaggctaggcttcggggttgaggccagtgtttgggtttgagtctgggtcatggtctgggttggggtttgggttcgtggtctaggtcgggtccggggttcggttcctattctaagtttgggatccgtgtttgggttcgaggtcggggtcgggcttgaggtaggggtaggggtaggggtcggggttcaggtcagggtctaggattcgagattggggttcgagttgggattcgggtttgggtcggggtctgggtcgaggtttgggttgggtgttagggttggggttggggttggg

SEQ ID NO: 226053 - DNA, 2535 bp, Cannabis indica
aagagagattgcccacaactcaagaaagaaagtagaagagagaagcaaaacccgctccagcaagggtgttttctcttactcaatcaaatgtagaagctaaccccttagctgttacaggttagctgtagatcaacaactcttatttctctgtgttatttgattttggggccactccttcatatgcggcgaccaaatttttgataaatttgatagaccgtttgatagttatgataaggggtttggaaccctacttcctggcagagaattagttatctccaaaaggtgggttaggtctttaccgatcaaaattaaggatagagagttgagtgttgtttagtggaattgggcttagcagatttcgatatcatacttgcaatggaattcttgtccaagtactctgctagtattgattgtaagcagaaaatggtgatcttccaacctgagggcgaggaaccatttgtatttgtgggatcagttcagggatcctgaattccaatgatctcagttttgaaagctagagatttgttacaagatggatgtctagggtttttagcggtggtattagataccacacgacctaaataaatttggtcagaagacatcagagtggttcaagaatttatagatgtatttcccgatgaactttcaggtttaccaccacagcgagaaaaagtttttgttatgatctggcacctagagcggagccagtttctaaagaaccttatagaatggctttggcagagcttaaagaattcaagattcagcttcaatagttgcttaacttagggttttaacaacctaatttgtcaccgtggggagctccagtcttgttcgttaagaagaaagatggatcactatgtatgtacatcgactaccaagaattaaataaattgactatcaagtataagtatcttttacctaggatcgacaacttgttcaatcaccttcaggggaaaacactcttttttatgattgatctctgattgagctatcattagttgagaatccgagaggaggacattccaaagactactttttgcacttggtatgggcacaatgaattttcggtatgtcttttggactaaccaatactcttgcagcttttatggatctaatgaatagggtattcaaagatttccttgatatatgtgttatagtattatcaacaatatccttgtgtactctcaataagaagcagagcttgagcaacacctctagatggttccccaatgattacgagaacataaattttatgtcaagtttaaaaagtgtgaatttagctatctcaggtgtcctttcttagacacattgttagtaaagaggggatcaaggtggatttagggaagataatccgtcagggattggccgagaccaaagtcagttacttaagtcacaactttcctaggtttggttggttattattgtcagtttgttgagggattttctaagatttcaacgcccttaatagaactaacgagaaagaagcaacagttttcgtggacagacaagtgtgaaacaagttttcaagaactgaaatagtagttgattacagctccagtgttagccctaccatcgaataaggagaagttcgtggtgtactgtgatgcatccaaaaagggtctgggatgtgttttgaagtaagctgatagggtaattgcttatgcctcccatcagttaaaagaaaatgaacacgatacctaactcaagatctagaacttgtcgcgatagtatttactctgaagattttgcggcatatctctatggagaaaaatgtgaaatgtacactgaccacaagagcctcaaatatttatttactcaaaaagatttctatatgaggcagaggtggtggttggagttggtcaaggattacgactgtgaactcctttaccatccaggaaggccaattggtggcagataccctaagtaagaagggtcctgggcaagtatcaagcattattataattttaccccaattagcaattgacatggttagatcaggtattgagtttgttgtaggaaaacttaataatttaacaatacaatttgatctattagacagaattaaagcagctcagattactgatccaaaattggaaaagatccgagatgacgttttagctggtcaagctaaggactttacactgtcaggtaatatgatactgttgtataaaactagagtttgtgttccaaggagagtataacttagaaatgagattctcaaggaatctcataccactccttattcattgcatcctggcactatcaaaatgtatcaggattgaaaactcttctattggtggtgcagaatgaagaaggatgtggtaaaatttatgtcccgaggcttgacttgttagtagattaaggttgaacaccaaagacctacagggttgttgcagcctctgattcttcctcagttgaaatgggaagatgtcactatggattttgtggtagggttacctagaaccacggggatatttgattctatatgggttgtggtggattgatttataaggtccacacattttctaccagaga

SEQ ID NO: 226054 - DNA, 1495 bp, Cannabis indica
aacagtgtgcggcgcgtgtttatgtcattcacgcgccaccgtagcaagtgggatgcaatcaattccataatgtctgtacatttgaagagaagtcaaaagaaaagttttccaagcacaaaatatcatgaaacaattattccacttttggcaatagtattattagcccatacctctgaaacccctgtgtttatttatttttcattttcaccaaaggtaatattaattatttccctctttaccaaaacaaaaaagaaagaaagcagaaaattacgaaactacccctaaagaagaatcttacctctttggcgttttggtttgctggggcaatgtatcgattaccctggctgttaatggtggggttagcactaccgccgatggcatacatctcccactgagtgaaatcgttgttgaccacgtgtatgtacccgcgtctacacctgggcatacgctgcaccagcgccggcccaaaatggttgaaggcaatcgtaacctgcatacctgaatctggcaagtagttatcgttgtggcccaaaagcataacctcatcatggtgtgagaaatggttgttcgtgatcgtaatccccgtcgaacccattattgcgtcgatcaaaccgtccgtacagtaagacagcgtgcagtggtcgatccagattttgcgtgcgctgtagatggagataccatcgccgtccgatacacctctccatccgacgtgggtgggactcgaggcaatgtctgcgtgtcctgagggtttgcagtggtggatatggatgttgtggatgatgacattagagaccgactggagggttaggcaaccgtttccgacgatgtggacattggcgccacggccgtcgatggtcttgaagctgttgattataagctcgtgcttgagcttgatggtcatatcggctgagaagacgatccagagtggctctgtttggatcacggcgtagcggagcgttccggggactggacgggccacgtcgcggtcggaggagtccgttacgacgtagatctggccgcctttacctcccattgcgtcctggccaaacccaatgccacaatcagcgagtctctggcgattcacttgccaatttgagttgcagcgccagcaatcgtcgatgggatttccggtcgagcactgatccttttcatgtacggaaagcatctgtcttcttgatactgaggcattaactctcctgtagaggaataaaaacagagcaatgccgtgtttggttactgtgaaataatgctaagcaaaatgagctgaaccaaagtaagggttttttttccttcatttctgttaaagaattaaaaagctcaaactaaagactcaaagggctcaaaacccagtgaggatttatcttcattgcgttgataaaacagggtagtgtggcattaaatcccaaaaatgggggaaaacccctaattgaaaaagacccagttacttaaatggttcaaagagtaaaacccagatgggattttttttttttttttt

SEQ ID NO: 226055 - DNA, 1978 bp, Cannabis indica
ataaatagaataaatattagtaaatagtaggaatactcattacacttgatttttctaactttatttagagcttgcgtgaattgtaccaagaaaaagtatactaacaagctaaatggtgcacaatggaattttgtcatattaaaaatcattaaagtcaattaaacttgtatatatggactcacattttaaaaaattaatcatctcatttaataataactcacataaattatatgtctacaaaaataaatatttttatgtttcaaagacatttaaattttaagtagagaaagaatacattttgcatattaagaaagtgagattaaatatatatgaaaaatactacattaaaatgcgtgaggatggataaactcctagtctatttgcaaagtttctttaaaaaaaaagattcactgcccaatgcatacacctggtacacccaaataatggtgtgtgacaggtttaagaaactgagcattgttgagtctgcatagcaaactgtaattttttttttaaatctttgtaggttgatattcttcaacgggagtgtacatatcggatcgtgttctaactaaagttatttctcaaatatattttgaattgtgattaggttggaaactgattttatgacatgtacacattttaaaaatgttagtatacatttagaatataattgtcaaaggatagatataggcccaaatacaataaaggagcatttcatcagaattactataaggtctaaatgttacatgttttattatctatctcataacactagaattgtggaataagattaacttgatcagtggcggcaatcgatctagaaacctagtttcttaaaaagatcatttattttttcaaactcccacctcaagtattagattaattataattcataacaactattaattttaacagttattaacaatccataattaatcattaataatcaataagtcattggtacaactctaataagtcatgcttacaattttttaaataacattcatgttaaactattttctcttaaaagagtttgtggtctattcttaaaatgactataagaacaataagattaatattttctagcgatcacattatgtacaataagagttcaactataatattaattttgagacacaaattaaaactttggaatgaaaataattgaaattgtggtacaatatgccatgaataaataaataaatatcctaaagagcaatgaaatctatctttagtaaagttgcctaatagggtgaagaacattaatcataagttttcactaataaatactcactaggcaacatggagaaacataaagatataaaacaagattcattgccaagaagtttattttgaactaagaatcaataacaaatgagatttacattctcacttgtctttataaaagattttactatagcaaccttcacaattattgctcatttcaattcattaatcaatttcaaacagtgaactagaggagaaggtatacagacaactataaagatttttcacaaatagtggtgaacatatgcaagtctacctatagattaaaacaaacatctcacaaatgatatttttattatgtcatcttttctttaggtttaaaaagagtattatagaaataattatataccagaaggtcagtgagagtaatatttattttatatatagacaatatgttacttgcaagtgatgataaaagtttcatatataaaggtaaaataatttatatctcaaattattgttttgagataaagaatatacataacacataatttaattagtttgagagtaaccacaacatctctgagtaattaaaattatgtattatttatctcatgttacttttatctttaagtctgataaatttaactcaaactagcatttgaaaataatttggaatgagaataaactaggaacattcctttgcttctatttttagaagcctaatatatgcctaagagtttgaataaga

SEQ ID NO: 226056 - DNA, 1522 bp, Cannabis indica
tctctcccaatgttagtagaaggaagggaattgtaagtggatctgattaaactagatttagaggattttgatgcaatcctggggatgaagtggttggttaagtacaatgctactatagattataagagaaagatggtggcatttgaaccagagggtgaaaacatttttgtctttacaggaaagattcagggatctaggattccaatgatattggcacttaagacaagggaattgttgtaagaaagatgtacaagatacctggatagtgtgatagataccataaaggatacaccgaaaggaccggagaaggttcgggtagtatgtgagttttcaaatgtgtttctggaagaattaccaagactaccccgaaagagagagattgatttataaattcaattggtactagggcctgagcaagtttcaaaggccccatataaagtggcactgctagaattgaaggatttgaaagtccagttacagaacctacttaatttgcattttacaaggccaagtacttctccttggggtgcacctgttttgtttgtcaagaagaaggacaggtcactacatatgtgtgttgattatcaagagttgaacaagttaacaataaagaacaaatatcctttgccaatgatagattatttgttttatcagttacaaggaaagaccatcgtctccaagattaaccttctatctagttatcactagttcaggattcagggagaggatattcctcaagcttcttttcgtactcgatatgagcactacaagtttctagtaatgtcctttagcttgactaatgcaccaccatcatttatggacctaatgaatcaagtatttatggactatcttgatcgctttgtgattgtgtttattaatgatattctagttgattctgtatcgaaggaagcttatgagcaacaaatccgcattgttttacaatgtctttgagtattcaaactttatgtaaagtttaagtagtatgaattctagttgtcccaagtgagtttctaggacatgtggtaagtagagacaagatttcagtatatccaataatgattaagctatttgggactagccacaacctaaaaatgcatttgaagttagaagtttcttaggattagctgggtactatatgagatttatcgaaggctttgccaagattgctaatcctgttaccgagctaacccaaaagaattataagtttgtgtgggctaataaatgtgaaaatagcttccaggggttaaagaagagattaattatcgcactagttctaagcttgctaataagtgacgagaagtttgtgataaactatgccacctgttggaaaccatcactaactggcttattcttcatatcaacccctattgcttttgcctattatcttcattaacgacccatgctttcttactttctacattctttctacaatcagctatggagtgtccaaagccaaaacaatgattacagaaaattgttttccattcatagttaaccctaacttgtgtgctaacttcatgtt

SEQ ID NO: 226057 - DNA, 3052 bp, Cannabis indica
agaatcttaataaccaattcccaaaattcctcaacttaatttataataggaaattcaaaaaatattcaaatcttaaaaatttcacgtttcatgcagaaatttgtgaacatttggctatcaaatgacttgccattgtttgaaaaaaaaatctaaggaagtctgcaccaacatataatgttcttcacaatgaagtcaaggacttttttgaaagttattgttgccagtggtttagcctttgttcacatggagaagtagtaaattgccactacagcgtattgtaccccacctttttcgtttagcatttgtccaatcacgagaattccctatattacaaacggccagggacttttcatttggatcagttcattgggtagagatctagggttcttttcaattctttggcacttttcacatctctttatgggcttttaagtcctcaatcatggtcggttagaagtatccttgttggagtatctttttggataaactttgtcccctagtgtgatccacagaaccctttgtggacttcagtgagaagtcgagtagcttcctctattgtaacacatctcaaaagtggcaaggaaaatccatgcttgtacattactccgtctagtattaagtactgtgcaactttccacatcattttttaagcattatttctatcactctgcagtgttctagttttgaggtaagctgcgattggggtcatccaggtaggagtattatctagcactaaaatttctattgaggaggtgatgctaggccccttaaggtattgaatgggcacaaattttgtcttgtctgataccgtgctgcttggtagtcatgtcaaggcatcagcagttgccttttcttctcttggtatttgctttatggtgtatcctttgaattgtgctaagaggtcttgaatcttcttaagtaggtcatcatcttttttcctcgagccacatattcccccaaaatatgtttcaagaccaattgtgaatcactacaattgtcctagtattcagtgcatatctccctagaatgtttgagtccagcaatgagtgccttatacttgacttcattgtttgaagctgtgaacccaaattttaaagttctgtacaattgttgccctggtgtgataaggtcaatccctgcaccgaagagataatcagtagatgatccatccacatatagcttccaaattggtcctttggtctttttctctggtcggggctctttctcttgttctcactttttctttggcctagaacttgtcttcactaacaactttttcattattcgtactttcagccacgtagtctgctaaagcttggccttttattaccactcttgactggtatgtgatttcatactgtcctagctcaattacccatatgattagtggactagaagcatctggtttttacagtacttgccaaagtggctggtttgtgtatgcaataatgtgatgagcttggaagtatatggtctaaactttcttgatgcaagtaacaagaaatatgttagttttttcattagaggatatataatgaactttagcatcaattaatctcttactgacgtagtagattagatgttgggtgccattttcctctctgattagtacgacgctcacaacaaatttggttactgctaagtatatccctaatttttctctgtccaacagcttcaataagataggaggttgtgtgagttgcttcattagttcttgaaaagcttcttcacactcgtcggtccataaaaatttttgttccctcgaaggatattgaaaaatggaacacacctgtcggtagattttgacacgaatttgttaagggcggctatacaacaagttaggctttatacttcattaatttgtgtgggtgacttcataccgaaaaggcctttttcctctaggttggctttgattcctccagcattgactatgaaacctaggaaattgcacgagcctaccctgcaggaacacttaagagggttgagcttcatgttgtatttgataagtattttgaaggattcatccaggtcctctatatgccacaagcccttttcgatttaatgagcatgtcatccacatatacatccatgttatgcccaatttcattcttgaacatttgattaactaaaatctggtaggtagctctagcattcttcaatccgaacgacataaatttgtacactaagaccatctcttcagaaacttgtgtgctcttggtctggtggatgcatttatatctaattgtaccccgagtaggcatccataaagcttaagatctcatgacgaacagtagcatctaccaacttgttgatccttggaagtgggaaacagtcctttggacatgccttgttgaggtcggtgaagttaaatcatgctcgccattttttattgggatttggcactaaattggggttggacaaccagatgaggtagaaacttctattatgaacatgtttgctcagagcttttccacttcctccttgagtgcccatgccctttctttatccaacaatctccacttttgttgcactggtcggacataaggatcaatgtttaaagtgtgggaaatcactgatgggtcgatcccgaccatgttttcatgcaaccaagaaaaaaagtccaggttttctcttaaaaatttgatcaaagcaaattttatttcatgcaacaaacctcaccctagtttaattttcctggtcggcataatgggatcgatctctacttctcctaattcctccactggtctgatacctgtactagggtgtctaaagcaaggatccatttaatcatccttgccttgggaaaactccgatatatcaatactttgtttgacctttgagccttggtcgatatggtcttctttatttttctttgttaagacaatgttgtagcattggcgtactgacctttggtctccttccaggcatttgatcccattcttagttgaaaactttaggcaaagatggtagattgatgttttagcttttatggcatacagagttggtcgatttatcatgacgttaaaggttgagggtgcatcaattatcagca

SEQ ID NO: 226058 - DNA, 1220 bp, Cannabis indica
aaaagaaagttgtggctgctagggtttgaaactgaaaaaggctttatgctgccttaaaggtggtagggttttgagggaatattctcttgatccgcacaagagagggaaggtcatttttgaccttggttttttgactgttagggtattggtgtaggggtattttcgaaatgtattaatttcctgcaggtatataattatcttggtgttacatcctgtcttgttttaatatgtcatctttgttgtgacatatattatatatatatattaaaaattatatagtccccaccaaatatatgtgtaaatatttcgtttataaaaattagtttgagaaaatatataagccatataaatatgtcattctcaaatcaatcattgtaaggtctattcttataaatataatttgcatggctctccacgaattgaattgatatatatttactagaataatattcatgaaaattaatattattcttttggtccccgatcgaggtatactttacccatggtatactacattttaatttaaagcataaaaaggaaacataaaatattttttttttatctcatcttattaattatgtattattaattattaataataatcaacttgtggctatttttttgctaatttctagaaaccatagagctaaaaatctcatgcacatgcacatatggcatttggcagaagaaaaaaatcaaaataaagatgcatgcatattatatataaagtgaatattataaatagatatacactagattattttttatttttttggttgctaattacttttgcatatataactagagaaaaattattaattgttatctgttatgtattattttaaacatgtgaaagaaaacgtgcccttgtgtgcaaatattagaaatatataaataagtaaataaattagaaggagagaggagagagagagtatatatgcaagtaaataattcatatccctgcatctagatttttcttttttggacaaacaaaatagagtcagagatttatttaattaaatattataccatttgtttaatatatgatatcattaattattggtatgattattatatgaacatggtattttcaaatgataacacattcattaacaaacaaaaatacatataaatatatatatagtattgcatttgcatgcatgtcactatatatgtcatatgtatatatatatatatatatatatatatatgcagaggcg

SEQ ID NO: 226059 - DNA, 4704 bp, Cannabis indica
aaattaaataatagatatacataaattccaatagataaaaccgatctaaaccaacatccattagatgtatgattcgatgattaaaattaactagattagatcaaatcgtaaaatctatcacctaatatataatttgatctaaataaacctaaaaatattaattgtacaatgaacacccctaactaagagtatgaataagaattgtagatgtatcatgaatgattgactcccacaacttggtattttcttattgagtatttggtacacaataataaagccttatatatttagcaataaaataaaataaataaataataaagccttattaataaagttgtggtactacaatattctatatatatcgttagtttttaatgagaatattgtaactttaatgagctctttctagaacttttttctctttcttcttttttttttcttcgaaagagactctttcttggacttactatgtgttttttgtcatgatataacttaggtgggtacgaacagtttctaatatttgttaatgatggccccgtagtatataaaatattacttttttgttttttgaataaacaatattaatttgttaataattaaggttcggagaatccattattaattataatggattaattattaatgtttgcggctctattatgcatggcgagccgccaaatatcattacaatgtatattaagtaatttgccctagaagtccaggctggttgagttttagattaaatcatttaccaatgagatataataaagatcgatttataatcagtcaattgtaaatattagctagtgttactgtggttttgaacacttaatgaaactgtcattggcttttgttaactctttattatgtattatactattattattttaccattgagatataataagatcgatttataatcagtcaattgtaaatattagctagtgttatactgtggttttgaacacttaatgagatcattggcttttagttaactctttattatgtattattattattattggctaactgacgggaattatggaattgagtaaactgctagcaaaaataaaagaaaaataatattataaaatgaaaattttaaattgagttgcgaactaggtcgctttctttaaacgtttgcagtattgtttaagaatgtacaagcaatcagaatttgccggccgtccccaagataaaacagcccagtcgtactgtaacgaaacctcactacactatataaccatcaaatacaccctaaaaattatgatatcgtagatgaattttgatagtcatgaaaattgtgttttgttttctcgatataaaaagatgtattcttcccatcagcttaatcacattatataaatgaatggattgaaataatataacgggaaaaagaacgttttatgaatcgtacgtggaggagttgttgttaaacgtattccataactgatacaactaagtattaagttttatatttaacacgtttttaaataaataaaataaggtaaaaaataattattttattaaataaattctctataaaaataaagtgtgacaccaacttagctcgaattggtcggcgtgcgtatgtagtgggtttagtgtgtgtcgttacttatttgtacaaaactaagtatctcttggagaaaattgcaccttatatacctttataaacaatattccatataggattttttttcacttcacacacacttgcacactttcatatttttgttaaaatattcattaactttaacaaaattccacgaggaccccatggtgtggtctgttctgttgattctgacataaatatttttcaactgttaaattatgtcatttctcctttagatgaaaaatataataggaataagaagaagattataatagagaagtgagcaagtatataaatatatagatacatacattgaaaacaacatgtatcatttaatttagtgattttttttctcacttttgattaccaaaaaaattatttgtgattcaaaattaacattattaaatagtgatgtgattaatgcttgatcatgtacctcatgcataaatcaacacaaacaattgatcaagaacaatgcaaatccaataatgcacaaaactagttgatcaaaacagtagcaaaccagtaagaataaccagatgcaaactaatgaaaaaatgaacaaattagacaagaaagtagagagaatcaaacacaaaaaattacgaggttcgaacaaagtgatgatgaatcacttgcctactcgtcgaccagaacaaccccaatggctcaattttttattgagcgagaagaaagaattacaaatgttgatcaccaatgtctgcttgacacaatcattcaagaagtataacttcaattacaatcaacctcacttgtgattctatgattaatcacaccatatgctaatacaacaatctctctttctctctttcttgcacactaaactaggtcacaatacccttaagatctctctctcaactctgtccccaaatagcagtggtagatggctataaatagcttgtgttggttgagcccaatcctaactgtcataactgcagttaggtaaaatacttggtagttatggggttgagccaattccatttgtttcctcacttagtaaccaatcgcaacagttatccaccttggtcattaagaggggaaagggttgatgatgattgaggctgaactggtcttgaatcctcatctagcatttgaggatgtttagtaagtttaggcaaagcctaaacttagctaaactcacatattttgtcatcatgtcagctagggttttcttttattctaattttcttcacattgacttctttttttgctataatgtcccttataaaatgcagtttgatatatatatgcttggatctctcatggaacataggatttttcatcaagtgtagtgcactttggttgtcagacaatgcactgttatgttctctgacttgaaccccagttctcatgtgaaccctttgagccagacagcttctttaatggcctcagtagctgtcatatactctgcctccatggatgacaaagccactaccttttgtagattagatttccaactaatacatccatctaggactatgaatgcataaccagtgatggatatccttgtgtctatgcgtccagcatagttagaatcgacatatccattcacttatatctcttccttgaacctgttatcatagacaaggccaatgtccatagaaccttgtaggtatctgagtatccacttcactgcagaccagtgttccttacctagatttgtaatgaacctgccaaccatactaagtgcatatgccagatcaagccttgtgcacaccatgcaatacatgaggcttccaacacatgaagcatagggcattgtatccatgtacattttctcctcttctgttttgggtgattgattctgtgttagtttatgctgagccaagggagtgctaacaggttttgcttcactcatgcaaaatttgtcaatcaatttctgtatgtagcttctttgtgaaagtgatagtctatctggtctgtcttttcttatatcaatcccaagtatcctctttgcttctcctaaatctttcattttaaattttgcattcagactttgtttcagcttgtctatggcctgccttttgtcgccaatgatgagaatgtcatcaacatacagtagtaaccaaattggttcactgttgtaatacacacaaggatcataatcacttctgctacacccaatactgaccatgaattcgtgaaaccttagattcaattgtcttgggacttgcttgagccataaagtgatttttttaggaggcatacctgattaggtttgctgcttttgtatccattaggctcttccatgtaaatttgttcttcaagtttcccatgcaaaaatactatcttcacatccatttggtccattttagatcatactttgccaccttagtcatcatgattcgtatggatgtttgtctaaccattggagagaagatgtcattaaaatcaacaccttctctttgattgaaccccttagccactaatttggatttgaatctaacttcctcacctggcaaaccttccttttccttaaaaatccatttgcaaccaattaacttttgtcatgatggccttgtgactgtttttcatgttttattcttttcaagggaactcatttcttcttcaattgcagcaagctacttttttcttattctttgagttgacagcttcttgatatgtgcttggtactatgttatcagcttactctattgatgcaagagcaaaggctgtgcagtcagcaaagccaaacttttctggtggctttatttgtcttctctctctgtctctaacaagttggtaatcttgtaaatcagccggtgatgtttcatcttcagttgcttccatatctgtctctgactgagtgagttcatgtgtatccacctgattagtattatcatcttcttccctattgtcttgaatttccaaacctgtcacatcctggtcattttttcttctgttgattgcagaagttttcatagccatctcatgttccttgaacacaacatccctactgattatgcactttctgtgttcctcttctaaacaccacaacttgtatctttttaccctttcagggtaaccaaggaataaaacttgagagcccttggctctagtttatcttg

SEQ ID NO: 226060 - DNA, 1364 bp, Cannabis indica
ccaaaccaactctttatctagtcataatgcatctctagctatatattataggctagattattgtcatttctagaaatatggatacagagatatattaaaaaaagttgataaagattcaatgatcttagaaataagaccagagataatcaaacgatccttccattcatgcttgatcttcagtgcaagttgaatacaatctgctctatatgagtgaaaggcattctaatagttgagcaccactggagcgcatgaaggagagcttgtgcttcagcaaacaaaggagaggagcttccaaccttagcagcagagaaacctactacgatatggccctctcgattttcgacaactgcacctaaacctgtacagtgattatgaacatctagagcaacatctacattcagtataaaagcacccggatgcagttgaggggggactggtggaattctagctaaagtgtttctattggtggacactgtccatgtccttactttggaagtgctactggattaaagagattgagcatccttgtattcctacaaaatattttttacaagatcttctatatttgtacaagggtttagttttattgctgaaaagggaagcatttctttgtgaccatatatatcgtccaactaacgccaaggaacagactaaattcatccttactaaagaaacaaaacccctaagaagatatttcttaattgcagtataaaaatggtaaaatgaagtttttttccacacaaatttaactctagaaaaacctattagggcatgagaaacagtctcctctttgcttctacagaaggagcaattagggctatcaagaataccctcctcaacaaattgaaagcacatgacaaaacatgataaaagccttccagatgaagtgtttgatcttaggaggatttcgatagtccaaactgacttccaccaaggctttaaacagtcatgcacgtaagactataagaggaaggggaacctgaaacagaaacagaaaacagagctagcaaggtgatatgcaaataaatttttcaaaaaatatatattaattcatgcccgaaaaaataaataaatacatatatttaaattttacccttgggaaaaaaataaaatatacacatttaatattaacttacttcatggaatgtgaactaatatatataactacaatctttaggcaagtaattacacatagcaactaaaataatattttctacaacatatgaaatttggtgatgaaataatcattgaaaattaaaaaaatttagctaaattttcaaaaagagatatattaattgcttataatatattgataataaaaaaaataaatggtccactattacacattatttttacattaaaca

SEQ ID NO: 226061 - DNA, 2177 bp, Cannabis indica
aaaataatttccaacagtttgtgtgtgcgaatagggccattaaagatagcggaggggtggaggatcgaagccgtttaggaatggaatcacattcacaactagtttttgtattttgtaagaaagaagagggggcggcagtgtgctaagattttctcatgtgtgtatgacatgaatattagggaaggaagacagtagtgtttatttaggccttagggtttgaactgattttttttctttctaaaaaccttattgagccagcccgggttgggtttgttgggttacaatgtatgcaacccattaccaacccagtcaacacgggttaagaaagttttggcccatttaatttcgacccaagaaaaataaggctgtttcggcccaaattcggtttgggccatgccacatcaataagcagttgacgcccataataagtgtaatatcccgtaaacctaattgtgaataattaggatttattatacattatggattaattaggtagtaatgagtagaattatgatcttgctaaccttattagtataaattataaatttcgttatgagcggataaataagcgcaatttgataattatggagatttatttgaaatatatgaataatacaaattatttgtaagataaaaatattttcaggttcggcgaccttagaggtctgattggaggctaaaaatgtcacaacaatataggtagaaatattgttgggattattgggataagttaattttagaaatactagtgtattttggggtacttggagttgaacaaataccctagaagtaaagatttcttagtggctaaaaaatgataagataattattaatattattattactgttaagattattattaatatattattattatcattatattaatattatattattattattattattattattattattaaacttattagataagataaatttatatatatgtatattttaaaaacaaaagaaaaacaaacccttaaacaattcacctcctcctcctttctctcgagcaaccaagaacaacctaccaactagttttttttttcaatttcttcagtccaagattcagctcctcaacactatagatagacaactaggtgaagctaagcttggaaggaatcttgaggtaagtttagctctcttttttctttggaaaagtttaggtttggaaagtgaattttgcatctgtagttgctggggtttaagtaagttattggttgtgtttcgggttggattaggagtattttgaatgttcaattgatatgtttgctcgttgtggggttaagagaatcaagtttgagttttaagctcaaagcttgagctctcatggcagattttgattgagagcatggctttgatttctattacgtcgggattgttatatgaatgatatatatgtgtcctatgaagtttgaaatgatttgattaggtttggagctagtttggagggtttaaagataagaaaaattgtgtttctggctgttcaaaaccggaattctgtatggtaccaatcagaattctgtttggtcagttttcgaaaaagccaaattttgtattttggccataacttttcacttgggtgtccattttagatgttctatatactatttcgaagcttgcaataagctctaccatatattgcatgttttagagccgaattataaattttattttggtgtatttgtgctatggggtttggtaggaaccctaggttgtccttggcagttgtcaagcagtgtttgggaataaacacttattgagttaccgctgttgtgacatagggccgagatcatccgggatagttctctacttgggttggccaacatgtatgaacctggattaaaggtaggaaaagtatattgtactgcatagtacgttgtatgtaatacaattagtattgtaataaattgattaataatattgagatatacttaaaattgttttataatgaaaatattgattggttgagtatcgataatgtgataatattattcatgtgatatatgggctcacctgattaggtgatgcaattttcctagagacgtatcgggcgtaggtaggggcattagtgatatacgatgagtactgagcgtaggtacgggctcacctaattaggtgatgcgattttcttatcgacgtattgagcataggtacgggcgtcagtg

SEQ ID NO: 226062 - DNA, 3417 bp, Cannabis indica
tcgggtcataattaccaaaatgcccctggctcaccaacggggtctttaacatgttaaatttcatataatttcacatatattgaattatataataatataattcctcaattaattcataattatttagttagggtttttcctaatccttttcttaattctgggtattacagcaatgagggaaacatcttgtggtcttacgaagggacttgaacaaagaatcttgtgctagtagatacaacgcctgtgcccccctttcaagagcaacgaaagtgaaaggtgtcatcaatcatggtgggaagttgcacaatgatgggatgagaggagtaccactcagaggccccatgaaaattgcaaggagaactcaagttccactcaccaactcccgagaaaggatgaacaaaagaataaaaaagtagctagaagtggagatgcaagatcaacgttaagaaatggctaccgtgtcaaaggaaaattcgaaagatgatgggttcgatgaagaatcccctttctcaagggaaattaaaattgaatcacttccacccaatttcaagaagccttgcatgactctatatgatggtacaactgatccaaaataccatctaggagcctttcatgagctaatgaagatgaaaagcgtgtcatgcaagtcaaagtgttagtgctttgtgctcacacttaaagaatccacatataagtggtttaaaaggcttggaccaggaatgattacatcctggaaacaatttttggtggaattccttcagcagcatcaagtagcgagtgattacagtgtgcctgtaacaagtagagccaatgtcatgaagcaaggggagaaagaaagcttaagaagatatgttcaacgctttgatgccgaagttgccaaagtagggaggatgtttgaagatgaactcaagttttccatatccgctggagtatgccctaaaagctatccaaaccacataggtaccctcgttctatatcgaaattcgtccctattttattatagcataatcgacactcacttctcagatctcgtatcgaaatcataaatatttaattgatggccaggaaattaaaagaattaaaaacgaataaaatagaacacatagaaaattgggagaagaatcaaattatattaaagccataaatagatgtcaaacaatctctaacaataccctaataaatgtttagctacgtctattcattgtaacaattcgacacacatcaattaagaacataagaagaaaataaagaagaagaaagtgttggaaaactctgttgaaaagccttcccgatcactttgtttttttttaatttttgtactctctaattgcttccaaaaaaatgtgaaaatccactccttcaaatagccaaaaaaagatagaaaatatcaattttttgaaattaacataggcgggccgcgacaattggcctttagtgttgtagcccgtgtcgcgacccttgatatttcgttgatatttttcatacacaggcctcaacactcaaaggaagtgtcacagcgctcacttgcaattttttggcatagagctcccaatccatcctctgcctcaacactaacccagtgtcgaggcgcgcccaggtcttggtcaataataatcttctctagccaaatttcgaccttttaatgccctaacatggaattttagtgttgagaggctactccattattttcattttttttttgccttaagagatccaaacacaccagaacttttggtattaggcctaacggactcagtgaaaggggctcgtttcggtattaggccttcattatggaatgaagatcccctattaaaagttgatatctcatattatgttaaatcaatctaaatttgacacatcaactaattttttattaattaaaaaattaaaattttaattgagtcaataaaagtagttaacatatttaatataaattaaattaattgatatgagtcaacaaaaatagttaatatatttaatataaattaaattaattgatgtgtcaaatttaaattggtttaatacaatatgaaacactaatttttaacatgaaatcttgattactcattatgacctacttattagctatccagaaataaggatatcaattatatcaatagacacttcattcttaaataaagtaccctataaatatatgtctataattatcaatagttcattctcatatttataatgaagtaatcaggacattaataaatataattatttaatcaaaactttgattgataatataatatttattggagcttgaaactatgggtccataggtcctccaaggtggatgtaatgaccgcattttatatatggattagaaaaggcaattagtactaattattaatattatagtagtcatttgtgaatttatttaattatgggttctattattaaaaatagggcattagagttataatttttcaatttcgaagattttattaaactctaggggtattatttgtgttatatgtgaattatgttatttttgtagtttttgctccgacaacaaaaatgcaatggagggctagtttgatcatgtgggtaagtctagaaccttatttcttagtgtgatgtatattggagggaatagagtaccgggattgagcggggttatggaaatgcttaagttataaaagaaagggcattttagtaatttgccacatgggtgatttgatggctgccttaggtgttgacacctagcttctattttaagccaagattaatgtagttttatttttcatttgaagaaaaaatagagaaaaacaaaggaaaaataccaaaaatagaaaactctccctctttcccttctctctcttcaaaccagtaaggaaccagtgacattgttgttggtttttggtatttccagcaagaattgaggaggttttaaccaaggtaaaccatagacactctttggttatgtttttctcaaggttttaattggtttgaacttgtaattttagagaatagggcctgttagggtttgattaggttatggttcagtttttatgttccttttaagttgattctaggttttggttgctgatttgagtgtattgtgttggaattatacaagtttgagctttgaaactcaaacttaggtctttaatggcatgctttgattcagtgtgtttttttgagttttattggttaaattatgttgtgtatgccctgttttggtactctggaaggtttggtagcttttggttgagctttgagcaagtttggggttctttagggaaaactggtacaaacagattaaccggtttaccaatacctgtaaaactggttaaccggttttggcaggttccccgaataacctattttctcaattcttgcccatttcagtgcttagttgggtatttcctgttttctaagatattgtatgttgggaatattttacca

SEQ ID NO: 226063 - DNA, 2934 bp, Cannabis indica
ttagttcggattctaataattttcatggtatttggcatgcctaccttcgggtacgggtttctatttctttacacaaacctctgaagaggagaatgaagttccggaaacgtgatggtgaagcattttgggctaatttcaaatatgagaaagtccccacattttgctttatatgtggtattaggggacattctgagaccttttgtgccaagttatatgatacctttgtagcagatcttacgaagccatatggactctttatgaaagctccacctagaagaaacaattttctgactgcctctccatggctccggcaaagtgaagcagcacagacggatactggtggcaagaattctgatgaagatattgaagttaatgctccccatgatactcgacttgatggtagggagaataatattcaaagaaacaaatatggaaacttgcatgattatgggaaggatattgcttacaattcgggggttgtcaatgtaaagtcgaatatggctttaaatgagccagttgtcttggtcaaagagaataatgttttattctcctcggatatggaattatcaatatctgagcttaaaaggagacgtgttgggcttgtcaatactaacgacccaactgggcctacagtagatgatatggaacatgacaaaaatgacaatgaggaggaattagaagtaatttcaaaaaacggagtcaaggtgggttctggtgtccaggcccaccaagcattatgagtactctgagttggaactgccgtgggcttgggaacccacgggccattcagttcctggaggatatttgtttccaaaagaagcccaaattccttttcttatgtgaaactctttgcaccaaagagttggtgaaccgtgtacgggttagacttggctttgagggagtattttcagtcgatgtagatggaagaaagggaggacttgctctgttctggaaatcgaatgatgaagctaagctactgggcttctctcaacaccatatcgacttggaggttaatgttcaaggcatgggagtttggaggttaactggtttgtatggagaacctaatagacaattacgacatcaaacttggcagcttcttcgaaacctctctcatgaatcaacgcttccatggtgtgtaattggtgattttaataatatagccagcaatgatgagaagaaaggaggccgcccatatccttctgcactaatctctggttttcaatcgacccttgatgattgtcaccttattgacttggagcttcgtggctatccctttacttgggaacgtggaaaaggtactgaccattgcattgaaattcgactagacaaagctgctgttactcatgaatggttagttatttttaatcactctacacttaccaacattgactacacttgctctgatcatacacctatatttttacaacctgaaactatgtcccatgttgcctcttttcagtgctttcggtatgaaaatgtatggtcccgtgaaccaatttgctctcagttggttgaagattgctggtttaattcgcaaggcttacctctgtctggtagaaataaacaatgttcgatacgattggaggaatggggaaaggaaaactcagggaatttcaagaaccgtattgcccaaagtaagaagcgtatgacaagaatgaaaagccagtcaagttcgtttctgtatactgagtttgaaagcgaacaaaataattattttgaattgttggctcaataggagatttattggaaacagagatcgaaacagttttggcttcataatggtgacaagaataccaagtatttccatgtttctgcaagtgctaggaaaagaaacaatcaaattcgccaattacaaaatactgctggggtctggaccgattgggcaactggccttgatcaggtaattgtccagtatttttcagatctgcacactactagttgttcgacaaatgctggggtcattagagagattaattgcactattagtaccagacaaaatgaagaactcttaaaaccagtttcttgtgaagaggtgagacttgtcttgttccaaatgcaccctgataaagctccagggcctgatgggatgggtccgggtttctttcaacatcactggaatactgttgggctagatgtggttaatcttgttcaggatttctttcattcaggctccttcccaaaagagttgaatgaaactaatcttgttttaatccctaaaaagaagaatgtcgctacaatgggagatttgaggcctatcgctctttttaatgttgtctacaaagtgatctctaaagtacttgctaaccggatgagagatatcatcgatcttattatctcagacactcaaagtgcgttcatccctggacgccttatctcagataatattatggttgcttttgaggtcatgcactatctcaaatgaaaaacaaaaggcaagaaaggctacatggctcttaaactggatatgagtaaggcctatgatcgggttgagtggagttatcttcatgctgtgatgcttcaaatgggatttgctgaaagatgggttaacttgattatgttttgtgtttcatctgtaagctattctattatgcatgacggtcatcgaatgggccctattctcccttcacgaggtattcatcagggcgacccgttatctacttatctctttattatatgtgctgaaggcttctctgctctcatcaagaaatttgaatctcagcaactcctccaaggatgttgcgtggctcatggggcaccatccattacacatatgctctttgctgacgatagttatctgttttgtcaagcaacgcctggtgcagctgtggggatttctaatctacttcaagtttttgagaatgcttcaggacaaaaaattaacttccacaagtccacaatcttttttagtccgaatactagtgctgaaaatcggac

SEQ ID NO: 226064 - DNA, 3344 bp, Cannabis indica
cgcccaatacccatttaaattaaagcaggggtggggaggggattacccgacgggggaaggatttccatcgggtacccattacatatatatttttgaaaaaaaatgatgtctcaaagagaattaaaaaacaataatcataaaaagtcaataaaacaataaacttaagttgaatagtgtgtatagtaaaaaaaaatgagtataatcaataaaaagcctaaagcatgaaattattttaattgtagtagttatgattttaaaacttaaatatatacatttatcatatcggggcgggtatctattgccctgccccgccccgtttctgactcgcgtatgaatctttaaacccatacccgcccccgccctcgcccccgaaagtcaacccctgtacccgccccattaggggcgggtacccacgggtacccgaacccgcgggtataattgcaatccctattcaatctcattctccatagtctggagaagatccccaggagaaccaacttcgacttcctcattggagaacagtataggctcgtatctaaggacttcatccatggatttggtcttccttacatcaatggttgagtcaagaccacgtttcttcttcttctttgttggtgatttaggtttactttatttcattgccctcgtcttcgctatggctccagctcaaggagctgagagaaagctagaaagagaaaaccattgttcttcagcgttatgttgaccaaggttttcggcaaccagttaaataatgtataagaagagatgtagaaagtttaatgcatgagatttttacgtggttggggcattaatgagccttagtccacgagtcttttttattaatgagagtatttattacagagaatgttcttggtggatttttctcctattttctctctttaattcctttaaaccaagaatgttcgaccctttttcagtctgtttgtggggtatttatagtgtttatctggggtgatacctaggaatggatcacttgtctttctaggttagcttcataggggcatgtattcccaacagatacaaaataggaaatacatgacctataccataggtatcttaggagttaggtggatataatcttttattcccttttgactgatgtgatttctcataaattagccgtcaatagccttattgattatagtgtaatagctgaaaaaaggggggatacgccatctgtcatgtcgtttatggagatttcaatacgtcttcccccatgcggcattaaatgcgaagtgactgttgaagagatctctgcacctcccggaactgccttagcatacctctggcctcccggagagtaaaaatacttcttatgctctcctccgggagacaccttcctgagtattcctctttcgcctaagacttagtcggtttcataagtgttggttcttacagatccacgtgtcagcctcattcatatccgcgtatattgggaaaaatcaagggcaataggttaaaatattaatgatattaacatatttttatctgttatttaatttacaaaaaatgaaaattaaatccctagaatataagactaatatcttaagggaatatctctattttcgtgggttgttaggcttgtcccacaatttactcagctgttcagagttgtttgcataagttggctgcccaaccctatttttagagcctggccggcctatgaccttccatgggctggccctaaaaatagggatggctggccaacttgtgcaaacaactttataatgctgagcaaattgtgggacagacccaccagtccacaaaaatagggatattccctcaagatattagtcctatattttagggatttaactgtccctttctgtgatttaaataatagataaaaagatgttaatatccctattttaaagggatatctttacctttttgaattaggatcttttgtaaaccctacattatataaaggacgttagatcattctctcaaggctaagtcattccacaagcagtaaagggtctttacaagtcttctctcatgctccatgaagcttccctagaatatagtcgacctatgaccttccatgggccggccaggtacagtctagtcggcctttttcacttctttgtacagctttacagccaaaggtcgggcctccttggttgaacaggcctctttggtctgacatgtattcttggctggccagcttatttttaagacctagctatcttataagcttcctttggtcagccagacacggttggccaaggtcttgatggcccgcttaaccccttttgctaattgctttacagtttttcttggttgctttagaacccttgacatctgacacgccgtgtaaggtgactttgtcctgttattgacaagttgtattccacatgtcctcagttttgacagtgtggacatgtcacatcaagtggacaaaatttggaataacaatctgccttttcgaggcaatcagcgaaccaagttttcaaagtgaacctaataaattcaaccaaaatagttattagatatttcttgaattcttttgtcacaatattgaagctttgggcaacattgctggtcattatgttgtatcgatcacctagacaataaggacaaacccacttttcaaacactgtactctccacatatacagcaatggtaggatccatttatttaagcttcttaaattatctatcaaaactagccttcgaccatgagtaagatatagacaatgttttcttgtgacatgcatcaatcttgaacttggagttcacgttcataacaatgtggtgatagcatgcacaatgacatgcttcggagaaaacaagtggtacaacatggttgatgctttgatacctatttgacacaaacactaagttctcaaccaccctaatcacttccctcaactttcgtaagaaatatgtctaagattcgttattctcactgtcaactattccaaaagcaatcagaaataattgtttgtttgcatcgtatgccacaaaatttaacattatgccaacatacttcatcttcaagaatgtgtcgtccatacttattacaggacaacagacaataaatcccctcctacatgcaccaagtgaaaaataatacttgaaccgctcaccctctacttacaggtcagtaatggtacctagattcttttgttgcaacatgtacaaatctctaattttaaatcataccccaacgggccaacccctaactcttcatataaaattttacgaattttctataaggttgtgttcacttttataatcccaattaaaactctcaacaccccaaacaccatcatacaatataaccagaacatagtcgatcatgtaatttcatacaaaaaa

SEQ ID NO: 226065 - DNA, 3480 bp, Cannabis indica
gtctgattccagtttcgggtccgggatcaggtcagacttgaacctgggacccgatcccagacccaaactcggacctagacatggatctggatacgaacctagacttgaacctagacccagccagacccatacccactgggatcgaaacttgggacttggattcggaccgagaccaagaccgaaacctggacccgtacccaagacttggactcggacctggacccaaacccagatccagaccgggatctgaacttggaccaagacccaaccctggacttgaactaggactcaaaccccgacctagacggagacccagacccaaacccgaacccggacatggaatcaaaatcggaactgggactaggacctgaacccaaacatggacccggactaggacctacgacctggacctaaatgggggaccttgacccaggcctcaggatcggaacccgagactcggacgcggacctgaatcaagactcaaacccaggactcaaacctagatctagacccagaccgggatcggaaactcgaacccgaactcaaactagaacttgaaccccaaccgggtcctagactcagactgggacctaggaaccggaccaggatggggacctggatcagggacccaggcttctaaaactagcaccgagacccaggacctgaccccggacccagatcctaaactcggactagggccaagacctaagacctgaagtggaacaagactgggacctgagaccgggatcctgatttagacccgtggcttaaacctaacccatagtcgatgtttggatctgggacccatacccagactaaaatctagacccagactcggacctaaacccggacccagacccagacttagacctaaagttgagccaaaactcggactcggacctaaacccgtaccccgtgacccaaaactggatgcagaacgtaagcgtaccgggacctgttaagaagatcgaggcactgtgacctagtctcattcccggaactagaatctaactaggacctagacccagaccaggaccgggacacggagccgaattaaaactcagatcgaaactcaagacgcgaacccgaacccaaacacggacttggacccaaacccagacgcacaaccctgaccgagattggagactcagacttggacccaagtctcagacctagattggggaaccaaacttgaaattagaacctaaatcgggacccagtagtgggattgggatccaagacccaactccggtttctgtcctcgacccggacctgcacccagacacggacactgacacagacacggactaggacctagtatttgaatcggaacgagaccgagacacaagattgggatccgaatcttgacccacatcccggggctttgacccaacccgtagtcactttctcgattttggaatcgtaccaagacccaaacctagaaccatttctagacctggacccaaatcaagactcgaacttgggacccgaaattggaacaagaatcagaatgaggaccttggaactggaattggaccaggacccaaaatcagatctagatgcagaaccgaacatgaactcggacccaaactaggatcgataccaagacccaaactcgaacccgaaccgacacttgcgccaggacctgcgacccagaacctggagccctggacccgtgacccaagacctggaccagaacccagacctgtaccaaaacctagacctaaacccagacccagacccagaccaagactcggacccaaactcagactgaaaactggacccagacccagacccagaccaagaccaagagctggactcgtaccagaattaggactcgaacccaagactcagaccccgactgagatcaggactgggacccagagaaagactaggaccgagccctaaacctcgattgggactagaacctggattgggaccgggacccgagatcgagacccgagacccaagacacaaacctgggaccaaagaaccgaaccgtgacgtagatgggggactttggccccaaacccgaacctggaccaagacctggacaaaggatccaaacctagatgggggacttggacccaacactgggccttagaactggggtttaagacccaaaatttgaccctagactcgagacactggacccgaccttacacttggaacccaggacctcactaccaggacacaaccccaaactcagacccaaactaaaacttaggactcggcccgggacccgagacccaaactagaacaagactgagatccaagaccgagatctgaatctgaatttgagacttcaacatgatccataatcagtttttgaatccaagacccggacccatacccgaaccgggatccagacccaatcttggacccagaatcggaatcgaaccaggactgggacgagaacccagacctgggactgtaacagcatccaaactcaacctgaacccataccgagacttggacccagactgggacccggacctagacccagacccaagaactagggctggacctaggaacaaagaaccaaactcggacccgagattcaggacctgaccccagacccaaaccttgacctaggacccaccccgagacttaggatccaggactagatgcttggactcgacccgtaccccatgacttgaaagtagaaccaaaactagaagcggatcgggacccaagaacagagccaggaccaggacgtggacccaaacccaaaactgtaacttgaccagggcgcagactcggatatagacccacactcgcactctgtgtctgggttcgggtttgggtctgggtctgggtcggtgtttgagtccctgttcgagtctaggtccaggtttgggtccatgtgtggatttcgatctgggtctgggttcgttccagatccaagttcaagtcctttgtgcaggtccaggtttgggtttgggtctggctctaggtcctgatctatgtcccaggtttcgatcttggtctaggtctgggtctttgtcaaggttcgtaccttgatccctatctaggtccgagtttgtgtttgggattgggtcccaaatttaggtctaatccagttctcaaatccgatctgggtacacgaccatgtctaagcctaagtttcgctctcagtttgggtcttgggcttggtctgagttcggttctaggtctgggtctgcgtcctggtcagggtcctagtcttgttacacggtcccggtgtggcagttcttgtttaggtgctagtttcgggtcctgggtctagctctgggttcgggtttgggtcctagtcttggttcgggtcctagtctgagtcccagattcaaacaccgactacgggtttcttccaagccccatttactagattctaagtcaagatctggatccctgtcacgggtctaggtctggttctggtcctgggttccaggtctaagtttgggtttgggattgagaccgggtgcgattctaggtcccagc

SEQ ID NO: 226066 - DNA, 2454 bp, Cannabis indica
acaaagttaaatgtaaaaattaattataaaacaataataatgcaagtcatttaatgcaaaggagtatgttagctaaaatttaataataaaatattaaatataaaagcatagcatttcttgtgatacaaattttatatcatgctatattgtgatgtaaatctggatcactttttattatgtaagatttttgcatcataatttaacacactattagattagacttttaacaaagtgagttatattttatatttacattaattatttgcatctccattggagatgctctaaatggctcaatactacaagatttcaaaagctaagagaacaattaaacttgacgcaaagaaagaacaaagttggtactgagggggagtattgaaaaattatcaccaactctctagaattttctagagattaactaaataaatctatcattttgggctaagccaattataataaaagtaattcaaaataattaagtcttgtggaagtttcaagaatattttagtaacacaattaaaattttttagaatattatagttggtttttgagtagtataaatagggatttttgggtcctctagttgtccatctaacaatagtatttcaaaatgtgtccaaaagagtgagagtgtaaataaagtgttctaaaaatgtgagttatatataagtgtattgtaaaagtgtctagtgataatataaaaatgtagctaaggtaaagtcttcatggtataatttacttttcctattgctttgccggacatcatggaaattatatgctaaatgaacttaatgccatggcaaattggtttctacaaggaaggaccaccatctttttcaaaattttagtacataggggaggaacccacaattattaatgatctggctccctttctctagtcttccaataatttagggtttttttcattatttttataataacaataataatttactaaagatagatatatatagatgcccactactctaataaaggagcttattattcaccaccagtttcaaatatgagtattgttgccactagtagtatttagcatattttataggtggtccttcatgattagttagtaacattgtttaaaagttattttcttaaattatataggatcagatacttaattataccaataataatatgatatcaaacaaagtatagacagcaatagtatttttcaaccattctcgtttcaatatacagtagaacctctatccaagaatatacttgggaccaagcaaattatattctaattgagaagttataactaaatagagttattctagaaaaaaaaaattaaataccaaaaaatattaatataaaaataataacaataaataatcattagtactatatcataataaaattattttaaagtaaatataatgtttatacatgtattataatttgaaataaaattattaattttatgtaaataaatttataaaatatatgtatatattttattaaggtgtaattattcttatatagaggtatattttgttaatacgaaatttcaaaaatgtataactaattacaatttagaagttattcttatttataactggctcaaattaagacttgattttttataacaaattagagattattcttgaatagaatatttttaaataaaagttgttctgtatataatttaccattaactaggtaaataatttaataagcgctttgtaatatgtgtaaactttgtctcccattaattataattaacaaagtaatgtcatatgaattaatgagtagttaatatatataataaaaaaaaataatgcatttaaattaataataatttacaaatataatttccttttttgtgtaagaatttaaataaaaatcatttaaaagataaaaaataataaaagcaaaatataattacgcaaaatagatatttataaatagataattctcatttggtgctatgtgtgatttttatccattgctaaaaattatttatattccgtatcatgttaaatattatacctattcgtacttttgaaaatttttttttaaaaaattatatatataaatataaaaattaaactaaaaaaagtctcgctcaattgacaaaacaaatagaagtacttttaaatgtgcattgtattttccataaatatatatatacccaacaattcatatacataataattaagttaattattatttttcattttttttctttttggaagaaaaatatagttttttatttttatacttgaaattatttttttttaattttaaatttacaaaaatacacgtagcaaccaaaaagaaacttatattataactaaaacttataaagcaacccatataaaaattactagaaaattcatcttaaattataaaaagctttcaattccttttccttggttgttccaactttccaacattgagagatagagtggtacaaaaggtagagcttct

SEQ ID NO: 226067 - DNA, 1500 bp, Cannabis indica
cagacggactccggctccaggccaccctgcacttcacatttttagcttccaacaacaaagccgaatacgattggccaaagttttgagggctacaagggtagaagtcttcagtgattcacagtaaatggccaaccaagtatcaggggaataccaaacgtgtggagaaaaaatggccgcttatggggcgattgtcagagaattgctctaggagttcatagaatacaaagtggaaaggatcccatgagaaaagaatgctcacgcggattgcctggccaagctagcctcggaaggtgaaatagaaaaactgggggtggcacccgttgaacacctcacggaaccaagcatcaaagccaaagaaatggtagctacaaatgagcaaggaccgagtttgatggactccatcatcaaatacgtaatgaaaggtgaattaacttaggaaagggttgtatccaagaggttacagtatcaggcacatcgatacgtaatgatggataatgtcctttactggagagggctcaacatgccgtacttaaggtgtgtgttggaccctgaagctcgacggatcatgcaggatatccatgaagggttctgtggagatcacacggaaggtccaagtctctcaaagaaaatattgagacaaggatacttttggccaacaatgaagaaagattgtgtagactatgtcctaaaatgtgattcgtgccaaagatttgcgaacataccgagagcctcgcccaacgaaattactttaatgactagcccctggcccttcgcgatgtgggagatagatctcattgggtccttgccaatgggaaagggagacgtaaagtataccatagtggtcgtagactacttcacaaaatggacagaggtcgaacctatgaagaccataattgctaagaaagcattagactttgttatcaaaaacatcgtgtgtcgatacaacttgcctcaaaaatagtctcagacaatggaaagcaatttgactgcgaagaattcacaaacttctgcaacaaacacggagtcgataaaagcttccccgtggttgcgaggccacaaagaaatggacaggaagaaggcttcaacaaaatactaaaagtcacagttaagaaaaagctgctggcctgaataattgccacgagtattatgggcctaccggacaaccccaagaaccacaaccggatactccccattctcaatggtgtacgggtgtgaagctatggtaccggtagaaaccttgttcccatcccacaaaaagtcgacatatcatccagcaacgaacaaagtcttattataagaagcgctggatcatatagacgagctccgagatgagtctcaggtgagaatggcagcttaccaaagaaaggtggctaaatactttaacgccaaggtcaaagatagaaaattcaccattggcaaactagtcttaaggcgggacttttcggccactcatgaacccgaagtgggggtacttgggccaaattgggaaggacattatga

SEQ ID NO: 226068 - DNA, 1816 bp, Cannabis indica
attgccacacctgaaactgtccaagatgactgttggtatcctgactctggggcttctcatcatctaacaccagatgctgccaacattgcttccagcagcaactacagtggacaagaacaagtgtttgtgggcaatgggactggcctaggcattgaaaatatcggtaactctacccttatctcccctttcacatctaaggctttatctttatctaaccttcttcatgttccttccattacaaaaaatcttctaagtgtttctcaatttgctaaagacaattctgttttctttgaatttcacccctctatttgctatgtcaaagaacaggattccaagaagatcttattggttaggaagcttgagaatgggttgtacaaattctcctccacacaacgatctcatctacctactagtaccagtcctactcaagaaccttctcctccttactgttttaccaatcatgtgtctagtgtagattcttaatttgctttatggcacagtaggcttggccaccctactgctagaattgtaaaacaggctttacaatcttgtaatatcacaatagataataaaactaatgctgatttctgcaatgcctgttgtcttggtaaacaccacaaaatgccctttactttttccacaattgtttatcatgctcctttacaactcttacattcagatctatggggaccagcccctactaattcttccaataactatagatactacattagttttgtggatgcttactctagatacacatggatttacctgttaagaactaaagatgaagccttacctactttcaccaaattcaaaactgaagttgagttacaattgggacacaaaatcaagactttacagtctaattggggaggtgatttcagatcattcaccaaccttcttgagaaaggtggtattgttcataggcttgcttgcccccatactcatgaacaaaatggtgtacttgagagaaagcattgacatgtagtggaaacaagttttgacactacttgttcatgcctcactagtcaccacccttaactttttgggatgaagcttttcgaactgccacttttctgttaaactgaatgcccactgctgtcattcaacacatatcaccactgcagaaactttttcactccccaccagattattccctactcaaaacctttggatgtctatgctatccaaatcttaggccatacaataaaaataagatgcaatataggtccacaccttgtgtgtttcttggttatagcatgtctcacaaaggttataagtgcatgtctaaagacaaaagaatttacatctctcgagatgtaatctttaatgaatatcaatttccctatgctgtgtctcacaaacaaactattgacaccaattttcatgtccacacacctagtttaccaccattatcctctcttctttccactcatcaccctccacctgaccctcccatgccacaacacttccactcctctgaatcctccactgcttctcccattccctctgcccctgcctctgttcctaatctcaatcaactggttgatatagcagtaaagtccactgcaaactcacctcctctcactaccacatctaataatcctgtaaccatattacctgtttctactaatatttctaatgcagattctcacaggcccacaaacaatggaacagcaacaggctcacaccccatgatcactcgtctaaaaagcaggcattagaaagcctaaagcctttcttgcatcatgtgaaccaagaacagtgaaagctgctctcaaatgcccaaatggaatggtgctatgctcaagaa

SEQ ID NO: 226069 - DNA, 2534 bp, Cannabis indica
tgaaacaacgtgtttcagatgaagaactgataagtttctatgaagaacttattaagaaaatagaggtttagaatccaagaagtcttggtggcatatgagacttaaatgaaaagagataatgcattaaacttaggaagatatggttctccacgtgtagcttaggcttaatggagcccttctatgcatatggagtgacttggccctttagagaatgatctaatgccctttatatagtttagggcttacaaaagatcctaattcaaataggtagaaatatccttttaaaataggaatattaacatctttttatctattatttaaattacacaaaaggataactaaattcctaaaatatatgactaatatcttgagagaatatccctatttttgtgggttgtttgacctatctcgcaattcgatagtctgttcggagttgtttgcacaagtttctcggccaaccctatttttagggcatggccggccgatgaccttccatgggcccgctaggtgtggtctggccagccttttccttatttttttaacttctttgtacaaatttctttgcaaaggtcagaccttcttagttgaacagccactcttggctagctagcttattctcaacgcctggccagcctacaagcttaccttggccgaccaacaagctttccttggctggcaggatatggtcagcaaaggtcttaatggccaacttaactccttttacttattcttgcttaacagttttgcttgattactttagactccttgacaattgacatgctgcattagatgacttcgccctgttattgacaagctgtattccacgtgtccatagttttgactatgtggacatgccacgtcaagtagaaaaaatttgagataacagttgcctcttgagtccctgttcgtatattatacgaatatggacttttcagcacttgtcttgactgtaggagccttatctggccaagtatcaaactgatgcactctttaaacctttgatcttttctctcccatgcatgcctcatcttcttttcttcaacagtccttttatttctttgaatctgctattgatgagtttcaagatttttaaagctttgagaaactgttttaattctcacattttagagtactcttttcacactataatttgctcgatagctttaggatgtataatgtatgacttttgatgaacaagatcgactcttggactagtatcttgtttagagaccatgtccaactcttagatcttgtttaggaactctgtttaatacttagatcctgtatgggaactctctctatgacttagatcttgcataggaactctgtccatgaattagatcctatatgggaactctgtctatgacttagatattgcataggaactctgtccatgacttagatcctgtataggaactctattaatgacttagatcatgtatacccctgcccgatactcagccccttttaaaagctttgtctggtacgtttgggttgaatcatccttgactagtcaatggcctttgattcataggctatctagttcatgattcttgactttcatactttgttgattataaaagtataagagcaagaatcatgaacgttcattcactggtggaggcatcaactggttttgggtgttatctagttgggtgtcccattgctcttgatctgtcttgacatatttttgcaaatgcgggtcatttttccttatgaggtattctatttcctacttcaagttattgcattcattagtgtctagaatgtagtctgtatttaaatgatagaacttggtggtatccctttttctcatgtctttcttcatgggaggatttttttggtatggcaccataaactgggtagttgcaaagattgtctctatatcctctgctaggatggtaaatgttgtgaacttcaaggcattcttctgaggatgtgctgttcggagttgccacttaacttgcttttctttccattaccctgtcagttttccattgtttgatcttttaccaccttgattcaagctgctatgattttgttaattatgatctagttcgacggatgtattggctgcattggtgtgttgatttttcttcaacctaattgtgtccacacgccgaactacttctccgagttttataaatttgtctgctcagtctgagaattctaccatcgaccctataagaggtctttttatgtctttccatagttctcgtagaggttcaatacctcccatgatcgcgaccaacctcctctctttgatcaactctttcgcttttgtagcttcagtcataaatcggttgatgcaagctctcaagggttcccctggtatttgttttactttgacaagatcttctaagtgagatggaagctgttgagaagaggattattgtgcatgatattctgacatgaaagaattccataaattgaacttccctggagctaatttgaagtaccactgctaggcaacctctgccaaagtagctgggaagattctacaccgtacatgacctctcatagttggtagtcca

SEQ ID NO: 226070 - DNA, 1470 bp, Cannabis indica
agcttgccatatctttgtgatacgatcccagatttatagggactgcctttatacgtcatgatgcaagttctgaaattgctaagtgttgatgtactgctcggattgtccactgctcggctaggaaggcaatatccgtgcaggtgtatcctgtgctctgttcggaacatctcttcagcaagatatggggaactaggtccacgtgtcaccagcatgtgctgccacgtcataatgcaaaaaatgggataacaattttattcctagttgtcaaatgatttaagacatccttcttgagggccccatggcacctctaagggactcgaaaacattaaccaaccatttggtgctaggactcacacattcaagtgtgcccaaactatggtccatcggcccgcgcgagcatttttaccatagagaaatcaatctaacaaggaaaccaacaaggaattgactcatttgggcatgaaaaggcttagacttgtacataaagtaagaatattataagacccccatacaatagagcctatgcgctcacttccaaatagagatggcagtgttctctagttttttggagaacactgccacaagaagatggcagtggttgccacgtataaagcactaaagggaacttgttaaaatgtgttccctcaacaccaaggagtgcaagacaagtgaaagaaaatgtttcttagcaaaacgcaagattagccgaccactgcactccttatggcacaaaatgttggagtggtcgactataaggaatggggatgaattttttgccaaaagtatattttcatcaataacatgtcaaaaccaagtgagaaaagccactaagttgtgtggaaactacttggccgatcacttccccattttgggcataaatggtggcagtggtctgccagtagaaggaatggggagtttctttggcaaaattgtatttccaaaaaccatgtatcaaatacaagtgagaaaagtcacacaaggctccttagccccttatgtggccactaccacttttttagcaaaaattatggcagtgctctcttaagaaattggccacaaattaatgtgaccaaagtggttctccagcatccatatgactgaaataagcaagaaacactacccatggcttcccataagccatggccaactactaccactttccggccctaacaggtctcccgttagggtttcgggtgtcaaaatgtggttttgggatcccaggaccactaaaatatgaatcatcatcaaaaactaagtcacgaaacacctcaagggcccgagaacatgcatggccgagagtttccattttgccatgtcaatgctcataactggaacaaaacagcacaaactccccttcagtaaaacgaggataactctatcaatttttgtccaaatgacctagttcatcttgcattggaaataatatttcaagatggatctaagtgtgtctatgttggaatatgttttacc

SEQ ID NO: 226071 - DNA, 2660 bp, Cannabis indica
gaggaattggattagggagaggactagaagatggctcaactgaagtgatagagtcagatgacacaggagtgtgttgagtatgtgattcaggcaaggatgttataggcataggagcagacaagggaatttctggctcagctgtagtagcaggataatacacaggtgtttcagtggtggattgagtttgatctgtaggaaacagatattctgcagtgtacatagtacaaggcttaggaattgttggagatggcatagtttcttcttgacaagaaggtaaattggaggacttatctgtgttgacagcaaaggaaatttggtttcatcgaaaattacatctcttgagatgtataatctccctaaggcatctagaaatttgtatcctttgtgatttaagctgtatcccacaaaggcgcaatgagaggatctaaagtctagtttgtgcattgtatgtcctaatattacgatagcaaagacacccaaaaattgttagattactatactttggttttatgtgaaacaacagctcaattggagactgttgttgtaggataggagttggtaatctattatgcagataaactgcagatctgaaatcctcatcccaaaattttagaggtaaggaggcttgagcaagaagacttaagccatgctcaacaatttgcctatgttttctctcaacaaggccattctgttcatgagtggtaggacaaggatgtctatgcacaatgcctgcctgttttaatggttcagtgaaagctctatattccccaccccagtcggtttgtaaaacctttattttctttcctagttacagctctgtttcagctttgaaattttgaaaagtttttagagcctcagatttgttttagaggagatatatccaggtgaacctagtataagtatccacaaagctcatataatatttatacccattgtaagaagtaacatgggaaggcccccaaagatcaaaaacaatgagctgcaatggctcagtataaacagttttggactgttttggaaatggcatcttatgaattttcccaagacaacaagcttgacaaactaaattggcatttttattactaacagaaatattacatgaattcagtacagagtagacaactctttcatcagggtgtcctaatcgattatgccacaaatcgaaagtagacataggggaactatgacaagatttacaattgacagtataagcaaggtgctgatcttgaggattgggagttggagaaggtgtagggatttgagatagcactggaattggtcttgatcaaaagtatataggccattgtggagtgtcctattcaagattatagctttggtccttagatccttaacatagcaaacagatgggtgaaattcaaagaaaacattcttatcttgagcagattttgaaacacttagtaaattcttggtaatttctggtatgtgcaacaaatttttaagaatcaaggttttatcagaactatgagatttaaagaaagcgctaccagtatgttgaattgccaaaccagagccatttccaacataaagcctctcttgaccagtgtagtctgcattctgcaccaagttgctcatatctgaagtacaatgattggtagcaactgaatcagggtaccattttgtgtctaagttttgagctggcatagatgtctgagcagcatgagcttgcataggtttgttgctatctggtgtggggagaacaccagtgtagctcttgtcaaacctgtagaaacactcaagagccaagtgtcctgtcttgtgacagatttgacactgtggtttgtttgatgtgtttggaaaccttcctccaaattgagtgctattatttcctttccctggattgaccatgcttgatccacctcgagagagaaaactaggattagcatttctatggaactgatagccaggaggataaaaagtatggtactggggagaattatagggaaactgacctcgaggggcattagatcccctgaaattttgattgtaatgagcaagcaaggcttcgtatgaccattgattgtccagatatgttccagcatttgtagcagccagattagcattcagatcaaattccttatttgtcttctcgattcttgattcagaggccagcaacagtgcttcgatttctgcaactgaatatccttcgatccgagtgttcgatgagatgatgaaggtgtcatattcacttggcaatcctttgaagatttcagctatgtgatctcgtgcatatagaacttcacctacagaggcaagaaggtcaacgtgttgttttactttaagtaagtaatcattcagggattgagatcctttcttaagattctggagtttggttctaaattctaaaatcttggatgatacttgtaatgtaaagtgcttttccaaagcactccagatctgtctagctgtgttgcaccccaccatgcgcgtcaacaagatttctgtcatggaggataggagccaagatactaacaactgatcttgaacctcccattccaagaactcaggattatagattcgagctaactgatctgcatcgtttaagaattgaggaggtggagcatagtcttgaatgtacctcatcagcctgttatcttggattgcagcaagaacctattctttccatagaaggaaactgtgat

SEQ ID NO: 226072 - DNA, 1876 bp, Cannabis indica
aaaaaaagaaacaaaaaaaaataaatagacaaaaatgcaaataaaaaccataaaagaataacaaaaaaaaatagtggaatgtgagaaaccaattagtaaaacaatcaaaataaaaacaaagaaataaaaatcaatttctgaaaataatcaaataaaaaaattgaaacttaaaactcaattataaacaacaataaaaaaaaaaacaagttaagaaaactagttacttaaaaaaaatcaattataagaataataaaataatatgtgtgttagaaactgataaaactggcataagtacccaaagttttaagtacccaaactctattattttcttacatagaccacatataagcttcagattctagatcattgattctagacagaaatatatagtatcagttacttccatatgttcttttaataaattcaaaacgaagtctgtactgacaaaactggaggaaaattacagttttgcaaacattgggtacttatgccactaaaaataaacattggatttatgccactaacaaacttaaaacttttggtacttatgcctctatttacccttatttaaaataaaacaaaaattattgttcaagtatcatacaataataaaactgatataacaggaataggaagcttacccacaacaagaaattattgattaagaaggtgaaaagcttggattatcgaaatggtgcaaaaaatcctagaagaatggtgctatgtgggataggccctctagatagaaggaggagcttcttcaaaagtaaatttagtgagagagcaaaaagtaaaaagtgaagaaagtttccccccaaaagcacttatataatatgtgtgggatccctccttaacttgcttcacatacacaacaaagagacatataaaatagttagtttattacagtgaataagatgagacaagcaaaccaaagtattttaaaaggctaacaatgcagcaacttctatttagcaaaggctacatcggttccaactactctaatctaactgataagtccctatctgttaacgcagattttcgtcaactaaatttgagcctcacagtagtgattccacacagaaaaagtaaaagctatcaaaataaagaatatgaacacaagattttttacgtggttttgcagctaaaattctgcatagtccacgagtcaatcttattcagatttttgagtattttttagggcctcttttgtatgagttttttcttcccttttctgatcttctttgtcactatttataattacatagtggaccaagaattacaaagttcacctaaatatgtttacaacaatcatccctaaagtcgagggatttgattacatatcacgtagtgtaaatgcagtttatgatttgaaaatcatacagctgtgattttaccgcttttactgggtcaaaactaacgtgtattaaacacgtctttaattgttgtatctggagatgtctcgatagaaacttggttataatgatcccaatagcgagctggggccattcttccttccgaggtcgacgatgtatatcttgtgtcgatcgcggttatttacaaagaattcttctgactcgccagggttgtaagcctcactctcattagctgaatgaagctataggaagtctttccatgatgagatggtcacctcgcttacttatttttttgagccgatatgacttttacacttagttttttcattgcacactaaggactttcacggttgatacgtgtcgctttctctggtacctcgctattcgcatttagcgatatatggtttctcgctaatatactaagtgccagcttgtacattgattcctcgcttaagacctcacagttagcgggttacaaatatactctgactcttatgtaatta

SEQ ID NO: 226073 - DNA, 2099 bp, Cannabis indica
gtgtaatgtacggatatgataaatcgtccacgttcgactactaatagatgtgtctagattcaatgaatatacacacattgattgccaattagtcacgagaataatgaagaaaaaactttcagattaattcaattgatttgaaaagataaaaaaatatgagtgttcattacaaatgaaaaatgttagattttttttgtttatttatttttaatttcaagttttgttcatgaaaacttgaagggctgatcaggcaaacatgaccatgtgtgaccaataattattccttcttagtttatatgaataaaagaaaactattttaggcttctaaatcaagttgacaaaagaatacgatttaagctttttgcttgcaagtcgtgcctagtttccgtgtatatatagtttcccataagcatataattaagtggtgttcatctaatctgtactattttgtttatagtgtatctgacttgcactaagtgaaaatttcaaactccactagctcaaatccaattcaatccacaaaagtgtggattgaatcggttattttaaattagttactttcaatattatgttatttaataatttatgtaaaaaaaatatttttttttaactataatttaacaacaaaatataacaaattatttttattttatatgtccaacaataaattaaaataaataaaataataaacaacaaatttaaaagaaaaaaaaatatgtattaaaaaatatttaattttgttttaaattgtatgtaaaatatatatatatttataagaatggaatatatatttgatttattaaattttaaaatatatttgtattatatgtattaaatttttaaattactattttctttacattaaaatgttaattgtatatataattttcaaacaatcttataaatatttgtggattagattagatcggttacttttacatgtcaatcaacatccaatctgcataagtgcggattttaaatttttcaatccaattcaatccgtacaagagtacggatatctgcactttgtggatcggattggattaaatcatgtggatcagattcgattggatcgactattttatgaacactcatacatataatatgaaactaagactatataaaaatactaggttgatgttacgtgtaatgcacgtatattaattttttcttaattaggtttaattaagtgatgttaagtgtaaatacatgtatgttaaatttttttaattaggtaatgcattttttcttttttaatttttaaaatagctaggctttaagattttgatctttgggaatttttttttagttattgtggtcacattggtgtgctctttagatgtaattatgtatatatattttatatatacaataaaagaatgaattttattggtatacatattttatacgtattttatattaatctctatatgtataagaattatattagaaaatattttgacaaaatttaaatttaattagagaattaattactttcaaaatatatttatatattatgtctaaacgtatataataaagtgtataaattattagaagcatatatatatcattaattatttttaaaacaaaaggtatcatgaaattaaggtttaaatatataaattttatatatagatgtaattatatatagacataatttttatttttaaatatataattaaattaaaaaaaatttatataaaatatctatataatttttatttttaaatacatataataatattataaaactaataaagaatattctctaagtaattgggatattttgttaaagttaacgcacaaaacaaataaactaagaatttcgttacatgcccacactttatatagaatagtttacacatatatataaggaatacttctcaatggttagaatttcgttacatacccacactttatattaattttaaaaatattaaaccatcaaattttaatctaatgacgaataataaaagagaaagttaaatttccatgtttagttttttacactatatctaaaatatattcatataaaaatatttaagtcaaactcaaattttactctttattttttgctaaaaatatttttatttataatt

SEQ ID NO: 226074 - DNA, 1856 bp, Cannabis indica
gaaaaaaaaaaatacaaagtaatgataattaatataccaaaaattaattaaattccataattaagtggaaatataataaagaaaatttatgtgtaacctttattattagctactatatatttacagtcttgaatatataacattatgaaaagttcttccattctaaaatattgccggcctcgaattctcatcacattgtgaccattgatttcacgtcacgcatgaaattcagtgatatcccagcggagctggagcttccttaagctcacgtccttgataatgtatgtcctgcaattcaaatgaatccaatcaatatttcaactcaataataaagatgaggttccatcaattagtgacaatttatttctatacacattaatgtgagaggggttacaaaataatactctttacgtaccgatgcaaagtgattaacatcacggtgatgagcctcatcagctcggacaacgagaacgacatctctcaatgtggcgttggccgggagctgccagtagtcgatggcgatggccggagcaggaacgttttcgatattgcctttgtcaagttccttgaggaattcggtgtaggagtggattgcttcctcctcaaggtaaccaaccactcggtgggcgaattttggggaaatcaaataccccacgaagtaagcgttgaaaaagatgccttggacagtgaatacaagggctcgttcgtaccatttgggcttagctacttccatgaatgtcattagatgcatcctctcgttctcagcttcttccagcaacgttctaatccacccaccgctgtgctcgaatcgccttagcgatttgcagtgaagcagtgctcctcccaccatgcctggtactgctgccaccgtctccagcatcatggctcgacatccatatcgtctctgttcataccatgaaataaaataaacacatcaacactatatatttaataattttcaaacttgaatatgctttttttcctatgtaataagcaaaaatcgccccaatagcattatgctacctatataataatagtataataataagtgtaaccaacaaggtggacataccaaataattcaaataaaaatatttaataaaaaagaatacctggaagaaaatatcagttggccatcttagggatttgacagtccaatacgctattttgtctaaaaaagttgttggggcgtggtgcttcttcagatcaatggacagatctgatttgtacgtgtcccatggcttcataatcaacaaaattaaaaaaaaatcaataccatacgtaccaccaaaattagcatccacaaattaaagattacaagatgacaaaaaatgaaattgaaagctaaaaaaattagtaacacaccctaaagcaggaccacttccactcggttccatcttccttggtaagccggctcggtggtacgccccaataactcacaatccccttctcgtccttattatcattacttacattggcagattccgaaacgacaccgtttttcacctgcttcaccttctcatcatgctctccattgccgacagcaaccgtactagcacccctagcggcggcgctactactgtagcctctctgaacccaataaacggcgctgctgtttttcgctgtccatgcggcggcaccagtcggcaccgacctgataaggcccttcatgacggccggctcattggccaccgcacgggcggtgcctgaggagaacaaccgagcgcttaccacggccagctgcctggtggcgccactgcgagtcaccgacatcatgatgatgataatgatgatcaagaactgtacaaatatttaattacaagaattttggagggtggtttagtttttttttttttt

SEQ ID NO: 226075 - DNA, 3497 bp, Cannabis indica
tttaatacatatcaaaattcagaaagcaaaaatttaaatcaacctataataataataataataataataataataataataataataatttgagtgtgtttgataatacaatccctatccatttatctctaaaaaaaatatgaaatttgatagaacaaatcatttttgaaccaaacttgagtccaattcaatggggttgacatgaattgtttgaggaagaagataatattttatattcagctcttccaaaacccttttaacctccataaccagctcggttcgccttcgattcttctccgcgaattcttgaaaagttatggtgtgattaacataaagagccattttcaacttgttcacattctcaatctcaatcaccaccacactatgagtaggatgccaatgtaatggggtcttttctatgtacctaaaaaaaataaccaaaacaaaaccaaaatgtgtatatagaattaaaaaaaatgacattgaaaagacattattaatattagtaagtaaaaacccacttcttgaatttttctttgagctgtgctatcttttcgactgttgtattgaaatcgatcgaaaactcgactgcatcacccatatctgaacttctgtagtagttgctgatgggttttgtggacaagaccgagtttggatagtaaaccttttcattgttcagtttcaagaacacagttgttaagatgttcatctcctcaaccagcaactgtcaaagttagttaaaaacaattaattaagatgataagaataagaatgaatatacatatgattcaaataaataaatagtctaatcccatatgtgttttgttctagattgctcatgtgtcggtgatttgtaagatttatattacacttatagcaacaaaactataaccccattattaagtttcggtaattagataaatgctatgtgtgatcaagaccgagctagggcagcacctaggactcacttattttaagggcccaaataaaaaaataccttttaaaagatacacatttttttaataatttttaaaaaaatcataagggcctaaaatttttttttacgttggcccatttcaactcagggccgaccctatgtgtgattaaaatttatcaacaaaattagaaagtcattctaccgaaatagtagaaaaatcgttccattgaaatgaaactcaaatgttttaaattaaaaccaaacaaataagcataatgaaaatgaatccatttcttacttttgtttggttagaatctaaagcattgaaacaacatagcaaaagaacagattttttttagcaaatataagaacttaagtttcgacagaaatgaacattaccgcaacgccatcaacgacacagcgatccccgacatcaaaaggatgcattatgaagacaaacacaatggcttcaaatatggtcttgcaggtgttaccaaacacaaaagctgccactacaagctgtgatgagagaaagactagtactttcgtggtagcgatttccatcagtagaagccatattacaatcgtcactacaacgagaatagctgtcacgagtttgttcagttgactaactgctgttttagtgtcacttagagcatgtcctaatgcttttctcccattgtagaccttcacctgcaacaccgaaaaaaacaatgaacaatgagcctagttttcttttcaatacaagttttgatttgatagctcggatatacttgagaaaacatcctaaaacacttgctatgtaagtgctcaagagggactcgaatcgctgataatttaagctataccctacttgagtttcgaatcaatgtcttaatatgagcagattgcatgtttgatcatttgagttgtatttgaatgaaatgcaaagcttaccacccaatcagtgagagcttttcgatcaactcgaccattctctgtcccaatcagaggaagaacaaggtccacttcttccttaatcatgaatctcatgagatcatcctcatcaatatacctatatgccattacaaaacccaagttaaacacaaaaacaaaacacaaagtgaaaaaggtaatactgaaaagctagattactatgtcctcacttgcagccaggctgagcaacatttctgaaaatatgataagcagcagcagtagcctccatctcactagtaatctccttattctgttctttagcaacaatttccatctcatccaactgattagaaatcgtcgaaagcccagaactcgaaacagcatcaatcaaaaccttcatagtccaagctgaaaccttttcttgtttcatcttatgaagctgagctatatcaataacttgagtcttctctttcttctttccttttttagtacttgtaaaactcaattgccccatgcttggtgatctcccaaccctctcagcctcctcaatgagtggaggcccagaaagggtttgcaacacatactgatgaaaaattgattcttgaattctatcaaagaatgtgttgacatgaaaacttgaagccaagattttcaacaacaaagtctttaacaaccataaaaatgccccaatgagaaaagttacaagagtccaagttatgtactctagaattttggtagctgttttagaccttggaacaccatgattaaagacaagtacccaagtaagaagaataatacctaaccaaataaagacttgaacactcttctttaacccatgaacaaagtaaagaactttctttctaagcaaaaagtttctctcaataaagaaaactattatatgcataaaccaattagtcattaacaaaccacaaaagataaccataattaaaacaaaccatctccataactccaaaccccaaatgatagtcttctctaatttcttaacactcaaactagaaaccaaacaactaactaagatcacaaacaaaacccactcaacaataaccttcattttcaacttcttcttcttctcttattcaacttaacctttttataaatctcctcaaaatcatcacgaccaggtgaagcattagatttctgagccattgaaatggttctagccactgatatgttattaggagaagccatattgaatgagtttctatatggagatccaagtgttgaagcatgttcttcaaccatagctgtatcaataggtgcagaggtctctccaaatctagatttgggtctagaaaagactgacctgttaagggttttcctccgagtaagattctcatgttgtggagctggtgatcttggaggcttattggggcttggactaaaccttgaaatctctggtgaatccataaaagcagctttctttggtgattctaacacttttgaaggagacccttttgcctctttagcttcaacacttcgaatatcaactacaaatgattcagtaccattgttgtctggttccaaagatgaagctttttccttcacttccattaaaaccctataaaagtaagaaaaaaactttagctttttagtaaagttaaaatagaaactgaaatgcccagaa

SEQ ID NO: 226076 - DNA, 1261 bp, Cannabis indica
tacatataaaaaatttgatgtatatatttgagtgagggctttagcccacacatgggctaaagtccctccgtccctgagtgtaataatgctctaatcttttgagattcattctaactgtccaaatttcacattctcttctttatcctttaaatcatatcaaatcccaactcattatctaaacatattaatttctcttcttttagagtcattctgtttgattgccaattagtaattagtttcgagttaaatatttttgcttaatgtatagtcattgacaaaagaataccaaggacaaaatacatgacggtcaataaggtggagtaactaatacaacattattaattgtaattctcaataaaaattacgtatcaaaaaattagagaacataagagtgattatgtagcttatgtgttgtttttggaattattttaaaaaaaacataaaaacaacattttttttaaaaaaatacggttgtacggattttaaacatttgtaccgttttcaaaattttatttacataaaatacaattttttaatatatttttatgttgcactcgttattttgttaatgatttttttattatttgtacattattttttgatgttatttaaatattatttttctattagtagtttatgtaaaaaaaaacttctcaatctaattttaatttaattatgaaaaatgaaaacagagattttttttgggacaaaaaatagagactttttgaaataaaggcataatcaactataaataaggcaataaaataagataaaaatggtatatatttaaacatactcgatcggtttcccttttaaaattaataattataattaggtggaattaatctttaataaaaaaaaattattttaatacgagtatttcggtacattatatatttattatatatataaaaaaggaaaaataggtatagtaatctagggtttcttttatatcatttaaaatatcatctatacatctttctcttctccaatattttgtatctctaatcgattaaaatttaaacagagaatcaaatcaaaaattagaatatggtacgaacttattatgctatgaagggttataagatgaagaaatctcatgatgatgagaaagaagaagaagaagaagaagaagaagttgactatgatggaattccaattagtaatcctcatcatcaattacaaacaataacaaccctcaaatcatcacaacctggtgttatatttgttcttgaaaaagcttctttggaagttgccaaag

SEQ ID NO: 226077 - DNA, 2442 bp, Cannabis indica
ataaaaataaaaaataaaaaataaccgagttgcgggcgagttcgggtccaacccgaaacctgatgacaataaaaaatcaacatgcgaacccgcctaaaagtttactgggttggacccgacctgcctgaagagaatgagtttttctaattttacgggttgaccgagtcgggtctgggtgggttggctgggtccgagtctaacccggtcaaactgtgcagtcctagtttgtgtaggatcatttatatgtgccaattgtattgtatttaatatatttaaaaaaagaagataatggtctcagtttctataactgtaatttgcaaagttgtcattcttaaacttgtgcttcttcttccaattgagaccatgcaagagaatcaacaattgtaatgtgataatctcaaactcattctctcgtggtaaaacacaaagtcacaagtcaaatattgaccctaaactcaattgtgaaaataaaaactaatagtatctttatcttctagtatgtatgtacttctaattaatattaaaattcaatatatatactgttggttagttatctttaattttataggtttttgacatttaattaataaaaaatagtgataagtgaagtataggttttgtttcgtcttccctaaaatgggcttgtcttgataaattgtagaaatggcagttgctactactatcttcttctcttctcttgttggcattgcctatgattttcttatctatcatccatggcttcattctatgctctctctctctctcaagtgctacccttagtctctttcttactctcaaaaaagtaaaaaaaaatagtgttgctaggcgttaacaccaagttattttcatttgctcatagcttagtttcttatatagtaacaccctaatttataagaacgccacgtgtgtgattttataagctagtttaatattaatagattaattaattaataaaaaccgtgaatatattaaaaacttgaccaaaaataatactaaaaatgaaaatcataacgacagtaaaaaagtatttccagggatccatgttataaaaagtttacaaaagactatatatgataataatgcaaaacacaaaatcaaaatacacagcagatacaaccaatccaaaataactcctgacactcaggctgatgaggttaatatgtacattgctggagaagaccatcatctcacgaatgctctaacttttccttgtccttacctgcaccatagagcacccgtgagtcacatacactaagcaagaaaagtgataagaaaggatacattcaataactaatcatatatttcattatcatataataattacaccataatattcagcagtaggtaatataaccatttatatacacaaaaatagacatgctcatatatttgtattgtctaattagacaagcccgtgtcataatgcaatatcatatatatttgtaaacgggatcccggaatcttataagtataatatgttatgttttaactaaaaagccaaattttaattattcacgtttttctaataacctcgttgattagcaacgagctgcacagtacgttaaaaatcacgctaacacgtctatgctagttagggtgttacaaacacacctaatctagtagggtgttacactaccctcaattaaagaaagaaaaaccaaggaaagaggcaataactactctacctcgagtgtttgcaattactcaggttgacgctactgctagtccatcggtggtgacaggtcaaattctcatcattaactccttttattctgtattatttgactttggagctacacactcgcacgaggtggctaaactaagttaaatgagctttactcccatctttcggttccatggctgccctttaggcagttaatccttaaggtgtttttgccatgatcctttgtaggggaccattggccctattccttttcatggtggttgcttgtcacatgtgggtagtgttagcctcatgagttttctcgacctcttgtgtgagctatcaatttgtttgagagagcttttcgacacttgggctttctgaacctctttctggtgtaaccttatcgtggatataggggagcttgtggcccttaggcggcgctcaacttttcttaagatttaacattttattgagggagcttgtggcccttaggcggtgcttgaccacttacgttgcattattcgtgtcacttaaagtgcgttttaaatgttaaatgatcagtactccttggatataagagagcttgtggcccttaggtgacactcaacctttcttaagatttagaattttattgagggagcttgtgcctcttaggcggtgcttgacctcttatattgcatttgtggcacttaaaatgcattctgaatgttagaagatcgatactccttttagagaggcctccctcctagagtcgtatttgattcctctctctctct

SEQ ID NO: 226078 - DNA, 2575 bp, Cannabis indica
taaactctttactttacaagtttaattatttgttataatatattgctttccatattacttttatttatttgattaagtgtttaattgcttaattttgtgttaaaagttttaatttaccaaaattagtttaaatttccaattcaccccctcttggaaacatatcttgggcttgcacagtctactacattagcaaaagactcgttgaagctgaaggttaatatcctttaatagaaaagctcacttactgcgtaattttagcaataatgaagttaatgccctatttccaagctcaccttattcgggtatacaccgaccaaccattgcgccaagtattacgtaggcctgatgtctcttggacataaagttgtggcagtacgaaataatcttccgaccctgtacagcagttaaaggacaggccttggtagaatttgtagttgagtacgtaggcaaagaagaatgcaacataagggacaactcggaaccagtagaagagtccctactagaaaagaatgaagataggccttctcagaaattgcatgtagatggatcagctacagaccaactttctggtgcaggatttgccctcgtcacacctaagggtaacacctgcatggagcgatcaaatttgggttcaaggcctccaacaacaaaggagagtatgaagcactcatagctagactaaaacttgctcgggaggtacatgttgagtatattgaggtttttagtgatttgtaattggtagtgaatgtatcaagagagtacatgagccagggagaaaaaatgatggcctatataagcaagatacaagacctactcgcataatttaagggttacactctcaggcagattccaagagaggagaatgtaactggtgattccctagcacggcttgtgagcagcacagtaatagataaggccaactttttcctgatccaattcttagaagaacccagcatcaattgtgcgaaagaagttgaaatgatagacacaccaccaaactggatgacacccatagcagcttaccttaacgctggagaacttccaaatgacaagaacgaagctcagaagatgatgagaaaagcgacacggtttatcatagttgaaggtgcaatgtatagaagaggtttctccataccattacttagatgtgtaacaaaagaagaagctgcacggctcctatctgaggtacatgatggactttgtggtgaccacgcagcgggaaaatgtctatcgaagaaaatactaaggtaaggatatttctggccgacaatgatggaagattcaaaggcttacgtgaagaaatgtgacaaatgccagagatttttgaagattccccatgcaccgcctaatgagctaatacagatgcaaagtctttggcctttttccatacggggaatagatttgatcggataattacccaagggcatgggccgagtacaatatgcagtggtcgcagtggattattttacaaaattgacagaggtcgcgcctttagcaatgataacatctaaaaaagtgttgaactttgtcgtgaaaaacataatatgtcggttcagaattttgcacaagattatctcggacaatagcaaacagtttgataaccagatgtttacaaatttttgtgtgacacatggaatcataaaaagtttctctatagtttcacaccctcaaacaaatggtcaggtcatcgcagtcaacaacactgaaagacaccatgcaaaaatggcttgaagaggctaaagggaactggtcggaggaactactagaagtattgtggtcataccaaataatagagaaaacaccaactgtgcaaacaccatttgctatggcctatggttatgaagccataccccctggcagaatcatttgacgagattgaagaaaaacgaacctcaataaacctaaagctagtggctcatcagcaaaaggtggctcgttacttcaacaagcaagtgagggcgagaaaattctttgtgggagatatggtccatagaagagtattcttgagcacaaaagatagcgtagctggcgtgctcggacctaactaggaaggaccattccaggtgattgaagtcacaaactcttgagcatacaagctgggatggtatgacgataatatggagctcgttctagtaccaagatgttaaaatggggaacatctgaggaaatattaccggtaagtgtacaaggtctgatgaccatctcaagtacacaatgctagaacatttactcttaagtcgatggccttctgggtggatcccgctcaaggatttggataaaataactagtactcaggtcggatgaccatctttaaagtacagcttaaaaatatatatatgcaattgttttatgtttcaatcaactaaagataagttagatcatataatagctttcataatttaataaatataagttactgcggtaaaaaaattatttcgacaaataaatgaatgaagatattaattatcattttaattgtttcaattgtttttttaatagcatgttataaatttaccattaaaatgtttaagggtttgctcgaacccaaaagccaaacagacaaaaattgaacttg

SEQ ID NO: 226079 - DNA, 3224 bp, Cannabis indica
tcccgaatacaggccacgaaagagatgtccacgagctagtgactctcttccttctagaacacgggaccctttgctcccgcgaagaatatggaccttccaccaagatgcaccagtttggggtacgcttttgacccgcgaaagctcagcccacgtgtgtcaggctacagacccaatggtgcagctgttatgtgtacgatgtaagtggttgtctcccacgccacgctaccacgcagagcacacgtgtccttgtgtactgtgccaaacaatccaacgattaggaataagggtaattcaaataagaacgaccttggaatgacacgcgcccaaagcaccaccagtacaaccagtacaatctgacatcggtaaagaccacatgaaaaaatatgccacctactaatctaacggtgggggttcatccctatgaagatccatccaaggtggccaatacgaagggatcggcctataaatatccccgaagacacacaagacaagggacttcctttttcctccttcgactcttcacatggaatttgaagactaattctttgtaaaacacattactatagctccattattaactccagaatattcctactgagcttcctcttcttcaagaggaacacggtaaggaggagtaacaatccattatttttgtatttgtataaacaatcaccgaccaaagagcctaataaaatagacttgtggactaaggataattaacgcctaaaccacgtaagaatcacttgtttatttttactttattcataccttcagtactttcttaagctctaaatatattcagttgccgaaaaacttggtaaatagccaccaaatctctccttggcgccaaggaggtcttggtgccaagaaggcttgaatccccttctcttcctttattttccaatgcaataaaataacaaaatgcaagtctcatgtcatgaaggggatggactaggtaccaaacagtaatgaaacaaggagcactaaaaggatcaataaatatccttatgagtgtgctgtgtacccagctgacctctgcacccaacaagtactagtgacgaagttgtacacaagaaccaactgctgggaccatcaggtatcccgacaactacacctttgcaaccacaactctgacatatgagggttaggaggtgtatcatgtactgaccatccctagggaccatgagaatcaatttgtaacataagttcagtagagtctcattatagatatccttctcttccattgaagtgggggttggaaaatcggtataatacgaagacttcttttgttgcattgttgttctaatcttagagctttttaagttatattactctttaatttgatatcttaattttgattttctaacctttattcaatttacgagaattagccgttaaaaaataatatttaaatattcttaaaataattaagttaacactagtaaccgattatctaagagaaacccatacaaatattaaaacaaaactcatattttggtgtggcattatttttatttatttatttgtataaatttccctattagaatattaggattaggaggttagattaaggttgttaagtggttattttggctgttttagttataactacttcttgattagttatgctgaccattttacctttcttgttgagtatttaactttgttgtatcattttccatttgtaatgaaataattcaatattcaataaacagagcatttcttctctttttctctgcaaaccgattcaggttgcttgttcctcatatggtaccagacgataaccttgctcaagcttcaatggcaaggccctccactcgctcgcaagacagtcttctgccgcccacagcagagcagactacatcagaatccaatctcgattccacttccgcactaatcatcaacccttccatggcttcccgtcgagctcaaccttccagatcctgtcctctccaggaagaagacaccatcgaaccagacttgtcctcccctgttcaacccgctcctccacctgccgttcctcctcgcagaccctctctcgatcgattagctcatgaagatgtttcaagcccctttttcctcagcacgacagatcacccagggcttgttctcgtctccactgtgctcaacggtgcaaattactaatcttggaagaaaggcataaccatggcgttgacatccaagaacaaatcaactttcatcgatggaatccttcctcggccggtttctggtaatcccttacttaattcttggaatagatgtaataacatggtaatgtcttggttgataaactttgtgtctcctgagattgcacagagcattatgtacttcgatcttgccacggatatgtggcatgatcttcaagaaagattcaatgagggtaatggctctagaatctttcagcggcaaacacaactcacccgtttgcagtaaggtgatcaatccgtcaccacatatttcacaaagctcaagtctatatgggatgagcttaaggaattttaacccaacaccacttgttcttgcggtgcaatgaaattgttccttgattattacaatcaaaatcaagttttacaatttctaacgggcctcaatgagtcttactcttcggttcgggctcaaattcttctctatgaaccaattcccaatctctctcgggtttttgccatgattgttcaagaagagagacaaagaacccttggttcctcatcatcagattcgtcctccatggctgcatcagctcgcccttcatcatctaccaatcccagccgttcaaagaaaccaagaccttcttgcacaaattgtggaaaactggggcactatgttgacaagtgctatttccttcatggtttccctccgggatatggagataaaaagaagtctgagaaaggaaagattgctgcaaataatgttactatgaacacatccgaaaacagcaacaccaccattgatctttccactcaatgtcaacaactcatatctcttcttagccaacaattaagccaaggacaaacccacgaggaccctactactgctgctgccgcttctaacatggctggtaaaaagtctttttttcatactcactcttggataattgatagtggagcaactcaccatatgtgttttacaaaatcttattttctatcttttttctaacaaagattttccaccacatgtgaccctccctaatgccaatcgaatatgtgctcaaggaattggtacagttc

SEQ ID NO: 226080 - DNA, 2335 bp, Cannabis indica
tatgatcaagtgagtgaatgggagatttgagcctttgaggccattttgcagttactaaccaaagctggaaaaagttgctggtggctaagctgaacgtacgactacacttcttgctcactgtgtagcagttttttttttttgaactattaagtaattttccaagtaactcccacattttaaccctttataattaatttcatataaaacacacaacttaagtttttgtacaaaacaagaaggttggtggaactggaatttgaaaattaaatgataattcaaactctataatggagatcagttagagaccaaatacttacatatttaacaagagatttttttatccataagcacttgactaaaataattcatatatgcttgataattctacagattttttttttcataaatttgagtctcttactttatgttaaaaaagtaaaaaaaaaaaaatagaaaataataaataataaattcttatatttagcatggaaagacaaattgtatagaaatatttgattcaataaaatttttcatatgaaaattgatttttttttcatatattttcctcactaaaatttaatttttaaatatagccttagattttgttaagttgtagaaaatgaaatgaaatagaaaaattaattttatttcttaacggtaaattttattcttttgtttgattatattttaaaatattaaattatattttattattctactagaatgtttgtttcatctataagtagagagtgttattttaatataagtattattttttgaataattagcgacgaaaaattatacattaaacaaacataattactcatttctatatattttcttagaagattattaaaagaaaaaacaggaaaatttaaaattaacacgaaaaaataaaataaaattaaaggatgtaaactaaacaaccaaataaataaaagtaaacaaaactataattatttaataacagagacttaattttgttaacaaataaaatttgaaaactaatttatcagaaaataaatttagtgaaatgtattagatgaggggaaaagataaaataatagggttagtatcatttttaattaatttattttatgtttgttttttttttttggaaaaaggaatttattttacgttttattatttaaattgtacctagctatttttattatattacaaaattagatttcaattgatttgtaaattttatgttgtgtactaataaaaaattaacacgtgtgtgctagctatgcggtttacattgagttaatagtagaggtgaactcatatagaagtaaataaaaattatataaacaaataataatataagttttggtaataccttaattaacataagatataataataatatagttattttacacctatagttaaatttttttattcaacctctactaataaaattgcatttaatactttaattattgaacaatctttgtagtgttaatttttttacttgaaactatatttaatattataaaaatataagtttgtatcaatttctaacatgttatgtaaaaaaagttacatcccctcacttacaaaaaaaagtatgtccctttcaatttaaattttgcgtctaccactagttaatggtatgagactaaagtatgtccaatggagtgctaaaataatggtgtagtgctatatttttgtactttacaaaaaattaactctctaatagtgtgttaaatcttgtgataaatttgacgcttactaaaagttatactaatataacataagatataatactatgtcaaatttagtacataataaatacagatttttaattaaagttttatcattaatgataaattttaataacaaaaaatttattacaatattatcattaaatttaaaccatggcatttgttaattttttgtactaattttagcacaatattcaaactttacatttgagatggtctaacagtgtaacaaaatattgacataaggatctcctgccaaacatacaaaaaaaaatatctttatatattaaaagtgtctatctaacggcattttaacagaatatacttaaaaataaaagaatattctgttaaatttaacggtttgatctcccgttaacaaacaattttttaaatattaataatctatttttaaattaaaaaaatcatcttagccacatatctctctaacaaacctatataggcagaatattaataatttttttatttattttttaaaaaaatctttatttttttgattccgatgcataatgtgatgttattctttttaattactttattaatttcttttctattctaatgtgaataaatttttagcaatcgag

SEQ ID NO: 226081 - DNA, 2420 bp, Cannabis indica
ttcttttctgtgatagtacaagtgcaatcaacatgtccaaaaaccctgtacagcattcacggaccaaacacatagacatacgataccatttcattagacaactagttgagtcaaaacttttaacgatttctcatgtacccactgacgctcaactagctgatctgttcactaaggctctagatgcacgctcatttacacatcttcgaaaatgcattggtgtgtgcaccatttgattttctgtacatcagtccctctcgtaatctatgtatgtgatgtaagttttcctttaattgctcaatctctctcttgatctgaattgaaagatgtcccagttagaaaggctaccctccctagatgcaatgggaagagcttcctttgtaccactgaatgttttgaggagtttgctcctcctcactatattctttgagaaacactcataaggagacggctacatctctagggaggagtgtcagccatgactggttatccgaataacatcaatgtgtcctaaataaagtccttatcttcaacaattcttcatatttgtcatcattgacagcagtattccttgagcaaattgagagagtgagctgtccaactaatccttggggggctcacatgaggacactagcacacacatatgacatcttttgagttcagatcaacagaatgaattgttttttaaagtaatccttacatttcatcttctaacaattgagggactggtgtgttgttcaaagttgtgtattgagtttgcatctctaggtttttttttttcttgtcttcttagttgagcgtatgtggcatacatttgttttctttatgagttttgtctcaattagaagtttaattctctttctctattgtatgttgtggattgggttgtttgctgtataatttctttttgttccatgtgtgggccttgtatgaattcagaaacagtttaaggaaggggtgggccattttgttgtgggccttggtgggctatgtcctcttttgttcaactgggcccagcagctactcattataagggtgcctatcattttctcactcatcacagcaccttcctgcttcatcttctcgaagcttgctatctcgggaggtgtgcagacagactgttcatgaaggagcgtctgcatctccattaacgagtgggttctcactgtccgtccaccctgtcaggtatgtcttcgaaccctaaacgtttcacgcgttcttctctgtcttctccgactctgtcaccagttccacccatgtcgactgaacctcctaggtcaacgtcccctgtatcatcctctgagtcttcccctccctgtcctaagcccttaggtccattgtcccgtaaacgaaaaactgttcagggggctaaagagtctgaatccaaaaaaggtaagggtattgtctctgagtctgaaccctttactgggttgcccttctactcccatgacaaacttcttcggtttcaagaaaatgtttgttctcgtcctctgtggccagagtatagggttaagttgaagcattttgctagggtcagtcagattgttcagtctagaaaatgggaacgcacagtcactcaccttcagtcgcccaatgtgaaccttgtccgtgagttttatgctaatctagatgaaagtattatcaatgaaaaaagtcctcacaaatatcaagcatatattcgtgggtcttggtttaggtgtgctccgtctaccattagcctcattctaaaaatccctatgctagctcacccctcttacactgatgagtataagccattgttcaaagatgttggtgctgaacttactcgtcaacctgagtttgtgtggaatggtaaggaatttcatgtcactatcctctcagaattttatcgagttcttcataaaattgctttatccaattggtgggctaattcgcatacatctaccatcaactataacactgctcgctttttatatgctcttggtactggtgtatcaattgatttaccatctctgatctacacccgcatattggattctgctaaggctaaacgggttaagcacacacttccgtatcctagtttgattcagaggttggtcttgaggggtaatccaactatccttgagcaggatgtcattgtgcctgtgccctccattggcaaaacatttcaaccagtgtttggtaagcccattcctccatctgtgattgcctttaccaattctgaccctgctgtccctgctgcaccagaacttcctcaagtgagctcttcgcccacttctcgctttccctctgctcattggcaagtcaaactgctcactgaggttcgcaacttggctcatacttatgctctcgatcaacagcgtcagaaaaggtttgagcaaggggttgttactgtcctcacagccatgtccgaagttctcagatccatggactctggccccatc

SEQ ID NO: 226082 - DNA, 3247 bp, Cannabis indica
cgggtcgggttttcgggttttgagtttttgagttcggattttcgggcttcggggtcttggaaatgcacaaccaaacccaatttttaggtgttcgggtgcatcagatatcgggtcgggcttttcaggttgggcgtagtcgggttcgggtcctattttatgggttgaaataaaatttatttttaaaaatgtcatttttttttggatttttaacattatttggacctgttcaaagcaagtgatcatttgagatcttcatcaatcacttctttgtaccaacttgaattattattattaatattattattattattattattattattattattattattattattatttaatgctttatatatagtggtgttggtaataaatatatatattttaataaaaatgtgaaaacggaaaacagaaatatgagttatggattatattgtacgaaaatggaaaacatacctcaccggagaagagaaccagtcgccatcgccgactagtggttggacacgggacgccgaagtgagtcgagaagataacaagtcgccgtcgccgatcttggagaagaagaacctttgggtgtgtgtgggtgacgactcgagtcgactggtgtgggtgagtcggtgacaacgagtcgactagtttacagattcacagaatattgactattgagatttgacaatacgaataggtagggaggcttagcttttgtttgaaattgaatgtaatagtattactatttactatagatacagaattgaagtgaagaattagaatacgaataggcttgcgtaatgatgtgatattaaattagtaattaagtatattaagtagtaattttttaataaaacaaattatagtttcgggttacgggttataacctgaccagtaaaaaaaccattaaccttactcgaacccgaaacccgtttgtagtcttttttgggttgaaccagacccgattaaatgggtttttaggtgatcaatttttttttggcaatgggtcggggcgggtggttgggtttttcgagtttgcgggtctaaatgtgcagccctattgtctgccctgttcgtcctctacgccattcaaggatggggtgtgccgtctccacaccaggtcaactgactttttaatttgaagtctacccttaagtagagaagatcggggtacttctacttctcacagccggactacaagtggctgacgggcaccgtggacacggaggttagcaagattaggggttttgttgacgagtactacttcgtggaaggcatggataccacctatactcggtttcaagagatccctgtatactgccgtccaccctttacattgacacttagggacagggctgaggagattctccagttgccggatgctgctcggattcggaatatcactttgttgaccttggaggaaaactttgtgaagtataaactttattcggcagactttataccccaacctgtgaaggggaggaagaagaagtatagggctggccgggctgagggagctgagcaagagaagtagctcattcaacttaagcgtgagactaagttgaagggtgatgctggagccaagcattatgctcaggaatatactgagcaggagaaggaggctccagaatattcagagcaggagaggccgctccagaagaagaaaaccctttcgattgagcagaggcctattgaacatactattcggatcagggagcctggtttacctgctcgtccatcaaccccctattgagggaaaggaaaaagctgtcctggaggagcaggaagactttttggaggatgacgccccatccgtgtttgttcgggcagatgctcctgccagtgtgcagagtatttcatcttgcgcttatttttcttaatttttatgccttcatatattttatgctttcttctgactgtattgttttttccgtgcagaaatgtctccgaagatgatcgaggccctgaagaaaagagtagggggaagctcgggcttgtcccctccagccaagaagtctaagggcagtgagactccgaacaaagagaaagcactagctgaagagatcattgatatttttgaggagcaacctactgtggaccctcttgccttaaaagtcaccaagtttaaaagttcctgaggagggagttcggatggacctgagcaggctaaggctggatccgagctggtaagaagcaaatctgaacaagttaaggctcctgccccacctttggaattgtgcatggagacgaagagaggcagagacatgctcaaccactatgtgagccggttgatcccagaggtgaacaaacagttggctggggcggataacttgtctttggtgctggtcttagaaggagtcttgaaggagcttttgcgggtaagtcctttctaacatttttcttttattcctctttgactatttcagattttaatgccttttttttgcacagactgctttgaagatggcctacgcctattcccgagctaattcggctgctgtcaagaatcttgccacttcaaacacactgcaaagggatgcaaacttggccaaaaaggaggataaagatgcacagactcagcttaagactatgtgggcgaaacttggagaagtcaacaagaaactccttgttgctaagaccaaagttgccgagctgaccagggaattgcaggagatgtcgtcgactgagcagctcgagccagattatgcttctttgtctcaggacgttgccagtcttcaagacgaaagagagggtctccagactcttctccgcaggttggaggatgagaagaagactaaggaggaggaacttgaggctgagattaaaagccagaagttcgaggtggtgaggcttggggaaaaggtgaattccttagagacagctggtctcgagattttttatgaatttcggaaggccaatcctaaggcaaactttgaatatctcggcacttccaaagacatgtttctcgactactgcactgctcaggcagcctacgggaatcctgaggcgaccacttccacctctcctaccgaccagagtgttgaggctccttctgcccagaatgatgatcctccgacccattcagacccagttgactcgtacaaagagcatgagactcctgttgtttcattgctttctttttactatcttttttatgtctgtccagccaataggccgtcttttgacaaggtgactggttaagcggtctttaaactttgaatatattttttatttttttgaacaactggctgaccgg

SEQ ID NO: 226083 - DNA, 2968 bp, Cannabis indica
ggaatcgttctcttgtctccaaagtgtttggttccgatatgggcaacaaaatttgcaacatcacaagactacctacgaatgggcctgatactcttgtctggaaacccactaaagacgacagcttctctgtgaaagaagcttacagagcactcaatccgaaccaaggtaatgactacaacccgaaattttggaatttaatttggaacaaagacatccacactcgccattctatcatgatctggagggccctaacagggtgtctcccaaccaaagacaaattgccttttgttattgataaaatgtgccctttgtgtgattcggctcttgaagagtctactcatttattttgggactgtccttttgctagtgccttgtggtttggaggccctttccctatgaaccttgccaacttcatagactcttctctggctgatagagtggctgcggctgctcttgttatccccgcagagctcttggtccaattctttatctttctgggatgccttttagagcgtttggaaattaagaaatgaagctattttcaaaggtcaagttatcaaattgagattactagaaaaattttgctctctagatttgaggaatcaatccttatgagtaatctagatgagtatcatgcccccgtaactcactcggctcctcatagaaactcctcagcatgcctaaatacttctctcatctgtatggtggacgcctcctggaaagaagggactgcaggcttagcggttgttcttctcgatcggttgaatgactcttggaagtggtatgccaaaagtataaaatctgcctcagctgtagaagcagaattacaggccatctcgtgggccatgaagcttggtaaggagatggggcaagactcagtgactatactggctgatgctcagatgctagtgaacgccttagatcacagacgctgccctccgctatgggatattcgtgctttggctctctcggttctcaatgattgtaatagttttagtttttgtcatttctgctatatccctagattaaacaatgctactgctgactttattgccaagaaggctagaacagatattagatgttcaaatggccattgtattagggaggggtcccctgttgtgattcccaattttctctttcaatgaactctcttgtgttcttaccaaaaaaaaaaaattaaaaaatgttgtgactaattaaaaatcacaattcctatattgtgactaaatgtattagtcacaaaaattacaattttttgtgactaaatatgtttttaattataatacttgttatgactgaaactaaattaatgacaacttgtatcaaaatactatgatttagtcacaagtaattttttttgtaagtaaaaaaattacatttagtcacaaaaaatttatcttgtaactaaaaagttgttactaaatgtaaattttttttatagtgtatagatatttattgtcacagatatttattgttaccttttcatgagaaaattctctcaagactcatgtttgacattcgcattatgaaaagttaacagtctttttcagaaattagtttgaatcatgtaaatttttattgattcaattattttttagatttatcctatttctttttaatgtttctttgattatgttcttgagacttgagagtgttacattgaacactataggcccctttaagcagggtaaatcaattcttgtcctattttggaagtaccacctatttttataacactattctagaaccaacatttctaatttcaaatgtctaagaatttgtttgccccaatttgttaaggttgagactcacatgcaataacaattataaccacactgaaatccaatatcaaatatgtggaaaatggtcattactaaaatccaaatggcaataagaaacctgatcaacaactaattggaaatttgctttagttgtctctagatgtctcaaacatgtttctttcatactcactaattagccaaagaggcttatcttcaagaagaattttcagttttattattttacttaatggtggttagctcttgcctcaagccattcatatttattaaaagtggtaggacattatgttatctttatatagatagagttagaccatttacatgtgaaatattattcttgatactaagatagacacacaaaaccatgtgaactctctcaactcaagttagtgtgtccctctttttcaacaaatcacaatgattatctcaaataacctttcaattataactatatatatcaaaacaatcaaagctgagaagagaagctaaagaaggggtttggtgttcctatttcctactgttggaacagtcttcattccaaaattttaccaaaactactctgtttgaaattgaaaagtgtgtcattactaattataatgttgtttggttgctaagtctcaatgagaaaagactatttatgaagcttgattttcagacatccttaattcaaggtgaacaactgtccaacacactcaagaaaagaggtcagactgtaatttattctcatcatgttggagtcaaactggatacttatggaagcagtttctttctctgaatatatttatataatcacagttttatatgccacacaaaattatgagctaataaggttagatgagaatactacctagttcatgtaattcatgtcaagtcaaccacagtgttgattttcgagtacttgaaatctgatttatattctaattagtatgtcaaaaaaatactttactaatatcatgatgattaatttccttaaattttgattaagaattttattattatattattttatacatctgggttttccctttctaataaatagcttcaataatatttatatgaaaattattttaagaaaatgttaaaatatttatttcatatgtttataatctgctcaattctaaacttatagtacccccaaagaaaaagctcaaaaattttcatagtcctaa

SEQ ID NO: 226084 - DNA, 1809 bp, Cannabis indica
aattatatttgttctaatattataaagaaaggtaaaaaaaataattaaatttataataaattaacaagataaaactaaattaaaaaaattataaatgaccatacaaacttgaaaagaaaataatgtaataaacaactacataagtcatataggatacatattactttgttaaaacaaatatactacatggaccctctagtaagcctctgcaaaaaaatcaaagaaactaatatccaatatagataaaaaagcaatcttacgggaaaaaaaaaaaaaaagaacacttactaccttaaaacaaattaataattaactataaaaaattatataataaaataataataaaaaaaaacgtaggagcacaaatgcttctagaacaactttcaaacatgaaagcttacataacacaataacaaactttctttcattgtgattactcaattaaagtactccatcttctgcaatttcttctaaaaattggtcagcccattccacacgaatttcatcaatttcttgttttgaataagtttttttcccattgcacatatagtagtatttgtaataggataaaaaaaaattttattatagtgtatatttttgaatgtgcaacatttcagcagtgcttgcaagataataaagactggcttcattagaatgctggaagtaactctctgtctggtcttgatcggtggattagaagagaaaaattgaacagcttcaggaaactagttcttattgctgctatggcaagtctagtctaccatctttggagaatgaggaatagatgcctttaggacaaagaactacaggatacatctaaattgtgttaagaaattaaggctagagttattcaaagagttgaattattttggccaaaaaaaaattaagaatgatgataaagcttggttttttaccttgtaaattcagcattatatatgattttcatattgtacaaaatacaaaaatgtatagccgaataatttaagcctggattgggtgttattaggatgtaaacaaattttaagagctaatacactttcctgattcatcaaaaaaaaaaaataatgatagaaaaaaaaatggataggagagagagggaggttaagaattatgaaattgtggctagaatgggtagttggaaaggctaagggttagggcttgagaacttcgacttcaatagaaaaattgttggaagaaaagagagaaaaattaaaaagaaaagaaagagaaaaatagttatggaaaattagagagagataatatatgtgatagagaaatgggagaagtcaaacggtgtactaacatcattaatttagtatttttataattataatactttttgaaatataaaaatattaaaataattatctaaaaatatttagaaaaacaagtagcattcattcactatataaaaaagtaactaaatttgacagttaatgtaaaaatctcattatttaatttagaattaatatattatggtgctgtttggtaacacttttcttttttaattttttaataatcacaaaatgaaagtaattttttcaaaaaaaaaaaattagtttttcacaaacaaaaatgcgttctgtaaccacttttgatttttaattttaaaaacagaaaataaaagtttgttctgtaaagtttattttcattttcattttttaattttatttacgtcgggtctaggtctggagtcgaattcgggttaaggtcagaggacgagttcaatgctagggtggtgggaggatttgggtccgagtcagatcgaactccaaaaaattaattgagaagaaaaaactgtttaaaaaa

SEQ ID NO: 226085 - DNA, 2149 bp, Cannabis indica
aattgttgtaaaagactgcaaagctttactgtcctctttatctaatgtatttgttactcatgttaagcgatctgctaacaaggccgcccattgtttggctcgcggctcttgtttttggtctgatcgtaaattctcggagagtactcttcctagtactctcaaatctattgtgattgcagatttgattcaataaaattatccattcacattcaaaaaaaaaaaaaaagtatttttttgattaataaatatataaaagagatatttctaaatttatatacataagacacttgatcatgactaggacaaataagtagtcattcaactcatagattagatagtaaacaaaataatgagattctatttttcccttgtttcccaaaaggaatactactgtagctaaattaggttgaaattgactcttggttatagactttttcaaacttcaattatacagaaacaatatacatatatttttattatttttaaagtttttttcctttttcttttttcttttggtacaatgacaatatattatttttgcctttgcatacataccaactttaactttttattttaaaaaatgaatataataaatctaacaaatttcaccaatattaaccatttattattttggtcactgttataattaattttttttttacttttattttatgaccattaatttaatttaattcttttttatatttttaacttgaaaagtaaaatcattggaaacttatcaattatcatatatataattaataagaatcaataataaagtatagtcatccctttatatttgtttatttaaattattaaaattagaaaattgagaacttaattaaataaaagataaaaaaagttctactaatatttaaaaaatgtcattaagtaaggactttattcattttcatttatttttaataataaatgtataataataattttatcttttgaaatatgtcttacaaaataattactatatatactatagtttaacttaaaagaacaatttaatcaatttaaacattgtaattacattttttgataaagtaagcaagatttttgaataattttaataaatataatattatacatattaatttcaattattttttatttattgtattatatttctctattaatctattacgtagtgatctttttaaaaaataaaagtataaatatcttttagaaaaaaaaaataaaaaaattaaaagtcaagtagataattaattatgatcgattttatgacccaaaggatttttattcgaattttctaagacaaaatatcaaatttagtaatgaattaaaacgttaaggattaaaataatgcacaaacaattattaagagtttcttatactatttttccatgcaacaaggccaatatgatgatgggaatatcatattcacatgagtcacatgacataatcgcacaatcttatcatatgctaaaatcggggatgaaataatatctccacccaatcaaaaaaatattaatattatacatttttatttttatatcatatatattccattttcatgtttagccgttgggggtgtttttgaagtggattatcagttgaaaagaaaatgattgatcagttgggctaaataaaattcttttttatttaaaaatattcttttttttttttttataataataatacgatttatctcaaaattattattactgtagagtcatttttttaaacaatttcttgttacaacactcatgatgttaatttagtcccaagtccaaataaaaaatattgcataaataaaagttttaataatgaattattaaaatatgtatatgtatttttagggtgcttttaggaatacaccaatgtactttctacttgttttgatattaaaaataattttttagttaattttttttatattcgtgtacgttatagttatttaaaatattttataaaattttaagaaaatcgcaataatttacaatatagaaagcaatgttcaaacagtatattttatacgcatataaaataaaataagtcattcatgcaacacactatttgaatctattttagtgtgttaaattttttcgaatttattaaaatttactcaaaaatgtcttatataattataacgtacataaccataaaaattaactaaaaa

SEQ ID NO: 226086 - DNA, 2146 bp, Cannabis indica
tttacagtattattatctttaacctaatcagcaagtttatttaaattattagttaaatataataggtgtggtgatttttgttaatcaatacgatattagtttttttatttattaacaaattaataatataacaataaggaatatttttttagtgtaatttttggtgttgtacattggagtataaatactttttaatgtcaaatttggtgatagtgtaacaccaaatttagtatgtccttggagatgctctaagcggttagcaatttcctatattatttatttaatcaaatgtgtgaaaactaatagtaaattgcactaataatgcttttagtcaacgacattgagtctttaaagtgatgagattttagataataattaatatagttaagcaataagaacaatagaatttatagaggttcgatcccgtgattatagtaatgtcttactccccttttacttttattactatcgtaagaattatcatgatcacagggagctagccaagtgagtttctcaaaaatccttagaaaaaagtttacattatttttacagcataatagctctcaaaaaaatatctttcggattcccaaataatgaaatgattctactatttatagaaaaaaaacaaaacaattaggaataaaaaggaaattaagttagcttcccgtaatatctctattgacgcgtgccaatcccaaaaaataggaatttgatttgagatataaatgcagatatatttattatgaaaaatacccttaaagatctgtttcatccgtgttatcctgctcgaaagatttggtttcactgggtgatgaggagctcgaacagtcatgtacaagctctgtccggataatacatgttgaaggtttaaacttagtcaggttcacataaaattatttggacagactgtgaaggaaaaacactcgtccaagttttgaaatgctctccacgtgtcactcctattaaaagccacatcaccttgtgcgaaaattgggataacatttgtccccaagtttacgtgggaaccatttgctcgtatgtggacttactcggccactcagtttgctcaaatgggtgacacgtgttcggctctcatactccatcttgatttgatgtgttctgactgcaagatatgaatatctggccatccctccaaatcttaggcatttagtgctctatcttgaaaaatggtcctcgataggtgcaatgacgactattggataccgcgtgcatgacgattgtactctttatttttcttgtagtacgggcgagatgggaaccacctccattaaatccgatttctaattcctcaacctctatttcatcctctgtgaactcagtcgtctcaacactaagcacctcctccatcgatttcacctttcgtggttgttttgatgaagttgaccctcttcccttaggaaccttctctccaccctctctttgtactctcaaattcttgcctctctttgaactagatagctgagaagtgagtttgcgaggcctgtgttgacctgccatggccccagtaaaactaaaggcaaaacccttagcaaatctcacctcttttctaaaagttactttgttttaattttataattagatatcttagcttaaaaaatatatcctcataataataataataataataataataataataataataataattgttatcggaggaaattcgacagcaccaaaaagtgcaagtatttgagcaaagtaagaacgccacctacttacagttatgcgagtactcacttaaaataacgagtactcaaagtttaggttacgaaatagacaaagactagaatagaaaaataaagaagacaaagaggtatagtggttcaattagagctttgtctggttagtccacttttgcaatagtttcagcttagtttatttaatttagatcacctttttatatagaaagtaagtgtctattaacattacataactgatcagacatgattgttattacaataattgtacaaattaattaagacaaacatttaaagtattaatgtaaaaataatttcattcgttcttgacttaattgcagcaatgtgtgcgacttactaagtcgtagattgtctattcatattcaatgttatattatttttaatataataatatgtaaattaaa

SEQ ID NO: 226087 - DNA, 3267 bp, Cannabis indica
tgtgtgtgggtaaagatcctattctaacataggatcgagcaagttagggttttgagtttttatgcttaagtgattgtgtgtattgtgtttgatgaattaggatttctagatttttcttcaaaagtcttttttctcttgggttaaacgacactagcattgtggtcgtattgtacttgtgatgtcatttttggtctaaaatcatttagacaaaggaaaggtcaagattgacctaagatactgataattggtgttttgttggtgtagggtttaaacagtgaaattcctaaagtggtatcagagcctggtctggctaagaagatcaacaaaaccaagaagaaattatcaggaaggagttaggcaagaaatcttgaaagatagattataaagaatcaagaacacactcaaacctggaggaaaatcaaagctcagaatctgaaattgatcctgagaagaaggagaataattctggatcagattcagatctagaaggggctgtaaaaacatcacaaaacaataatcagactgagaattctaaaactctgcttgatttctattttactaatatgagtaacataaaagttgatattgataaatttgatggtactagtgattacaggatctagaggaggaaaatcaaatcactccttgctcaacaaaagttgctaagggtgctagatgagactattggatggccataaggaactacaaagattcaacaagaagaatatctagaaactgctactggaatcctaatattcaatctatcagatgcaataatttgatcagcagacaaagaagagacaccatcaaagatatggaaaaagttggaggaacaattttaacaaaaatctttgactaataagatctatcttaaggaaaggatttttagtttcaaaatgaatcaatcgaaaaccttagatcagaatcttgatgagttcttgagaatgcatattgaacttgcaacctcaggggagaatgaagcacttagtgatgaaaatcaagccatcatcatactaaattcactgccagaaacctatagagaagtgaagatagcaataaagtatgggagaacctctatcactcttgatgaggttatatctgctttaaagtcaaaagagttggagatgaaaatagagagaaatggtggctctaatgggaaactaaacctaagcagaggtagacctacataaagaaagtcatggcatggaaaaggaaggagtcaaagtcatagtcatagcataggaccaagtaaaggacacaacaacaaagggagatcttatccaaaagggccacaagacacagaagggtgtttcaactgtgggaagcctggacttttcaagaaagattgatatttcttgaacaagaatggaaagaacaagttcaatgggcaaagaaatgactacagctgagaatccaaaaaccttaagcatagaacagatcatcaaaatgtaaatttgagtgactgttataaagatggagaagtttatgttgttggatcatcttttaaagatgattggatattagactctggttgtacttttcatatgactagcaacaaatctattttgactgatttcagggattctacaaaaggcaaagtgatactaagaaatgaccaaaagtgtgaaatcaaaggagcaggaacagttgcattcaaaatacatgatggggtcactagatcactaactggggtaaggtatgtacctaacttttccaaaaatctaagttcactaagtgtgcttgatgatttgaaaatagaaagctagatcaaggatgaacaaatgaagatttacaaggggtcaatgacaatcatcaaaggagtcatgaaggatggactgtactatatggtaggagaacctatagctaaaagcaacaacacagttgaacaaaacaacatattgcaaagtccataaaatgctaaagcaatactatggcacaatagacttgggcacatagcagagaagggactgcagattgtcagtgagcaacaattgcttggcaaagatagagtaaggaaagcagaattctgtgagcactgcatacttggaaaacatcacagattgaagttcaaaataggtacacataaatctaaaggtatactagattatatacactcagatttatggggccctggaaaaacacctactcatggaggtaaacacttattttatgtcaattgctgatgatttttctaggaaagtatgggtgtttctacttaagaataaaatgatgcttttcaaagatttgactagaaaacacttgttgaaaatcttactaacagaaaaataaaaaacctaagaatagataatggtatggaattttgtaatgatgaatttgacatgttttgcagagaaacaggaatacaaaggcacaggagtgttaggctaacaccacagtagaatggtgtagctgaaagaatgaatagaaccattctgaacaaggataggtgtatgttaatacactatgaactgtcacatggtctttggggtgaagctgttatgacatctgcctatctgataaataaatgtccttccagtgttattgaatttaaaacacctgaggaaaggtggtctggttaaccacctaacctgtcaaatataagggtgtttggatgtagtgcttatgtgcaccaaagtattgctaaactagaacctagagctataaaaggagtttttctaggatatcctgagggggtaaaagggtatagaatttggttaagggaaaaatggggttttaagactattattagcagagatattatattcaaggaaaatgaatttccatgttcacttaaaactaaccctgtaggtacatcaaaactaaccttgcaggaataatacagtttgatcctatcctatggagattagaggatcaagaagaacctgatgtcaatcaggtggaacatgcacgaggagaacctgaaccaaatcaagttcaggtggaacaaacagaaaatattaatagagatgaggctcaagtagaaggacaacaagaagaggaaacataagacacacaacaaataggggctctaaatgactaccagttgaccagagatagggagaaaagaacatcaaaacctaatcctaaatacagtttcaatatctggaatgaagatatagcttacgaatttatgacagctatggagtcaattaacacagaacctcaaacatatgaggaagctatggaaagatctaatgctaagaaatggttcaaggctatggatgaagagatggtgtcactcaggaagaatatgttggaaattatttt

SEQ ID NO: 226088 - DNA, 4037 bp, Cannabis indica
cggtttgtggtcggtttcggtttttcggtttttatgaacacccctagcaaaaagtgagaaaaaaaataagtgttaaaatctaatacatttaactttttctacttcttacataaatttagaaaataaaaatcatccaaatacatgaaaagcctcacttgtagcgaactatagaatacaacagacttttgtaactaaattaatctcatctcatcagatcagcttagttcttttctgctcactaaaaatcatagcactgttcaaaagcttctccattgctatgacagaagaacccttaaactcattctcatctctcacaccattcctaatcatttccccaacttcccaagctttccttctcatttctcctcctttctctgtctctaaattcataaccaaatcaatcttttcaaccatttctttatgtccaacaaaggagctcattcctctcccaatttcaccacaaacacccaatttttcttccaacaatttggcattataaaactgatctgcagacaaaggccaacaaattataggcacaccataactaagtgattccaacactgagttccaaccacaatggctgagaaaaccacacacagcttcatgacccaagatggtcacttgaggagcccattgatgcacaactaaccctcttttcgactctctcattcgctcctcgaacccctttggcagccactcttcggctctgaactcgccgtttatgtcaaacccgatcggcggcctaacaacccagatgaagcttttgccactggcttccaatgccatggctaattccatcatttgagatgttgatatattgttcattgatccaaatgacacataaagaaccgatcttttggttttgagtcaagccattgtgtgcatatttcgtctgtgattccagctcttgcttttccggaccttgttgccggagaaaagagaggcccaaatgaaaaaaatcacatcttcaccaattattcgccggaaatatgctaacccattactctgttcgatctgctcaactgtgtcgaaaagaaaagcatcagctttcgtccataactgaagcagctttcgtaacacaacagaaaacttctcagacccatcagccacacgtaagaattccgacatctgagttaggtggattttcccagcttcgggaaaatccggcaaacagatttcgtcggtaaaggaagctcctttactcagtcgatgaggaagattcatccacagagagtaaaagcaagcgaacccaaaccccccaccaatgcaaaaaaaggcattgaaaattccaaactcggtagcaacctctttagtccatccgaaaaacatgtcggagattatcaagaacggttttttactgttatccgggtgagaacagagatcggagatgagttttccgaactggggtttgagtgaaagtgaagcttcgaagaaatttgggaggagattgtaaggaagagagtcggtgttctccacgccggaaggaagatcagattcataaccctcgccgggaaaagttattccgacgagttgaattaaggaatttggtggcagagagagtttgaggtgtggaagattgagttgggtagtgactaaagtaactgtaaagtagttatttctggtttgggagagtttatgagctaaggctagaaaaggattgaagtgtccttgtgccatgaatgggaagaggactatgtttctgttgttttctgtatcagtctcagacatcattgttgctagtaattttgatattgaaagtgttttgtttaaagagtgagagaagaaaactgtgaataagctctttgttttgactaattagagttaggtttatacataataataataatagtaatagtaataaatccttgacaactttatacacggacacacttgattatttgattacaccagcatatatatatttatggtaaactcaactgatagatatatatatatttatatatagaatagaaaggcctatacaaaggcttcacaatccaactttgtagctgtttcaatctcatcagatttagcttagttcttttctgactcactaaaaatcatagcagtattcaaaagcttctccatttgctataacagaagagcccttaaacccattctcatctctcacaccattcctaatcatttccctaacttcactaacttccttctaatttctcctcctttctcactctctatattcataaccaaatcaatcttctcaaccatttctttatgtccaacacaggagctctttcctctcccaatttcaacacaaacacccaatttctcttccaaaagtttagcattataaaactgatctgcagacaaaggccaaccaattataggcacaccataactaagtgattccaacactgaattccaaccacaatggctgagaaaaccacacacagcttcatgacccaagatggtcacttgaggagcccattgatgcacaaccaaccctcttttcgactccctcattcgctcctcgaacccctttggcagccactcttcggctctgaactcgccatttatgtcaaacccgatcggcggcctaacaacccagatgaagcttttgccactagcttccaatgccatgcctaattccatcatttgagatgttgatatagtgttcattgacccaaatgacacataaagaactgatctttttggttttgaatcaagccattgtgtacacttctctactgtgatcccaattgttgctttttctgaccttgttgccggagaaaagacaggcccaatagaaaaaatcacatctttaccgattattcgccggaaatatgctaacccattactctgttcgatttgctcaactgtgttgaaaagaaaagcatcaactttcgtccataactgaagaagttctcttaacacaacagaaaacttatcagacccatcagccacacgtaagaattccgacatctgagtcacctgaatctttccagcttctggaaaatccggcaaacagatttcatcggaaaaggcagctcctttactcagtcgatgaggaaggttcatccacagagagtaaaagcaagcgaacccaaatcctccaccaccgcaaaacccggcgttaaaaactccaaactcgcgagcaacctcataagtccatccgaaaaacatgtcggagattatcaagaacggttttttacggttatccgggtgagaacagaggtcggagatgagttttctgaactggggtttgagagaaatacaagcttgtaagaaatcagccatgaaatgatagggaagagagtcggtgttctccacgccggaaggaaggtcagattcatagccatcgccgggaaaagataatccgataagttgaattgaggagtttggtggaagagagagtttgaggtgtggaagattgagttgggtagtgactaaagtgactgtgaagtagttatttctggtttgggagagtttatgagctaaggctagaaagggattgaagtggccttgtgccatgaatgggaagaggactatgtttctgttgttgttgttgtctgtctcagacatcatcatgattagtttattctagtatagaaagtgttaggagaagacaagttgttcaatgaataaactattaaactatttatagggttgctcttagatgtttggtggttttgtcattcaaataattttagtctttttgaatttcaacgtgtacaaattgtattgtatcttctaaactattagatttaagaattttcttaaaaattttactaaggaaacataaacatgatgcaaaattttcttaaactattaaagtttcgagtacgatcattgttaataaaattaaaaggaaatagtcagaagtatgatttgaatctgataatttcaattgtttaaatggaattttttttgcatttctggaaaatttaaatgatgtcttaaataattatgttgagcataaaaaaataaaaattaaaactattcagtggaaccctcaaagcactcacaatagctttcctattatatcttttaaaataaatcaccaaaattttattttt

SEQ ID NO: 226089 - DNA, 3540 bp, Cannabis indica
tcttcttacaaaacccaaacccagtctttctcttttctctgtaactctctctacctctcaatcttctctctctctaattctcaatcttcgcctgaacaaagtactcaaactcgtatctcaatcgtcttttcaaaagttgagtcaaggtggtatttataggcataggattaagatcctaaagtcggtagctggaagaaatgaggttgttaagttagttagaaaataactaacttaaccaactcctcatttagcaaagtctttgcgtaagtaccaaggcctccgggatcataaacaagcttccaaacacgagggccacatacctatgctgaagacgtttccggataggatgtaagtctactgaagtcgactatctggaactaccaatccaggagggataactagccagctggaactccagggaaggagtagctatcctgaagactgatcctggagagggcatgatattcatcagggaacacccttctagacactactatcattccacgagataccttctgggattgataacagtgagtgaacagcttccgagaaaggacgattgcgaagatcttttcatttggaggagctataccacataaagtattgtcaacctagctaaatatatgattatgacgcccctccaattccaatttcccaagttcaattaattacatgccgttttggtcattttcaaacagtaatttcaagtgaaccaaaacgatgtactatagtaatatatattggctttagttttcaaagttcaagttatcacaaatgaattaataataatgcttcaactgatataagcgttattgcttccatctgtttatgaatgaacatgcacctaaattttatgaaagagtgggaacatgtagtagtcggtccactaaatgactccatcgactatgactttcatttaccacttatattattatatatatggtgctgatgatctattatgaaattttcattgtatatgtacattaatataaatatttttcacacaaagcaaatccattacgaatttagatataaaagttttttttttttttggtaatatttgagaatgaattgcactttcaaaagaattccaacttatttaaggaaaaacttactgccaattacagctgctctccaaaacattagatattggctcttattttttatttttatttcagcatatagaaaaattataattataatcgatatcacacatgtttttaaaattttaaatataagatttaaatagttatttgtatgtatatataaatatatatttatgtatatatataattttttttttggaaactcagagtaaaatgcattactacaaaaacatttacaatctagcagcacatttttaaaaaaacaagatcttatttcaactatacaaaagtaaatcaaaaattaaaaaattataacctgttaaactatttcttatcctgtttgttaataagttttggccaaacaaaaaaaattccattttaaacacaatcaacaatctgctttcatagaccgaaaggcctcatttctggcttgccaaatatagtaaatgcaatgcacctaaacatgctggaaaaaacccttttaaacttactttttcttttgccctttcaatccacttcacaaactggtgaagcgaaatagctgaaaccctccaattaagccatttttaatgtctattaagatcttcttacaatcataaaagaggtgattaaccgattccgcacccttgtaccatagagaagacaagagtaatcttacaccaacttaagccgatgcaacctctcttctctctagtctttaagtgattttggacaactaactaaaggataaagcaatgtttagggacatataacctacctcaaacctccttggtccaatgaaatttggatcctcaggttgaatgagtttataaccatgataaattgaatactttgtagtaaaaaattgaaactcacaaaccattctctcgaattcttcttccattgccaccacgttttttagtaccaactgcattaagaaagatttatctatatatataataacttatttaattaaatttttagttttaacactataaattattctaattttttaaaaagttaaattaagatctctgttataattataatatatataaagccttatatttaattataatctttttaggtgccaaaaaaattaaaaatgctcctccaattacagcacaaatggtacctaattcctaatttttttttttatatatatcttacgtgtatatatttagtgaattaagctgaaactgttttttatttattatgtttacgtttttttagtttaattattgtaattcaatgcataaacggattgataatgaattcaatctctgtgtaaatgaacagacacttgctttgtatataaaagagagtaatccaccgtgaaatgggacaagacaaaaatccttgcaacagtggactaattaagtagaccgtgatctgactgaaccactatactctcttgtatcatttgtatttctaattattttttattaagtattttgtgtccctaatttgaatactcgtcattctgagttgagtactcgcacaaattcttcatattatcattatcataatttattttggtattgtaaaaattccttcaacaacatgtatatatataaatcatatatttatatagatagttataaatttatataacttttaagatgtatggaagcaaagaaacaaaaagagatagtttagtgcttgttattgaatcaaataagatatatattttattttcttgattttttttaaacaagagcttagcccttaagggaaaaagacagactggaaagggtagtagtgtgaataggaagaaaacactttactattttcaactaatgctaatttagtagttgtattaattattgctcaaaaaaagtaattgtaaacataactaatgtatttattaataaactaaatatgaaaatggtaaaagttttctataaatatagattaattagtcaaattgattattatccaactattcgtcaatgttcatcacctaattctcatccaactaacaattaaattaattgtgttatatgttgaatttactagaagaacgtagaaaatgtataagctgtcttaggtttgagtggcaacacataatatagaggttatcatataataatatatagtggataaagtatgtaattatgtatgtatggagtggagatgagggacccaacgaaagaggattggcagttaatatagtttatgttgattattattgtgtagtaacgtataaataaccaccattcaaattgactggtgggggagaagatgatattttgcctttgtttacaaaacttttttcttacagatttatctctctaattcaaaattttatgaaaaaagaaaaagaaaaagaaggataatatataagttagtgatttgggcggtttgggttgctttcgtagagcatgggtcagactataagaaggaaactgtagagtgatattcccaactgtcaattaccctttttgtcgaaaat

SEQ ID NO: 226090 - DNA, 2216 bp, Cannabis indica
ttcgcctccctctccttctgcatatggacaaagtcaaaaggatcacctttatggggaaggtgaaccccactaaaggtacccttgacagagccaagaggtaaaaagaccgaggctagcccagcctcaactgaggatcgcgacactgagggaagaccccaatcctggggggggatccacaagcttctgcctcttcctggaaaaactgccgctcgtagcttcaagagaacccgctccttccattgcagacttactgtacctgtcagaagtcgacacaacaacaaaacgagtcagcgcatggcgtgatcccaaaaccttcgaagacgatggacatggaaccaacgttctagaaacaaaggcatcttcacaatctcctcaaaattctataacaaataaacaaaaaagaaaagttaccagttgacaagagaatgtgggggttggcagttttggtgcaacatccacgacggaggagattgtgtctgactgtaatggtgatgaagtcttatgcaacaggataagatttgaaactcaaagagctctagtttgacggccaaggaaagtgaaaagtggaatagatgctaaaggcatttatgggatacctagaaaaggcaccttccataagaggtaaacgattcaattcgctcgcccaagaggtgtctgacggttggatgaacgagaagctgaggggatatctcacttcccaacagacggctcctgtcattgcatgcattgtaaaaggcacacagcgaatgagaagaaatcataaatccaatcattatcgttttgaggatcccacagaatacacgcccaccacgcgtgcaaaattcaaaagtcagcatttaaggcactgccaaaagaatagaagtaatcatgccttttgagtaatgatacttcagtttggcggctgatgatgtactgcattaaagaacctgtccaaagtcccacgtgcgtaatttatttcaaaaggagatattgcaagctcctgaaccatagtatgtcccgaaagcttgggggtagatgttattcgcgtctttgtaagcatgacacgtagattttaatcaaagaaggtcaataagtcactaggctgcccaagtacttcattgagtatcctgagaagataagggcattaaccttgcggggaaagcttccgtgaaggaaggctccctaactgctagccaaaaaatgggctcccgtgaaccacggttttcctccgtttcgtgagtcaaagtctcatccatcctggagcgaagactatttactgtcgcgagggatgtgaatctacatgaccaggtcttagtgttgcaccagtctcgggtacatcttcggctcatgagatctttatgcacgtgtgttaggctacaaacctaggaactaggctatttcatgtacaatatcagaggttgtcccccacaacacgctatcgtgcaggcatgcgtgtcttcgtgtaccgagctaaataatgcaacgactaggagaaagggaaatttaaacaagaatgaccctagggtgacacatgtctgaggctcagccagtacaaccagtacgatctgacacccttaaagccacatgaaaaatacgccacgtaccaatccaacggtgggatttcatccccgcggtgacttatccaaaaactgcccatgcaagagaattggtctataaatacctcacagatagcacaagggaggggatcctttcggactttcacctagagattgaagacttactcttcataaaaaaacactttaatgtaaccctattattaactccagaatattcctaccaagcttcctcttcttcaagacgaacacggtggaaaggagtaaaagtctgttgtatctgtatttgtgtaaacaatgatcgtctaatgagcctaataaaataaactcgtggactaagaataattaatgtctgaatcacgtaaaaatctcttatttgttatttcattattcacactttcattactttcttaagctctaaaaatattcggttgccgaaaaactcgataaacacacatatattaccaaaaagaatgtaattactattatgcactcataaatattaaaacctagtttctagaagataaaaaaactaagagactgtttggcttcataacttaaaaactattttcagttttaaaaaatagaaaacaatttttaaaaactaacagggctcgtttggcaaaaagttttaaaaaaactagaaaacaaaaaacatcaaaa

SEQ ID NO: 226091 - DNA, 895 bp, Cannabis indica
ttttggttttttcctaaattcaaaaacttttattgtcacctactatcccaacatcttcatttactacagctatttcagttgatatttgggaaaaccaaccaattcgttaatttatttataattgataatattagaatttcaattaattatttattattatagaaaaaagtattatttattataacttttggtgccaccgaaaatccttacgcaaatcaatgattttttttcccttttcaaatgtaccacacgactatatgtaacttattttagaattttataaaggttcacgtgatctcaaagtatgttattaaatgcttaatataacgtgttttattttctaaattttgttagcttagaaactaattagatattacttgaatatttcattgtaacattcctgcttggcttatacacgagcaagtatttctcactcgtacactccttgggaaaatttcccaggatgttacccatcttgaaattacccaaagtcaaacacgcttaactttaaagttctttcatgatgggctaccttttaacaagatgcaccttgttaatataggaaataccaatcaatacatttaagtcttcttcaactgtgtagtcccatacctacacattctcaaagtcatcccacttgaccatccccaggcaatgtgaaattgcacaacttacctgatatttccccttacagatcacatacgggattactgactctcacattcatccaatcatatatataatttggtaataaatcactatatttatatatacgagtaatttggtaaaaattatgagtttaatcgtgcttgagtgcaagcaattttcgaaatgcaagtgattggtgattagaatttatacttgaaccttcttaatactatcgaattgggaaaga

SEQ ID NO: 226092 - DNA, 3157 bp, Cannabis indica
gttggtcggtttacaatttttttaaaaaaaaatgggcggattgcacttaaattttagcaacccaaactttagattgggttagaaaatatataagataaaccgcccaaaccgaccgatgtacaaccctaagtcctacacccctctagtaatttacatgtataattcgcattaaataaataaaaatcataattgataaacaaaccatacaagtatttttgtccaatatcaaaatctatgtctattttgctatagcataattaatactcacttttcaaatttttcattaaaatcataaaacaaatagttagtgatcatgcaattataagcattaaaaacgaatgaaaaccctaattaggagtttagctcctcattgtctttctaaacaattacaaataataaattggaaacataaaataaaagatagaaaagaaaaactgatgaagaaccctggttgtacttgaaaaatctccttttctctttaattttcgtgcctccaaagtttcctcatgagaagcctcttttattttcgaaattagggtttaaaaacccatttggcctgaaattgggtagcgggccgcggcatggtgcttccaatgtcgcggcccgggtggctattttttgggcaacgaagtgcctagtgcaatgatcgataatattttggtcataacactttcaatattgcttggaatcggacgattcaaaatattttgaaaagctgaaagagggatctggaacttttatccacattttttcctgaaagtgaacacatcatagtcaaaaattggtttgaagtttcagacttaatttttatcacaaacggagcgtattaagcatacaaaacttaaaattgttcactcattatatcttagaactctaaatcacatcataaattcatcataatcatattcattttatgtttctccttttcaattcatattatgaattttatcatttaaatctgaaataagtagaatacaagcgtaattctgcataaaatgaatataatcaattgaaacacatttgtaaaatactttataaagtacacctaaaactagcctatcagatgcaaatactattatttttattttatttcttaactgacgcaaaaaatttgttacttcatttaataatcaacgctaatagtaatcacattttgcatcggttgttaagtgaagcaaatacctttgcgtcaaactataaccgtcacaaattggtattttgcttcgattataaaccgacaccaccaaaaaaaaaatactagatctgctgttaataatttctagctagatctgccatattgtatgattttttcatattaaaaagcctcttttttatataattggtatactaaaggctagaccaagctccacattttttaaaatgaaaactccaaatgattgaagaggctttctcatgaattcaacttgtaaatttttattttctataattctgatgtggcatttaggaacacatacataaaatataaataacatagaagcatgaaggacaaaaagaagataaagaaagttcatttgttaatttatcaaatttatgattatgaaagctcacttcacttatctaagatgatcaattatgtcaataaatagaaatattccaacaacaaaaaaaattgttaaattcaaatacatggaagagagagatgattcatgcaccattccagtcaatcttataattgtcatcacgggagctttctgtctgagtaatccaagttccaatgaagggttagccaatagaaactgcataagcttgttgttttgaagtatttttttcttctttttgttcttatccaataatgtcatcctttgagcaaatcactcattgaatattacatacttaattgtagtttcaagtcaaaaaaatatttactgaaaaattgaatagggcaatgttgagatctgacttctatgaaagtgaatgtgaatcgtaatgagtccacgaaagaattggcctcaaattgggtcattgtctagcgcctctgccgattcatttaatagctaggaactacattaattatcttccactagaacaaacatcccataataatgagaaaatacagcatggtagttgaaccttaatcactaagaaattctccaaggattcatcctaagtactgaaatttccaatttaaatgtactaattttacaagttatttgagtttacttgttatgacactacaacataaattatcaatagcagtggaggggtctgccgctaataagtccccatttcgcgactattggctattagcggccactacaacaaaagtgagttttaaagtgagtttacttgttaatcactaagaaactctccaaggattcatcctaagtactgaaatttccaatttaaatgtactaattttacaagttatttgagtttacttgttatgacactacaacataaattatcaatagcagtggaggggtctgccgctaataagtccccatttcgcgactattggctattagcggccactacaacaaaagtgagttttagaggcagagcaatctgccagtaataactgcaaattctgtcggtaaaagtattagcgttggaatctgccgcttatacttggttgttaatattaactattagtgacagatgtcagctctgtcgatagtaatcaattattagcagcggactacaacaatgggatccgccactatatttattaattattttttaaaaatgaatatattattatttgttatgattttttatataaatattacagtttaataacataaatactaaaaaaaccaacaaaatgaaaagatatatacatatagacaggggcggacccacatgtaggcgaggcggggcactcgcccttgaaaaaattagaaaaaaagtgtatatgtaatttagttagttacgacatatatttgtaataaaaagtgatatttataaatgtaatattagttttagtgtaatggctaaattatattacatataaggatagaagtcaatggttcaattcccataaagagcattggtttttttttaagtttacttttgcttttatcttacaaaaaaaaaaaaattaacgcccccctccaataattgtagtctgccactatagatgttctattcctaaccaacgacagaagtaaaaaattaaattattatttacttcttc

SEQ ID NO: 226093 - DNA, 2208 bp, Cannabis indica
agtaagttccttttcctattctttagtgtcccttgggggataatgtgccatttaagtttggggaggtgaactcaattttttagtttttatttgtttgttttgcgtgtctgcttgtgtgttcgtattatgagtcaatcttctgaatatgagccaaagtgaaagtgagtatgtagcatggtttgaaattttattaattctttcaaaaaaatctatgtgcttggtgagatttcattcttaattaacttcaatttttttctttaaaggaacatgtgatttaggcaatttttagattggttgtgcctttcaagctacccttatagtctttatcttagtttatcatttttaagttttgacttgttactctttatttctatacttaatttgagctaaaataaaatgaatccattattatatatctttgatcctaactataccataagtggatcttacgtttgagggattataatgggaaaagtttatgcatgttatgtgggaattaagagtaatattgagagaattttaggaaaaaaattatttgcaacaacttgaagaaaaaaaaaagaagaatttttcttgacaatatggtgtcatatttaaggagaaaaaaaaagagttgttgcaaggttattaaggaaaaaatttctcatgtaattagaaaaaaaaaaaagatatcgagatcatttgtgaaagttgtgaggtaatttgattagagaagcttatggtatatatgaacctaaatgactattctatccacccgtgcctaagcctatcaatacaagcctagctagaaagaccttttgattcttgattatgcatctgtttatattagtggagaatagtgagtattgcaagcatatagaatatatttggctagtgaattgaaggtggtatttgacatattttaattgttttaaatattagtttagtgtttattatagttttatgagctgaaagaaagaattgaggtgagttaagggtgtgattgagctaaattctcgactaaaacatatatgcgaaatttttgtaaaaaccatgttatttggcttacttgaaagattgggactcatgtttcggttgattgacttgattcatttatgctgtgtcgtgtttagttgttagttctttattcgaggacgagtaaaagtttagttttgggaaatttgttaggtttttattagtattactttaaggtcagttttaaagtatttttaaatagttttatgtgtgttttgtgcaattttacgcttttggtagttaatattttgcaggtttagtcttgaagaaaagtggagcaatcctgaaaaaaaaaaatatgcaaaaaggtcaaatagataaattctcaatgctagagcaacaataaattcaaaagttccaatgcggttggagctcctaaggctaagaaattagaaataatggagtggtgcctcaacattaaaattcaatgtcagggcgctaaaaggtaaaaacttagcagagagggtcacttttgacaagtctaggggtgcgcctcaacattggggttcaatgttgaggcctaaaaccaaggggagctcacttcctaatattggtcgttgagggttgcgacatgggcatgtagtatcgtggcccgtgtgaaaaaaatcaaagaggaatcgtgtgaatgaggacacgggccgcgacactggatttgtagtgtcgcggcacgcctagcataaatttgaaagttagattttttttttttctatcttttttatctttccgcggctataaaaggaactctttttcacactttttagcaagcaattagagaggacaaaaattagagagtagaagtgacctagaaggcttttcaacaatttcttctcttatattttcttcttatcttcttatgctcttagctaaacttttatttaggatattggtggagattgtttgacttctttttatggttttaatatgattttattcttcttctaattttctacgtgtttttatttcattcattcttaatttcttttaattacatgatcactaactaaatatttatgattttgatataaactctaaaaagtgagtattgattatgctataatgaaatagggacgaatattgatataggacgagagtacctatgtggtttggatagcttttagagtttctttacttaatgccctcttatatgttaaatttatcatgagagtagaaaatttttatttaataagttgagat

SEQ ID NO: 226094 - DNA, 2900 bp, Cannabis indica
ataaagactttacacgtgttctttttactagcgacaaatgaataaaagtttttcaatctgacaaagctgtgcctttgccgttggaattttttttttttggggtgttatgttaaatctcatctcaaagtaaggtttgagatacaaagacaatataatgattaattgtaggctaacttgattgaccttcaagaaccggatttacaaacaaatattgatgtgagaataattatatttcaattagtttttcttttttcaaataaaaatataattttaaggggtaattttgtaatttgattttattggtgagatgtatttacaaataagtgatttgtattttatagggtagaaagtgtattaatgtttttagtggtgtttgagtgtttgatggttatattgtacagttattcacttttttattaatggcatgtttacttagagggaataggaattaatagtatggtattgattctcatacaattgtttattaaattttacacaaattaaggataaaataaaaaaaaagttctccctccattttttttagagaataccttttgcctttcttaatttattttattttaattctaattttattaattaaaaatgaaaaaaataaacaaatatgctttttaaaatttataaacaaaaaataattagatgttctaacaatcacaattttgtaaaattaaagtattccggttacctttcctagttatataaataaaataatatgtgattatgattttctttccatacagtatagtaaaatattgatttcaattattttctatattaaaccgattcatttctcccattgattattctaatttcagttacagtttaaaaaacgcaccataagagtattaacaaatcaaatttaaacaataaatacataaattaattaatatataatatataatgacgattttgttttttaaaatatatttacaatataaattattattattttattttttcaaaaaaaattaacaagtaatatattacaaatattaatttttaattgttctccatttattatattatatttttttattaaattattccatactctgctataaatatattcagtgtttttcccgttattaaataaattgtccataaacaggaaaaacacacaaaaggtaagtaaagatgaaagacatagaaaagaaatctacatccactgggacaaagctatacgagattgaccaaaatagatggtaattaattaaacaaataagaaaaaaaaaataatggaaagtgaagaaatactaatttcttttggtatcgagtcccctgcgtctttctcttatccttgagacctgatcagatttctctccgcattcttattttcttagatggttttgtttttgtatgaaaataataataacacattaaacatgaaaatcataaaagataatctttcaacaattcattactatttagttgtaaaaattttatattgataactttgtttatgaattaagagagataagggtgcagtgagatttatttatttattattattattatttttgtgataaagcaaggaagatggattcttttgccaatagagtagaaggtgatgacaaagaaattcttaattgggcagcaattgagaggcttccaacatacgaacgactaaaacaaggaatactagacacttgtacagttgatgtacaccatcttagtattcaacaaaaaaagagtttggttgagaaactgatcaaggtgcctgaccaacataatcaaactttcttggccaaactcaagaatcgcattcataggttcattacccactttctgtgttttgtttgatattccaagcaaatagaaatagttactcatttttctttttggccatattcaatagtgttaggaattgagctacctactgttgaagttcgttttgaacatctcattgttgagacagaaatttatgtgggagaaagagctctaccttcattcattaacttcacaacgaatgtcattgaggtaaaataaaagttgtttgtaaattataccattcaataattttaaataactcttttgttctttgattttgtttttagggattcttaaattatctacatataattccaagcaataagaaaaaaattgctatactaaatgggcttagtggaattataaaaccatgcaggtgaatgacttaatatctttttatttgggtatgtaaaagaaaagtaaacaaataaatcaataagccagcttattatttttcagaatgacattgttattgggtcctccgagttcgggaaagactacacttttactggctttggctggacaacttgacccacgattgaaagtgagattttttttttatatacattgactttttttcaaggtttaaacttatttatgtatgtatgtttacataagtgaattaatgtttcagttttgtggaaaggtgacttataatgggcatgacttggatgagtttattccagaaagaacagcagcgtatgtaagtgagcatgattctcatattaaagaaatgactgtgagggaaaccttagatttctctgctaggtgccaaggagttacaaggcgttatggtatgtgaatgtccccgcttatgttttgatttgtgtgaaaaaattagagacttgaaattcatcttcatttggctatttattctcacagagttgctagcagagttgtgtagacgagggaaagaagccaatatcaagcctgatcctgatattgatgtcttcatgaaggtgaccttagtgacaaaattccttacttgaaaagttttagaagataaaaaaaacattggagtaagatgcctaagatgttctcaatgcttgtttctgtctgatgattttctattctaatctatataggcagcaacaacagaaggccaagagacgagt

SEQ ID NO: 226095 - DNA, 2339 bp, Cannabis indica
tgggttcaccaatcgtggggtttttataggtagtaactatggattatctcctactagcactaatggtcatggtgtttctggttttaacagacctggcaggttatccacaccatctaatcaaattcaatgtcaactttgccacaaactcagacatactgttaattattgcttttacaggttcgataaaggtttcacaggggtgtttccaagttctaattcccttacagctcaagctaatgttgtccagacatcccaaactgatgacaccaagtggtacccaaactctggagcaacaaatcacaacctcttataattcctcgattggtttcaatagatttttctcgtcttgaacttgagggtcaagatcttcgtctttcttctcgttttcttctaccacgatcgtcatcaattgatgaccgacttttctatgatgcagctctatgcgataacaatcgtgagccagcatctggtttccacgcaccactcccacgccatctggtgtctggaattttaaagataggtgctcgatcaaattgactgcccctagtccgattagtgatggatgacccaacaatatgttgtaagccgagggcatgtcattgactaaatcttgcataacagtagcagataaaggtgcctcgcctaaatctaatgcgagctcaattatgccaaggctagcgatgctgtctccagtgaatctacaaagattcaccatgcaaggccttaatttgggctttttgagccccattttctttagagtctccttataaaggatatttaccgagctcccattgtctattaatacttactcgatccttttattggtgagttgaatggttatcaccaatggatcgacatgaggatatctcacatttttctcatcttcttccgtgaatgtaatgggaggttcctcagttttcaccttcttggatggttctggggcagagatcgactacttgttctttatctctttcacatatcttttttgggcattattgctttcccctgcgatatgtggccctctcaaaataaccaggatgtcctttccttccacacgaatatgttgtaacccctggttatttgggttattgggcagactaggctagttgtatccttggccctgtcttttcacgtactgcttaaaatggcctcgatgatgagactttctaactcgtctttcaattggcgacattcgtcggttggatacccaatatccttatggaatttacaatatttgttaggatctcttttactcctcgaattcctcataggctcgggtttgccgaaggctaccttctgctcatgtgcgagataaatattctcctgagttttattaagctcagtataaaagtatacactgtcacgtatttgtcatgcttcttttgtttctttctctcctttgacggttccttaatttcgtcctttctcttcggattaggagcccccaagttaacaattgtcgtggaagcagtacctgtggaaacattgctgggtttatttcccgagcttgttttcaacaagttcatctcatttcaggcttcttcctttaggacaaacacctgagcccttttgttgaactcagtgatgtttctcaccagacgtccttgtaagtcatccaatttctaaccctagcggcagtcgtgctaaaatgacttaagtacgccttaagtgtcttgctaggctgctgctttatattggttagcgaggccgcttcgggtcacctatccctagtggctttaaattgctcattcagatccctagatagctgctcccaagaagttattgaatgatgagtaaatttgttaaaccatctactcgctgctccaacaagcgaggtgggaaacaaaatacatcgtaaattgttcgtcacattactcgctcgcattattgtcttaaagttgttcaaatgcgagatcggatctatagttccatcataagacgagacatgcgggtttttgaatcctgaaggaaaaggggtattcataatatctaggtgatacggctcaacttcctcgtcaaagtcgtacccagataatttccctaattccccacttgatatctcctaaacttgtcctccagctcctttatccgtaattggattggttcctcttgctttggaccaagctgttggcgaaggtcaggtttcttccgattcaagtgctctcgcagattcggttgggagtaattgctggcagattttatcttactcatagatcgcgtcttactcattgactttgtctttgagtggctcgcagatttactggttcgcatactttctcgatcattagctcattgagtactttctcctctttgagttgatcgactatgttatctggatc

SEQ ID NO: 226096 - DNA, 1298 bp, Cannabis indica
gatatataatgtaatttcctcaaaatattgtcatacgagttttttttaaaaaataatgtcttttgataaaataaccgtacaaaacagaacaattaaaaattactaaaaaatagaagtaaaacaacataagaaacttaacaaagtataaaaaatatatagtatttttgaaagaagaaaaatacaaaattttttgaaaacaattccacatcacagtacaatagaaaagacaagaaaaattcaatacgtggtataaaaattccaaaactcaaactcatactacacattagggcagcaagaacatggctcgaaactctaatgaaataaatgagtttggattttgttagtatttagccatttctatttatttttggcagttaactgctaattggttgttgtgtgtacatagaatattatccacatgaatacacacatcgcacaatatcattagaacatgcaaatatttattgtgtcacgtgtacaaattttatgtacacatggacagttaatgtgtcagttaactgctaaaaatacatagaaatgactaaatgctaacagaatgcaagagttttactgttaaaatttagattttagggttaattgctaacaaaatgaaagtattaagaattatgccgcaattaactcaaatagataaaaataagttatacgagtataaataaattgggtttgggttatagttttcaacacgattaataaatgagtcgattttaagtttaacattttcttgtaatatttaagattcaacacgatacgaacacgacccatgaaaataaattgccacccgctgtacacgacatcgtttcgttagtacttatttagtttttatgcttagcttgcttgactaaaacattactattaggttattcgataggaatatgtggtactttaggagtgattaatgattttttattaattggttatggttagatcactcgggtttggatagtaatgacaattgctctgtatagatttgttttcactatggttctagggttttatgaattaaaatattgtaaaaaaataatactttcactctgtattgttgtaaaaaaaaataatgttttccgcagcaacaacatcaaaaaaaaaatatagtacaaacaacgaaaaaaaaacactctgtatttttcttaaataaaatattaaaatccgtaaaaaaagtaaaaaaaaataaataaacaacaactgtaaatccgtaaaattgtaagaattttatcatttttgtatattatgacataattcccatcataaatcaaatattttgggaaatttacaaaaat

SEQ ID NO: 226097 - DNA, 2212 bp, Cannabis indica
tctctctctctctctcttgtacatgcccatttgggatgtctctctcacacgccaacacccaaggctagccaacaccttaggctggccaacaccctaggttattcaacgcttgagatctgcctactgattcatactttgtaatctgaagggtgctatagccaatcccacctataacatgggtaccgaacctctataaaaaatctttctgtttattgttttttcattatgtttatgtaacatgtagcaagcatcatatctatacgacccatctgtcagttgatcattttttgaggtcaacaatgcataacactattttctttcacacgcccagtacgatgtcataccatttctttggctatatgtcttgacctatataatattttcaatcgaggagtcaacaaaaagtaacgcatcaccttatgtaccacttttttcccctttcgttctcattaatcgatctactggtctagcacacccaatcgaattctttcaatgcatgctcattataaaataagcaacaattattcttacacacatgaattgattcgtaccctaggcctaatttacctagtttcttgtttgcctcatagtgtgttgcaagaatttcgttatacttggaaaatgccaacgtcaacaatttcaaaaattcatcaaaaatataatttggtattttctccaaacttttcaagtgcattaacttttcaatacagttgagggaggatatccaatcgcaataggggtacaactctgcctcaatccctttaaacatatcatcataatattgacccctttgaatgccatcgtcggtggctctttcctcatcgtttataagatggaagaaatcttaaattatatcaaccatctcatcgacatcaacattgttattcgccccgactggttcatccaactccccatggtaaatacacctctcataactgcatttaattttttttgtaaagatatgagtctgcataatgttcaaaagacaaagttttgtattcttacatttaacacaaggacaaaaaattctttcgtcacaatttttgtgattagacgcaagtgccataaagatttgaagaccttcccagtaacttggatccttacgatttcgcatcgtcacccaagtcgtatcgattgtcatctactaaaagtttacaataaataattataatcaaatttgtttgtattacaataaattttatgatttatgtacaagttgaactaatggtgcttttatttcattataagaattattttttaacttttattttaaatagtattttgataattactaaaaaaaaacattaaaataagtaaacttataatatatatctttcttttaataaaaattagatgaaacttagatattaaataaattagaaaaaattattaaattaaaatctaattttaaataatttttttaagaaaacaaattaatttttattgttaaattatttagttttaaaattaaatgaattgaattttaatatttttataataagacttagatattacataaattacaaaaaaaaatttattaaattaaaatctaactatttaatatttttttttaaaaaaacaaaattaaactttttttttctaattaagttacttagttttaaaaataaatgcactatattttaatatctttgtaataatacttagatattaaattttaagaaaaaattaaattaaaaatctaattatataattatttttttaaaaaaaaattaaacttttcttaattaaattacttagttttgaaattaaatgtaccaaattttaaaatatttgtaaatagatattaaattatttaaattattattattattttatcacatattaattaattgttttattttttattaataattatttctctattcaattattaattatttatttttaattgatattatgtttctttattaatcacctaattatttattattattttcttaaaaaaataaaaaatattttcttagttaaattatttaaatttaaaattaatttcatgcaatttttaaataattaattatttaaataattatatattttaatattttatacttcaataatttcttataaatttaccaacttattataaattataaaattaacataattttttttttttaattatctcaaaattctactaatattttggcgacaaaacaactactttttaacctatcaattttttttttttttt

SEQ ID NO: 226098 - DNA, 1777 bp, Cannabis indica
aaaatacatgtggtaaaaatattaaaactcgcccttttaaagataaggacgagctatgaataataactactaattgataatattggtgagatgaacgatcaacttagaagatttatctcgagaaatacagaagtacaatacttggaaaaaggtagataatgaattatttacagagcttgcagctcattgacttacctactcgcgagtatgctaagagactaagggttacatttccagcatgattcatctcagaattgtcatactgtgatggtgttttgtgtttgcttcacccaacacttattgaatggcgcaagaagtattacttaaagtatacttagacattgacaaccctcttcagaataaagtatcttgaaaaagattttttgtattacaaaatttcaaaaaaaaaaaaattgtataagagttttcccatattaacaagttcaattaatatactatcataaaatttaaaatagtttaatttattaaaattaatctaaaaattaaaaggaacattataaaaagtgaatcttgtgagatcctgaactaatagtgcatcaaaattgagcatgtcatcgtcggagttgtgggaaccaaagaaataattgtcccgttgaactatttactttgtcaaaatatatatactagtcaaatatatatcaattataagcatccaataacaagcttctctatcgtgttgttgtctccctatcgaccaaacgacaactcgcccttaagggaaatacctgctttacattagcctccacttttactccaacagaaatggttaaattcagcttgtgtttgagaagaatggagacaagtcaagtcctacttctcatgaggatggacaacatcatgaagttttttcaatctaatgcgaatgcttaagtggttcatttttatcttatctttttgcttattatctatgttttattgaactatgataactttgtttatttgttcttgttatcttcggctccttgatagataaaaaaaagggagtaatatttattttttagattgttaattttaactctagacctttattttaggaagacttgttttatttatggttcgtgaacttttttgtttaaaaagttatatgttttatgtgtttgtataatttcatgcaaggggagtattttctactctctattgtttgtttctaacacttcatgcatggttttttttttttttcttgtaattaaattattttctcaatcaaagtaccaaagaggaagatatctttaatttgacaaaaatattttataatttgaatattaattttagctgaggtgtttatttggttttcatttttttattgattgaattatataaggaagaaaatatgactagcttttttatttatgaaaagtaagacataaagggtaagtttaatgactcatctaatttttttctatcaagttgtgtatatctgatcccttgtgagttttctaaaatatttgatcatatttcttgtgaaaaaaactgaagcaagacttttcttttatataaaaggaaaatcgcacttagtgttcacgattctgtgggtacggaacaagaaatatatgagctgattgaagaattattttaggaaagttttcaagtgagttttggtcttgtttagaccatgtatgagctgtttataaggtatatattgattataaattgcaccttaaagcagctaggtcgtgtatctcttttatacactttgaattgtattcatatctttagaaaagagcgtctttgttttgtttgtgtgtgtgtgtgtgtg

SEQ ID NO: 226099 - DNA, 1360 bp, Cannabis indica
tctctctctctctcttgcttcagctcaaccaaaattaggggagaacttagctttctttcatcaattctgcagtttttagcaagattccaagtagtgaaaacctaaggtaacaaccctaatacttttcccttttgttttggtagtttctctttggttcaaaccctagctgttcttggactgtgttctgagttaattttgatgtttcataagctcttttgaagttatttgattggttaattcttgagttgggcaagtttgagttcaagaactcaaactttgcccattaatggtggattgtgtatttttgtgtgatacttggttttaccacttggaaatggttcataatgatgattttacatattctagagcttatggtaaagtttggggtagttttgagttgaattggagactctttgtttttctacagtaaaaaatggtagaccgtttctataccatttttactggtgcaaacccagaaaaacagcctgccattttcaggcagtttccctattttgttgattttctcgtgtttcctcaataattaaggctttgctatgctatttatcgatagagaaacttttaatttcaagtttagaccccaaaaaggttttagaaagttgtttaccgatttacgtgattgtggcatagggccttcattcagcacgtaattttccattcaagttaaccagcacacttgaatttggaaatgagataagactagcatagaatgtatatgtatatgtgtatgtattttatatgcatgctattatatgattcatacgctaccaacactagtacggtagcggtatggagtgcatgtggtgtagcatatgatgtttaagagtacattctggtgttactaacactagtacagttaggtacgtggtgcatgtggtacaacactcagtggtactcagagtacagttcaaaccctaccaaccctagtacagtagcattacgtagtgcatgtagtatagagatcgtacctttgttaagaacgttcttaatcatcttgcaagtcctgtggataggtgtatgggcgcctaaatgcaactcggtaatatattttatgttatatatttttcttactgagtatgttgactcacagttattgcttgcatgtgtaggtaaataaaaggctaaggctaagcaacaatgagtccggagctcgaagatgattatacatgtcaagatggtacgacctggagatttcagtctcgggacgacttggtcttattggagtcgttgtgcgacatatttataaagttcattttagttgtataaatgaatcccaacccttttgtataaatatatattttttattataaaagtttaatgttaattataagttaaatttatc

SEQ ID NO: 226100 - DNA, 1818 bp, Cannabis indica
aatcatagtgtggaagattgtgaagaatttcatcacctaagaagatctaggttcagatcttggtaatactccgcgatagaaaggaacaagggttagagatatgaacggaatgatccattatattatgttgccatcaatgtaagattttcttcaattttatatgtgtttattttattgttttagaaaattcatattgaggatgttagattatagattataattaacatacatgttaataaatctagatcttggtaaaataagatccaatagtatcaagatttgaaaccctattattgttggtggtgcgatataaagagggatgtggtagattatgtgtcaaaatgttttacttttcaacaaatcaagactgatcaatagaaatgggcagggttactatagcctcgaacacttcccgagtggaaatgggaagatattgccatagattttgtggtcagattgcctaggaccactgaaatgtataattcagtttgagtaactgtggatcgtttcacaaacttagcataatttttgccagtgaaaaccacatttacagtggattagaatattgagttgtatgttaaggagatagtgcatctccatggagctacgaaatccatagtcttacatagagattcgaaatttacttccaaattttggcagagtctccagaaggacatggatacaaagttgaagtttagtatatcttttcaaccctagacagatggtcagtccgaaaggaaaattcaaattctagaggacatgttacaagcgtgagtgttaaatttttaaggttcgtacctaccattgatagaatattcttataacaacacctattagagtacaatagggatggctccttatgagttgttgtatgataggaagtgctaatattcgattcactgggataaaaccagagaaagaaagtatttgggtcctgagttagttcaaaagaccaatgatgccaaaaagatcaaggcacggatgtttacttccaaaagtaggcaaaagagttatgctgttcctaagcgccgagacatagagtttttgagaggagaaagtgtcttcctatggatttcaccaatgaagggtgtaaaatgcttcaaaaaggggggcaagttaagtctcaggttcatagggccatttaatatactcgagaaggttggacaagtagcgtatctgctagctttacctcctgcattttcgatagttcacaatttttttcatgtgtcaatgctgaggaagtatgtgtctgattcaactcatgtcttgagttatgatgccctagagttggcaccagatttatcctatgatgaacaaccagttcagatcctcaataagaaggataaagttccacagaacaatactatatccttagtcaaggtactctggaagaacaccaacgtagaagaggctaccctgagagttagagtctaaaatgaggactcaatattcagagtcattcaggttagattttgggaacaaaatccttctaacgagtggataattgtaaggattgttatacttagatatggaattagtacgacacttagaactaattactctaattatgtgattatttatgtattttatgctttatagaacctattttcatgaaaatatgtgttatgattattatttctcaattctagagattttattaaattataggtgtgatatgaatgctatatgtgaattttcatatttccacatttttatgctcggtaatactgaaaatgggtctgattgtaattttagtcacatggattcaaatttgtatcaattattttacaagacaatattattggacatcttagaata

SEQ ID NO: 226101 - DNA, 3272 bp, Cannabis indica
ttcagcaaaggctacaataagtcctaacatcaatatagttgttaaagaccctatccgtacagacgtaccacacaaggactttgggggaaaatgttatcccaatttttgtcctcatgaagtggcatgcttacattgacaaacgaatatgccgacacacaaatgagcatcaattgatagaccagctccctcttaggagttggctagccaaccttaggattgcaccataattggttagcctagcctccagaggtccaaggcaagccaagaagtgcactgcaggctttcctggacatttctacacgtgaataacaggctatgggctacgaattaggccctaaaagcccaacaaaaatggctaaataatatatagaatcaaaggcaataaggttttttattaatatctaacaaattatgcaaaagttaacggatttgaattgtaaacatagggtttgaggcttcctatataaatgccttaaccttaagttaaaaacctaagttgcctctaagccagaagcctgctccaaaactttaagtgtctgataaactctctctcttcctcacttcttctctcttacatgcctaccctagcacatctcaacacttgagttttgccagtattgaatagtaccttgtaatcctaagggtactatagcagattctacctatagcaatctggatagtaattccctttgtataaatacaactaaaaggggagtagatcattacccgttatcacaagggcctgaacacctgtaacaaatcttgttttttattgcttttcattcttatttgtgcaaatgatgcagcgattacagctagcctggaaattgtgtacttcacctaacagagagtctagctgatcaagttagaggggttcaatatctgggaaaagctctacgcagatgttgagtagtcgttggatcaaacattctaactcctcttgcatgcaatgaagcaagcaaaagaagagaaaagttatcgagaaaaatacgaagtttagtgtgggaaaagtgaaaagaacaccattgagaccagtttatatttgaaaaataaaaccggcctttgcaggatcaatggttaagattttgtagtagatctaacaactagggagacaagaggtctagcatgattagcccagggcccaccagaccattaagacgagtctcttcacatgatttaactgtcagttgcactccgcctttttggatggatatgcctcggcacgcgccaaagggaccaactgagatctttatggtgttgcatggttgccacgcaagtagatgctgatgtcaaatctacccttagcagagtagtgctcatatagaagatgtgtccttgattttgatgttcaacacgagttaacagtcagtattaggaaaatatgacaagctcctgtaacttagagagtcccaaaagcttggggggtaaatgttatctgtgttttcaggcatgattaagggacctggtgtattagatgaatggattaatcgaaatatctcataaggtctcccagagagaacttcttgacaatcttggaaatgtgcaataaacacttgacgagacgagccatctgcccatatgtaacatctttcgaaccttgagaatggttgaggtagagtggctcccgaataaatatcccttaggtgatggtattgggatgtggtactagtctcatggtcagtgacgacgtcgacatcatataaaaattgctctataggtagttacacctttttctgacacaagatcagatcttgtcctccatgccatgccatggtagtgcatgtactcaattctggacgtgccttttgcccaacgaccttgttagagagtattttacaaaggagaaacatttacacgacacgtgtcctagtttgtacaaaatctctcactacagctatatgccacacaatgaagaaggttcttaacaaccaatggttagatcgtcatattgtggtacccacccttgtagtgagtagagtaaaaaaccctaggatgataaagggtattccctcatccccatgtgtggttagaaatacccccatttttaatgagcgagaggttaacaatttttacttagagaaactctactgaaattcttagatagctttcttctaaagagaaacaaaaggagtacaaagattattgttgtagacacttgtaatactcaaacattcaccctaaaaggctaatattactgactcgtgaactaaggatcattaacgcttgaaccatgcaataaatatgcttgtttgtttttaatatcttttattttcttaagctcttattactttgtttttgaaaatatcggtaaacaccattcacaagaggtatttctgtgcagggcggggacacgtggagccgccgcattccatgacctttctcagtgttgggagcaggagccaagcgccttgcagaggctaggagttttctcgaagtgcgcttatgcaggtcacaaaataatttagaatgagttgtatacctaatcagtgtcacgagagagctctgtttgtacatgtctaattatagaggcgacagtcatgctttttttggtaggatgccaggttttatcccccatgttaagccatagtacaggacatgcgtgtcattataactgcctaaatgatccaacgaccatttataagggcaattcaaaaagggaaggccctagagcgatatgtatgagatgttcagacagtacgagctgacacttctatacaccatttgatggatcagccacctaccaaataaacagtcaaatctgttatagtaagatcagcccaacaagcccgtgaaagaagatatcgcatataactacccctatatttcatgagataggggaaactcttggaagtctaaaaaaaccattgctcacttactaaaactctactaaaattcctactgagcttcattttcttcaagttgaacgagaggaatacagagttcaagtccataatgtaactacttgtaatattcattacttaccaataagaataataaaatagagtcgtggacttaggatagttaacgcctgcacgatgtaaaaatccttaagtttattattcattatcttacttctgaggaaagacttaagcagacactgtgtttgccatcacaaatatcaagtcgtaaaaaggagaactcgtctaagtaaaggagaaaagtcacagcttgactaaccatcgagattcgaccagaagtcgaaggctcgcacaccaagagcatcgtcaagaatgaagacctatgtccctgccttggcggggagagtggagaag

SEQ ID NO: 226102 - DNA, 3304 bp, Cannabis indica
gagagagagagagagtgagctagggttttagacgtagcgcttcaaagcttagggcttagagcattctagacttatggtgttctcaacttagagaaattaggtttagtttagtgctttttgtatatgagaacttacaagagatgatagtttaatatcccttataaataggagatatcacctatttgtcacataataaaataataaataatgaatatgttaattgatccccaagaataggtaaataattgaactttatccctatttttgtgggttattgaagcccaattcgtgacttgaagtgttgttcaggctaaacgctgcaaaggcacaaaaagtgcctgctaaaagatgagctggctggcccacccttatcttgtagggtttggccaacctatgcactcctatggccggccaagtattgctcttgcaaccctaggatttgcctgccagcttttcctcgtgccttccagctttggtaggtgttgaccagccttggtatgtgttggccagaattagcatgtgttggtcaaccttaccatgtgttgctcagccttagcatgtgttggccagcctttgtacaactttccttgcaaaggtcaggcttccctagtcgaataggctatttttggtctgacagtcaccctttggccgaccagcttgtgctcaaaccctgggtggccatacaagcttcgcctagctagcctatgtactccccttggccagccaaacatggttgtgcaacttcttgacgacttacttaactctttttgcttgttgctcgacggttttgtcatgccttgtatggagattttgtcctgctattgacaaggctatattccacatgtccttaatcttgacttacgtgatcatgcatgtcaggtggataaaatttgggataataatcatcttcaaatataggagcatctagatctatgtctttcccaagttaattgttgtgatggctggttgcttcattttgatcttctgtatcctctaccatggcattaggatcagtgaagtgaagacttgacatgttttgggtgagtaccatgattactgagcgtaatctttagacggtatcactgcttccctcagttcttaatgaaagcaccaaaatatttactgagattttcaaaaaatcaattatgataaattaaagctacagaaataaataattcaaaaaaaaaagaagactaagaacaacacaaactttttacgtggttggggggttaacgagtcttagtccacgagtcgatattattatgtatctattgttaggaaagcctttaaaaatacaatgagcataagttctctatttttgcctaagcaaatattgcaagacagttcaacccttaatccaagggatttgttggatatttacagtgtccaaataattatacttagttttcattttcccctttaatggggagtttacatgaaaacacataaattgggttgttctcgtgaagtccagcccatgaaggagtcgatctgatgactaggaagataggatacggttaacttttcaataccgtgtcctataattgtgggtaattaattatgaattaattgcttgatctttattttaggtagttttcctttttagattgatatgatcttctgtcgagatttaaggagcatttagttccttattctgtgcgcttgaataaaaagggaaactgtacttgtcttccaggaacatgttgtttggctctccagcaccacgatactggacttgcttccagatacggaccgtcgttggccgaagctcatctggtcacagagctaaggtgccttcctgaaaggtcttatatgacttgggcttggcccaaattatcttctttggacccactggtgggtttctaatactgacctgaaatccacgtgtcccttcccgaaaacacggataacatattctattaatgaatctagaatggttagggtaggagacctcttcctcaagtacgaaagcctttgaattatcaaaaaagagatcccaagagctcaggagtaagtaccacacgcccaggttgaaaaatggcctggtgtgttgggttctgcttatccaatttttatgtcattttgaccgtccgtctagtttttcacaatgacaaagatccatgaaattagggaagtcaaattcacaactttgcatttctcattttttgactaactcgaatatgaagagtttcgagtctctcatttttgttaaaccgcaacatctcagagaaatagtagccagttttgccaaaacacacaacaacttaaggcatgtcaaaatatcacttagacaccttaaagtacatcccttggacacttttgcacttagccaacgtctaggttgacgtcatatgtcaacctgggggctgggtcatgaatttcctttagtaaaacaatcataactcactcaatattgatttgattgatgcaattcaacttgcattttgaagctatttaatgctctatcaagtcatgtcttacactttaatcttaattctaaagctatcgtcatcaaatttcacccttaagggagtgacaaaaataagctctaggttacccgcagcgggaccctccgggcaccgaaaaatggctatcaccaccaagagctaatttttgccgttatattatcatctacggtcagaattatccaatttctatatttttttcttttttgtgagcctccttcacctataaaagaagagctccataagctcatttttgggaagcttagaaaaataaccacaagattagagcttctctctctagaaattgaaggttctgacacttagtctttttctttaattaccatctcgtgagaaataaaaactcaaagtagacgtagctccattaatatagcgatacaggaagtgaactactataaatttgttgtgtctctcttataattatttaactactttttcattctcgctaatctagcgagcgtgtgtggcttagaagtctagtccagctttttgaatcaacaccattgtaatacttcaaggctatccaacccaatacaactgactcgtggactaggattcattaacacccgaatcacgtaaaaaaatgtatctccattttctctgtttaattctttttcataatttttattttattatattgtgtacggaaatctcaataaacactaagaaatcctaaactatatgtgttatttgatcgttttatgtatttcatattttagggtgttatattattatttgaataatcaacatacatgttaataaattaggatcctagtaaaataagttctaccaggcaacccacgtgaaatttttgtcttaaa

SEQ ID NO: 226103 - DNA, 2101 bp, Cannabis indica
gctctatgataaatgtccaacaccctcttaatagcaaggcacgaactctcatcagctttgcaaaaaagaagactatcatcggcgaaaagtaaatgagaaatggtaggtgcatgccgtgtgagcttgaaaccatgaaattaccaagttcttcctcatgatgaaggagccgagatagaccttctgcgcaaattaagaatagatacggtgacaaaggacaaccttgtctcaagcctcttgttggaatcaagtgccccatgacttcaccattgacaagaaaagagaaactgtttgtagaaagacagcccattataagtctaacccaaccgctagcaaaacccatttgtagcattaccgcttcaaggaaacgccattctactctatcaaaagccttactcatgtccagcttaagagatgcaatgccttgacgcccagaagttttgtttttaatcgcatgaaccaattcaaatgcaaccaaaatgttatcagtaatcaatcgattaggcaaaaaggcactttgtgtagcagaaatgaccatgggaagaatctccttgaatctagccacaagcattttggtaagcaacttggagatgacattgcataagcttataggccgaaattcagtgatgcgttgaggccgtttaacttttggaatgagggtgatgattgtgcgattgaaacttgatggatcagccccatcgttaaggatgctcaacacggctgtagtaacaaggtctccaacaatggcccagttctgttggtaaaacatggcggacattccgtcttgtcctggacttttatccggtcccatagacttaagagtagttactacttcagcagcagtaaacggagcaagaagttattcattatgagcatcagaaaccaatttgggaatgcactcaagtgtagtggcaagggcagtgttgtctatgttcccagcttgaaaaatttcagcaaaataatcttgaataatcagagaaatctcagcattggacctcaccttatcacccaaatcattaaggaggaatttaatgtggttgtttgatttcctggcactagcttttgcataaaaaaatttagtaaacagatcaccactagctagcccatcaacccgagaacgctgctgccagtatgtttcttcttgttccaacaactcatccaaaattgtttcagcttgttttagttcatcaaaatggctgcttgtctgtaccatagagttattaagcttttccacctcagcttggccttctttgattttttttttcatgccaccatacttgcaatcatgccaagcttggagtctttcagcacaagaagataaattatgtaccacagtagtaataggatcaagatggagtgaattggaccaatttacttcgataatttctttgcaatcaggatcagccagccataatttttcgaaacgaaactgactcttctttctaggacaacttggctcggcagtgaggagatggaaagttgcaaaaattgcacgatggtctgactgaaagtaatctaggtgactaacttgcggtgtacagaaagagctctcccaaagatgattaacaaaacaccaatcaattcgctctttaatagtgttcaaagcagtgcggcttttggaccaagtgaaaggatcaccttcaaatggagattcatgtaatcggcatctgtccacagcacttcgaaatgcctccatttggctttcatttcttaaggctccaccaggcttattggaattggataaactctcattgaagtcgccaataactaaccatggtaatagaggagcaacatcagaaagatgttggagaagggtccatgaggctgatctgttgcaagcttctggtgcaccatagaagcaggtgaaatgaaaagtagggttgtcttcaaacttcaaataacaatcaaaaaaagtagagcccatatgtaataaagaaatgtccacacactctttccaaaggagcagtataccaccactaaggccaaggcgaggtgattccaaaccatgatgaaagtgcaaagattgtctaatccgagtaatagagttttccggtagtttagtttccattagaaacaaaacttggggcgattgttgttgaacaag

SEQ ID NO: 226104 - DNA, 1484 bp, Cannabis indica
aaggtattaatcatatgcggtctttacagcaccaatctagacactcctttaaggtgtttaatgctgttctattttttacccaagtatagctatcgccttgaaaaggtggatcaaaaagatgacaatgatcaagagcacttcgaaaagcactcatctgtgtttcacttcgcaaggacccccctgatttattctaatttgacaatatctccttgaagtctctaatgattaaccatggctgcaaaggagccacatctgctagtctacggagaagtatccatgaatcaaatctattttgtgcagcagaagcaccgtagaaagttgtaaaatggaattgtgggccaccagttgcagtcataaacattcaaaaaatcatgagccaaaggtattgacgttaacatcaatgttttccttccacaacaacataagacctccgcttagtcgtatccgtggtgcttccataccatgaatgaattttaaagattgtcgtatgcattttaatgaattgctactgagtcaagtctccataagaaagagaacatgaggagattgctactgaacaagcaatcgaagatgtcttaacgctctcgggttccccaatccccgcacattccaatttaagattttcataatcccttgcgggatcgcgaagcaatatccgcagagtcgtcagaatcaccatttgaatccttggaaaccgaggaaacattctggcttgagcagtctccttttgacgaggaaggaaagagagtattgctattttggttgcaacatctcttaagcatttctctcatacaaggagcattagtgtgcctcttaaaaattctgttgaggttaaggttttctttattaatttctggtttgttataagttgtggaagtgagtgcagagtggtcattagagatggtattatagaggaagaagcatgcaacaagctgttgctggtggtgatattaggcagtgcatttggtggataggttgcaaagggaatttgtggatggttagcagagccaatgtcgggggtataaatgtggtttaagttggtgaggggtgtaaggttgttaggaagtggaatcatgccgcttgtaatgaagggtatggtaggagatgtagagtgttcagtgatcaacatgtttgatgcagcagttgttatggaggacagttggttatgggggatgttgtatttgattgaagtggcaaggtcatagattgatgttgattctgttgaaaggaaacagaggcattgatatcattcatagccatgtttgatgcagcagcagatgattctccttgaaaaataatctttggttgaggctgtgatcttacacccagttttgggattgtagatacgagagatttttgagccaggcatgtcaagagtagccatgcattacctttggagaaatcagtccggtacttgtcatagccattagttggtaactttgcacctttcatccaaggaccatacaagagatcatcatcattac

SEQ ID NO: 226105 - DNA, 1428 bp, Cannabis indica
tagggcacaaaacccaacagacgacctagaaaacaaccagcaggatggggcaactgcctccatcaccccggaggaagataatggagcgcaaaggctgaaggctctgtctctgatagaaccaccgcatccactgaggccgagagacccaagaacctcacaccatcagtcggggaaggaaaagcgagcctactcagtgagttatagctcacgaacctgactacagaatgaggagatgaacgagctgaggactaccattagaccatattctacatttattggtagcatcgggctactatcagactttcgtcttcaacctttactcatttaacaataggaagacatcggaccaccatatgaccatcatcgggctcgacaaaaacactagttgtcttaccaaaactcaaatccgaccatttttgatccaatctaacattaacttacaaataacagacgttaatcatacaatttattcctaaatcaataagtatataaataaaattacacattttaatcctcaatcacatagaatacaataaaattaaatagaaaacttatattcatggtgtggtagtcgtggttcgaagatcctgagtcttgggttggtgatcttcgattgtaggcacggtagttggcagttgtgggttgctagggtcttcgtatgtgtgagaagaagagagcgagagagataaagagaatagagaaagagagagacaggaaaagtgagttatgagaaagtacttttgggtttaataaaaaaataattgatctaattaattttgatatacttagatttagtgaaccaatttttttttccgaatattaattcaaatattttttttttacatacatataagatttttccacatcatattaccttcaattttatttatttatgttattaatttttttttggagtaggaattggcagtgtgagctaggggtgtacatcgatcaggttatagtgtatttttaccaacttaatataaatgtcaggttgcaaatatctaattgtaacccgtccaatgaaaaaataaaaaaagtataacccgcctaatgatttttggtcggtttaacccgtttaaaccgatctttatttttatttttttcatcgttgttagtttttggtattcaaataattaatttgaaaaaaaataaacgtatagtatatgtcattcaaaattaaaatagttatagtttaaattaatgttaaaaaataaatatgaattgaataaacattaagtattacacaataattttcaaaaaatagaataaaaaaaatgtataaattctaaaatttcaacttcaatatttaaatacaatcaaaattatcaattataaattctaaatttcaaaataaacactataaaatacaaactttcaatatgaatagtttaactattaaatctaatttatatattatgttataaa

SEQ ID NO: 226106 - DNA, 1623 bp, Cannabis indica
tattaaaatagttgagaggcatctctttcactttaccatcctttatagttgtacctcatccacttccaattttaaaacactttcgcggcattttaaacacattatcttaatttctctatgtttatctgttagtttttcatgatggtccttactagttttttaatactttaagtatgtttcacttactctaatagatagccatcactccacaaaatcaaactacccacctacctaacttttaccaataatttacccaaaaaataaaaaacaataataatgcgaaaataggaacagtgtttagctctcagaacccaacataagaaatttatgtgcgagccagccaattcagggtagactttagcaccatatcagatggggtgaaatgaaacacaaaatttaaatcaggatgtttattaaacaagttaaaacattgaaagggtattcttatccatcaaattccgaaaccccgtctgtattattgaatagaaaagtaaattaaaaaatccgtatcatcttcagaaatactccacaacagaaaataaataaataaaaagatgaaatacaagtaaagacagctacctgaattgaactccagtcttaattccaagcgacatgtctatgctcccaacggcttcgagaatggcaaagtactcggccgggtcttcgagcaaggcgcggaatggacgaacgccggcccccaggaccagcccacgaagctgcatcatgcagagctcgcggtgatcgtccttggagatctcaatcggggtctggagctccggcttggagttgaagtagtcgaaaactcgctcctgaacctctcggtgctttcctctcatgtaattcgacagattttccgagtccacgttaatcttcggcgctcctttggagcacttcagcatctcaagcaggtcttcgttgtcggcaccggaaaagggacgcgatacggggctcaggtgaagcgagagccgttcgattcgcctcgccatgggctgagattcattctcggccgtcggatcttgatcggggctttccatttttttttcttttaattatttgacgctgcaagagtgatcaaatggaaaatggaagaggtggggggaagaattgaataaggtgactgttgtgaagtttacttatacggaactggtgatgacgtggctatctaactggttatctacgtggcggatatttattggtggtgaatttggtagttagtttggcgcgcattccaatatggatgggattgacgataaattcgttcgggtttggaagcaaactcagatatgttagctctcttctgacgaaatttttgtttgttactagttatccaaacttgctctcaacacttttgttatggtagagttttaaattaaagtgtgaaacgagggatagaataaaaataagaataaaatggaataaaatttaaaatgtataaaaaattattaaattttatcttatattacattagaatgagagttcctttcgtttcaaaagggaatagtcattccattaaaatggtaaaaatgacattcctttataatgatattctaatactttaaaatacaaccaaataaaggaatgaaaaaaaaaaaaaaaattctttccattttattccatttcatt

SEQ ID NO: 226107 - DNA, 2129 bp, Cannabis indica
aagtgtaaaaatgaaaaagcccctttaatataatagcttttagggagtatcgtgagtcaatcgcaacacaacatgcatgtcgagaagatactagacaccactagtgcttaatagcaatgctctttttttaatcattatatcgactttaataataaaacactgcacgcacagacaaaattgatccataagacaaaatgtattttttttaattggtgcacgttgactgaggtggatcacgaattctttggattaaacttacttaatttgtcaaaataagtagattcatcttttcactcattagatgaatttggagaaagttgttgttataaatagaagcatctctactctctcaaataatctctaatgctcatactttcagagtcaaatttagagagagatagtctaagaccacagtgagtatgtgtggagggatgtaatgagagtatcactcttgaagtaattttcctcattgtgagacatttctttgtaattattcaatgtgttgagttataatcttggacatatctaattgtttactattgactattcaatcaataaagattcatgattcattcatttttgagctaagtttacttttgtctaatttcatctaagttctagtttttaattttatgattggttttagtttgaattgtattttcttgaatactgttgttgctgtaacaatcaggttttgagggtgatcattcaccacatgaatttttagaaagcaagggttaaaaatcttctaatttcaaattcggaccacttgcatgttgtcctactgacatggagaatgaggaggttaagcctcctttcaggttcattgatgctggcctcagacccttcatgcaagaaagtgattgaagacgcttgggcccttactgtaaatggtgttagaagttttttttttaaactgtaaacttaaaaatacgagtaattccctgaaggtctagaacatggaagtttttttagtgtttgccatcataaaaaataagatgttggagaaagttttagtcgagattagaaatcgcccaatctctcaaaagagtctgaaattggaagaagttgttcttttagagattgataaggtggaaatctagacatgataaaatttataagcaataaaaatcttgtgagaattggctcaaaaataggaacaaaaactccaaatttttccatgcctcactcacaatccgtagaaaaagaaaccatatatgggcgatctttgaggatgaaattttgtggattgagggcagggaaaatattggagtttttttttcacaaataagtttggggacttaatttcttcttcacatcctcggagtttggagatttatttaactagataaaagagctagtttaagaggttgagaatagcttgttgatggccatgtattgtattaattactatgagaaaagtgtttagtataatgtatgttgtataatttaatacataacaaatggtgcatattagcttatattataatatttacaaaggatctgggataaaccccaatcttcgacccggatctaggaacccaaactgagacctagacccgcaacccaaactcgtacccaaactcgtaccataactgaagacccaaacctgggacccaaacccaaactcggacctagcaccctggacccaaactcagacctgaaccaagattaaggacccgaactcgaactcagaccccaaacctaaccaaagaccctgacccggaaccaggacctaacctagacctggactagacttgagacccggacctggactgggttgcaggacccgggacctggacccaagacccagaccttggacctgggacctaggcccagactcgagacttgcgacccagacccaaacttgggacctagaccaagaccgagacccaagcctggacccaaacccaaaacacaggactcaaacatagatgctggactggacctagacctgatgcgtagtcgatgttggggttgagtttattgaaaatatattataaagttatacaacttatttatatcatctgactagacaaggcacgttatcgtgttttctaattaccgtgcatgcctttgctaatcaaaaggtttattgaaaaatgtggatagttaaaattttctaaata

SEQ ID NO: 226108 - DNA, 2230 bp, Cannabis indica
atcatatatatatatatatatatatatatactagtgaaacactatcatgaaataaaaaaatatatcgcttttagttacaacaaaacttattactaaaagtgtaatgatcgcataatttaaatatgaattagtgaggttatatttatatgtattaattttactattattattattagtattattattgatgattatatgagtattatgttaaatgcgaaatatactagttttgtaattctagctcggtagcgatagaaaatacaacagaggattattttaatcacatgggtaatacaaatttttttatgttagtaggttatagtgtgttaagttcaaggttcggttttgggcggggtaatggtgttggaccattttatttctaagccacttattgaattgaattgttgtgcaagggtagatgaatcattttaattattgaggtaggtgtttaattttgtgaagggcaggcccttagctaatttgacaaaataaggatagtagtattaattttatattagttgaaaaatggaggaatagcctagaacaatctctcttttcctttctcttcattcgaccctactcaaaactgagagaaaccaggggcaagcttcaatttttttgtgttttagcttggatttgaggtgtagcaagcaaaggtaactctcgataaaccctactcttttaattgtgagtgtataggtttaggggattttggttttgtttagataggtttcggataggattgtgttctgtaagttttaattgatgatttatgtttaattggattgttgttgatggttaattttgaggttgaacaagtttgagtttatcgaagtcaaacttgactcaataatggcatgttgagttgtggtatgtttctcttgttgttcttaagtggaaattattttagaatatgtaaacaggtatcctggaaggtatgtttggatttgggaaagttttggccaagcaagggaattttcgggatttgctagtgcaaaccggtcgaccgattttacaagacttgtgaagccggtcaaccagtttataggtaggattcccgaaaatgcatttttctagtttgtaccatttttcagaacctagtttggtgttttctctaatagttagtgcattattaggttgaatatcatcaagattacccttggttataagtttagggggtttcgaaaaagtttactcgagttatttacccaattatgtaatgtgacttaggaccttcgtttagctcgagaatttttcattcaagtcgaccaacgtgcttgaatctggaagtagggtaagattagcataaattatatatatgttaatgaatgcatgtcattagttatttacactacgaacaccgaaaaagatgtagttttaagggtgttagtacagtgtagggttttaagggaggttacggtgttaccaacacgagtaccaaagggtacgtagtgcttggagtataacacttaataattcccgaaagtacagtaatgcccctaccaacatgagtacggagttggtactctagtgcatgtagtacagtggttgaccctacccacacgagtacatagtcggtacttgataactctacggtatagagttattttttatgcttttaaactaaaattattgtgagaagagtagtaaaaatgtgtttgttgctgaaatttagtgagttttagtttcattttctatttaataagctaacttttaagtcttgtaaaaattgatattattaggtgtgtctttctaattaattgtgcttgtttgttgttaaaaaaggaagaattaaattgataggaaaaataaaaggaagaaggaagaagtgggaacaaaggctaaaattggggtagaatgctgaagcaatgctgaaacaaattcaacattctggcaatgacgtggaaacacgagatttagttgtccacataagcaggagtgtatttgtcactaaaaatgagaccaactggaagctttgtaaaggggggactaaacctagtggtccaaagtacaaaaatgattgggcttctaattttagggtgtgattttgtaccctagggacccaacaactaaaaaagggaagaaaagccaagtacacccatcattgttacgaattttatgatcactacgcaagtatacgcaatcaagtagtagctcacgcaagtgaggtcaaaccacagggaattggattaagtactactaaattatacttatgattctatttggtaaa

SEQ ID NO: 226109 - DNA, 1750 bp, Cannabis indica
tttttccaaaaaagaaaagaaaattaacattgttaagcaaaaatttcacaattagaatattacaaataaatgcaaaacacaatttcacataagagtttattaattttaagttcgacccagtcaaaattcaagattataagaataatccctcaattacaactcttttgtttaaagaaaacccctttgattccaatcacgatgatattaaactttgaaaacagctaaattctgtaaatttaattaaccgaactacctacataccttcttgtttcgatcaagccatttgtagttcgaaatgaggtattttagacagtgccaattctattttctcaatccatatccattaacctaatagtaatactaatcatttgctaataagtttcaactctaagaatgatcagacaactaagtagtcttacaaagcagaaaagcaatctctatttttccaaaagtaaaatcataattaggaaagatagttttgacattatattaattttcagctaaaactagtaattttagtacaaagatgaaaactttaaagaaaaccctaaaatgcaaaccaggaaaaaagaatacctgcttttgggggcgtagccatttccgaccagcccaatcccaatgaggtcggagctgagagcgtttacagaagagaacatcaggtgggaaaatgaatctaacaatataatcatcatcatttcggacatcaacgacgacaccagtccaccagatttcgtcgtggaatgcatcaacgacgtcgtttaggtgaaaagggtttttggtatcaggaagagaaggaggattgggtctgactaagaaggtatggacttgttcaacaagaaaggttccgtcttgggcaaggatgtgtttgtattggacggtcatctttgagtttgagcggcgattggttttcttcttggtgggtagtgatggtggttggagaacggtggcggggaaccaggcgttgcgcaagccatcttcgagactggaaacctcaactgttgaaccttttttgaaaggagaacgttcttccatttatgaaactcagtttcaactcaagaagaagaagaagaagactacttgagataaaatattataggaaagttataaaatacactcttttgaaatgagtctaatgcaattttaacaaaatttaacatgtgaaaaatagtgttaaaagagttttattgatgtcggatctaagaagatcgtaaatgagtaagataaacacgagcaataattaattaaaataaaatttgtaaaagtaaattcgagaaagatgttaatttcacatcgtttaaaaaaagttaagtgtgatgatgataatgtgtaagtatgagatttcaaagttcaagagagcttaaatatttattagtgtattgattatatttatcattcttatgtagattacagtgcttctatttccctcactctattctcgtgtcaggttgcaagttggcttccttcttcttgagtgggttaagctaaactttgatgttaaagtaagaatgaatagcatgtgtattatagttgtggctagaaaccaccttggagtggtttgcgagatgcatatagctagattagagttctctgatgctttttgtggtgaagcggctgcttgctgcttggtactggaagtggctaaagaggaaagctgtaagtttattattattgagagtgattataagatggttatcaattcactcaatgatttggaatttcgttgggatattgagaattacgctaatttttg

SEQ ID NO: 226110 - DNA, 3182 bp, Cannabis indica
tatattttttgtatttttattacaattgatgagttaaatcttaaaatatgtgtattttatagttttaattacttttatatcttttttcaataatagttacatacaatcatataaaaaataattataattattataatttaaatattgctattattttaatattagggtttataaaacactcaaaaaatatatgtaatcacagatctaatcatgtttctaaaagtgctttagtataaaaaaatcataaatcatagtttataaaatatttgctaaatcaaagaagaaaaatatgataatgagatgagtggaagcactaacctggagccattgttggagattgtacaaaaagttatgatctttcaagaatacactatttctctaaaatattttctctgataggcaaggagaatacaagaactcttagtatttcttggggactactatctatttataggctcataatagaatgagttttgggtatttataatttggctcctcaacaaactataaattaacttatgtctacacaatattttcatgataatttaatactcttttgatatccataacataattggtcacttatttttgtatcacactttataatagcatatacattatacatatgtgcccacaataagattttaatctaacatttaattgataaataaatatttatcattgttattattatcaaattattgaactttttaatgtgtcatgcttttgagttaatttattcgtacttatgtgtcatgctttcgaatttatcgtgtcgtataatactaagcccatattttttcgtaccatgtttaagcacaaatttttcgtatcgaattaggcttgtgtcgatttcgtgacgtgtcaaaaagtctgacttatatttacaacagtatgattaagtgattatggattgtacgagtacaaccatctttctgagttatcatgatgtgtcattaagggtgcgtctccacttttccagtgtgtttttacttttatgttaggtcttgggagccacattaattcattttgtccttattttgttgaagaagactactccatcaagtacttcgccttggtaactaattttctcaagggattagaaaaatgcttaaaaatacccttgattatattattattagtacaatgctcttcatgaagtacttggtttaaaactattgcctaattgatagaaaaactaattatgatatcaaagattttctttaaaaatttgaaatggcattggttacttgcttggaagtggatgagtgtgcaatggactcggagccaaacactttctccaatatcacactattattagaataaaaaaataagtcagtcagtaaataaaaattgttaataataatattggttgatgttattattaactatcaattacacctgtgttgtaattaatgacactaatggtgttgatttaaacaaacaactattaaactctaaaaagttcttttttttattgaatttgttttttttttataaactaagcatttcattaaaccaaaagaaatggagaaaaaaatacaaacacaaaactgtctagttcccagccaccaacagcacaaaatcagaagagaaaaaatcatgagctttagagtttgacagcctaggaaactaggaaattttacaagaattatagtctgataacaccttgaacaactgcaagaaaccagcagtagccttccaattcgggatcaagagtgaaattgtagcctccacagtcaccttacaattggagaaaatatgagcatcccaaccaacaattcgcgatgcatctagagatagcatgacagatagctagtgcctcaccatcgagaaaggaatcgatccctgaaccttaactgaaaaggctccaatgaaggacttctatttatccaaggaaacaatggccaagaaagccatcttatcctttacaaaagcatcaacaaaaatattctaatcagcctccaaaactacaaactctattgttggcctcataacactaagatgagcctcaatctccaaaccactcatacacggttcctacaaaaatcccaaagcatatttcatgatggagtcccagaggacacaattccatcttggaaagctttgttacgagcattccacagaacaaaacacagggaagcaggaaaatgagtaaaggactaataagaacgttggtgtatgaaatctggcactagaggattcagaatccaagagagaatatcccttaaggaggagaaggctaaggaatcactcgaataccccaacgacacctaaaccaacaacttcgcgccaaaggatagtgaaaaaaaaaagatgaacaagtgaatcctcatcattcaaacacaacgcacaaacacgcctattcccaaataaactcttgagtctcttaccacacaacaataaatcaaagccaatcttccacaaaaaaaagtttgattctttcatgaaaatggatcttccacagctgtttaaagagcccatcaatgccaccatctctaaatttggacagagatttataagccgctttaccgagaagcttccattagtagaatctttccaaataagaatatctttcgagcccccaggaagaaccttaaaatcacttaaagcttcaatgaatttcggacaaaaccaataggagatggcctcaaggtccaattggccatcatccctcataaggtggttaagacgaaattgagaaggccattgaatctttggattaaaggcagccaagtaagcatcccactccatccaaggaacccaaggagaactccaaatatccacactcgatatgctacccaccaaccaacaactctctcgacggataaaatccctagttttaaaaatgccttaggcacctcaagagacattattaggcaaaaggagttctaaaagttcccaccatgcttacaatacttagcacgaaagacttcgcaccatgaggaatcctccccttagctaaggcccaccctaatatggcaatcaaggttaaattcatgtcataaaacctcttaattaatgtccaagccaccacaagctttaggatgacaaatcgcgtcccaatgaattaaagcgagaaattgatctttgtcaacactctccacccaccaaaacttacggaccaatttatcctagctcaggttcactcctgttcagctttcgcctttcctttacctaca

SEQ ID NO: 226111 - DNA, 1527 bp, Cannabis indica
ttttaaaaaattatttgtttatttaccgacctcgattgtaagaagtttcaatcgattctaagtcagaagatcggaatcttaccacaccatttctcagtgttcatctcgtcgtcggaatctcacaagaaatttctaatgaacagtaaagtcaatttctgggctaccataatatcaaggaggattcagagattggaaaaaggaaatgcaatttctcaaattctagtctactagctctgaggattcagacaaggaatcaatggagaattctctcaagtttctcgttctttggcttccaatctcttcttgtgccatccacgttacttctgatggaaagggaatctcccgctagtctggggctgagggagagggagtcgtcggtggtgtcggagctgggggagaaagggagagggaactgtgcactttgagttacgtgggtcaatcaaataataatttagaagttctataggtgcaccccaatttcactaagttttgatcccctacagtaagccctaccacaaaaatctttcatttaacacctgtcactaattatattttcgaatattggacacactagtgtacctctaaaaggggtgtccattaaagaatttatctcaattatatatacaaaagattgataaattatacaaattacatttatttacacattaaaacaaattaacatataataaacaaatataacaataaaaaatactaactgtttgtggtggctttaatcaaaaactctagcaaatttcccccaataatgcttcttccaaagttcctcaaaaataaatatatttcattatattagataaatacatacacataatataaatattttttctataaatattttttctgtataaacaaaaatatagtatatatttaaaaacttaaataagtttaccctaatatacatcccaaaaattatttccctcaaaaattaataccattttttttcaaaaaaaaaatcgtagatatatataaatattttgagtatatattacatcaatataaaattcatacgggcagaaagaatgtgagtgttgtttggtttctaatgtgatcaagactcgatcattattaatgattatatacatataactatgtatatataataggtgttctaataattataaaaatttcaaaataatcataaatcaggcatgcaatcgaaaacccaactatatacaactccttattacccaaaaaatacagaagatcaaaaagcatcaaaaaatgaattcattcataccttaaaaatggacatcacaaccaccgtcattcgacgagggcagtggtggatggaaccaatcatcggagtggtttgaggggaagagatttcaggcagtggaatatttggaagagagatctgggaagagatttagaggggtttgaggggtttttttctgctgaaaaaagaaaatgaatgttaaaatgaaaatgggaagtcaaataggtttgagcatttaatcgttttttttaatatttttaatggcaacttaacactaacgacaacgacgtggc

SEQ ID NO: 226112 - DNA, 1089 bp, Cannabis indica
taagccctcacaaagtaaaaatcctgggtccgtcactgcttttaccctctccagcgtttttttttttttttgaaggttttaacttttaatatgggtgacttatatttttataatgttatcactggttactaaagtaaaaattttattttcagacttaaattaattataataaattatatatttaaaataaattaaatttttaattgaaatatttaataaggcttttctacaattaatatttataaataatttttattttttaattataagtgttatcccaattttcgtagagagtgacgtggcatcaatttgactgacatgtgagaagatttcataacctagacggacaataggctccatgatgtagtgtctcaagtgatttattacttataaacaacttgtttgaagaagaagctggagcatctggatagggtatgttacatcgtccgaacaccatctactttgcagttagctcgcatgcaccgaatagagtaaaagtggctggaacatcttcagaattatcttccttaaatgttcaagcatgcaaatctcgatcacatcactgattttgtgggatagactcacatcgacaggagataagaggaaacctatacttagtttttccttttatttctcttgatttaggaaagtaattaagtttccttatttatttcttatttgttttgggaaactaaacggatgtaattatttcctatgtatagtggagctatttcactatttcgggatctgaaattattcattcactagggcacttaagctgctaaaactattgtaagagctttcgaggaagatcaagaacttcttgcttcttttctcataagtcaatacaagtaaaaggagagtaggctattactaccatcacggggccgaacttctgtaacaatcttagtgttctatttgcttaatcattattattaatcttttctaatcactttaactaactcattatcattggctaaaaacgaggtcaatattttggtattttcatcaagagcaaaagaacacaattattgatttgtttctcttcaagacacacaaagatgtctgtaactacaaggaggggtaatc

SEQ ID NO: 226113 - DNA, 3764 bp, Cannabis indica
tttgttttttttttattatatatatacatatatatatatattattatttattatttattattgttatatataaggtttgactcagtcaaaccgaatcttcacagccttatgtactcacttattgtgagtctaagcatgtaaattatgttaatcataagatggtgagaattgtgacaaatttatcgttaataaattgaatcttatactaggccatttttatttgattatcattccataattttattatgtatatgcttttggtgatttcaagaattttttgtgaatattattattattatcattatgattttttttggaacatatactatggataatgtgaataaatattagttatggttattgcatttattatggaaattattaccaatgtttaaatattattttcgttaataggattttattagaatttataaatggaaaatcggccttattagataattatgagattaaattattcattaaatgtgttatgcttacctatcataagttttcacatgtgaattatcaaaaatcataattcgtgtaaatacttttctcttgtatcaatcacaattaatactaagatccataaatacaatttagtcatcctatcaatgattttataattaggtaggatgcttagatggtgaaagaaatgcattagatgtcattaaccacacaattttttctaccctatcagtagtggattaactgaattttagttatgacatttgaagtagttgtccttacctatgtaagagtcatttgttttgtttgaacgactctagcttgacatgattattttaatttatagatcattgagaaagctaaaaagacgagcagattgcataatccttggtttcacatagtggcactgcgcttaaatattttctttgagctttaagcaatccttaaacctctatcgcttagttatgagatgtgaccttaatatatttagtcatgttgatctttcattagaaaattagactaggccttgagatttatgactcttaaaatcacatttgaacttaaagatgtcaagttaccgcatgctcagtaggaatattgtaatgggtgttagttagttttagtgaggtatatatatgtgtcgatcattccttattgacaaattttatgggagtgcaattttttaggaatttttcttgggcatgtgaagtgatattcttatatttgttttacaatgatgagttcaggagattagtacattggttttgtgcctggaaatagtttcggtggaacttgtgaatcttctattactacattcttatgcttgaagatcaagataaggcatagatcataagtggaaaagtttttgattaatattaaaatagatgtatgatcccaattgtctattcttatgtgataatcgtgttatttgtgaatgcttgtaaacacgatgtattgaagatagtagatttgatgcatgtgtactctatatcacatcattgttgctacaaaatttgaagatattgatggctatcaactttggattataaatagaaagaatagaggaattaaaaccttatcttatctaaggatagtagacatgtagatcatgttaatcagtttgcccacaaaattttcatgatctacagtatcatgtataaaattttgtataaaattttgagaaatattgagtaattgttactcctttcttaagatctccctcatatgattgtcttaaacatagtctctcaaaattttgactcctcaaagtttgatagtttttaatgtttcagaaagctttaaagtagaaatacctaaagagaataatccatgcatgcataataatattcggtcatttcttatgtgtattgtttctcaaagtggcaagtgcacaataaaattgatatatgttcttagttattgtacttaagcctctttgtttaatggttattattatatttgaatgtctcctaggccaaattatgtgtagtatacatatcctatcgatatgtgttatacctaaaattcagctggaggacacgtgtcaagataaaggtaatgtgaatcagtgccgtatcttttatggaataactcattaattatgtaagtactggagtatattagaaacccgttgactgtaaagtcttaggcgaggaatcaatgtacgaactagtacttagagtattaacgagaaaccatatgtggctaaaaaagaatagcgaggcaccagagaagaataacacatacctcggctcacaaattagcagactaagtataaaagtcgaatcggctcggaagtacaagaatgcgagatgaccatctcgctacgaggaaacttcctatagtttcatccaactagcgaaagcgagactcgcaaccctggcaagtcagtagatttccttttatccgtgatcgtcgtatgttgtcgatctcggatagaagaatggtttcagctcaccatttgaatcactacaatcaagtttctgtcgagacatctgcagaatcaacaattaaagacatgtttaatacacaatatttttgacccaggaaaagtgagaacatcacagttgtatgattttcaaaatcatgcacagcgtttacattttgtaatatgtaatcagatcccacgatttaagggatgataactgtaattacattttggtcagccttgtaattaactgtcactatgcaaatataaatagtggcaaataatatcaaaatggggacaaaaaaactctaatacaagaggccctaaaagaaaaagacttagaaatctgaataagattgacttgtggactatgcagaattttaactgcaaaaccacgtaaaaacctggtgttcatattctatttttctatagttttataatttctgtgttgaatcataatcgtgaggctcaaatttggttaatgaaaatctgcgttaacagttaggtgctttcattgagagccttagtaaaaaaactcagaaaaagccttcgtttcttttagaaaaaaaccttctcttttatggctgaaatcccgagaatactaacaccccacaagaggaaactaactgtggtcctggaaaagagcctatgggctctaaaagatcaactaatctaccgtccagaaggagcaccaattccaggagggcccaacctgacattggtcctagtacgcagacaacacgcttgaggagaactcagcgtgggaatggccagaatcctcaggcgagtgatgaagttctcaaccgtggaggtgacgaatctgtgggagaaagaacttatgaaatggagagccaccacttgagacgatgtctagaagaggcgcaacgtcgaaacgttgagttagaacgagaggcagcctcggccaaggcgggaaggggaggaacgctcaaaatcaacctgaacctggaatgagaagaccacagggcagacctcgtcgctcacgaaccaggacacaggaaaaggccagggaagaacaacccagagaaaatgaaacaccccctaagaatcaggacgaacagccagaaaggagacaatcggaaactgatgaacaagaaatccctcatgaaaataaggaggatctaggaactcagccgggagaacggagatcacttgctagtaatcaccagcattctttccaaacccatagagtgaggactcctacgtaccctgatgggggaaatacgacaaaccgctctcgggaggaaagaacagaacgtgaagacgcaagtgtgacttcgaggtgatccagaattcatagtcgatcaactcaaagaggagagaatactcaacaagccaatgatcaggagag

SEQ ID NO: 226114 - DNA, 1945 bp, Cannabis indica
aaaaaaaaaaaaaaactaatgaagttgtgctcttatcaagatcaacatccatatatatataaaagataaaaataaaactgaaggtggtcaattgtcactgaattaaatgtaagtacatcgacaaaaaataattaaaatagaaaactacagacactactcatatggcgcttgaaaaatgaatagctttctccattgtaatgtcttgaaccttgttaacttctgatgtgagaattaacgacccaatatataacctctgaatgaattcaggcacctacaagtgatcaaataatatcaccttacaatctacacttaaaaaaataataatagtaataataatatattaaaagtctttacttgtgcacagaagacattgacaccatccacgtactctccaagaagtttgttcatcactttcaagctagtatcatactttccaacacaccttcggtggtcatgtgcttctgccacaacaaagtcgaaaaaattccaactcggaccaaaggcttctcttctactctccttaaatgcattatccattgaagataactacacgctcaaaatcacaataatatttgttataccacataataattgaacaaattcactaatactaatttattcaatcaatacaatcacaatattagcaccaatgtatccataatagtcaacccaaggtcagtagaacatatcgaaaagtcattataaatgtcagccttcttcaatttcataactagtattgacaaaattcattgccttttgaccactatgggaacataaatctgcaccaaatcataagatatatcaaaatattaacttacaatataatataataaaaaaaatgagacttattgacgaataaatactttctgacatatttgtatagctccacaccactccttccactttctaggttcacttaacgtttcaggatttctaagatcaggtctctaaggacaagaatcattaaattacaacaccacaataaacaatttaccaaattatgtaaattttgaagataaattacaattaacacaataacttacagacaacatggttggaatccaccaaaaaatttactcttcatgatgttcaaatttctcagcggctgttagtatctccaccaaacaattcatgacctagacccaaaaaagaacaaaattacgttgctaattttagaaagaaatgaataaagtgtgtaattagtttaatacacaaaagcttacccttggagcaactaatttgtcctccccaacgtttggaagtcacatttcctaccaacaaagggtatatataatacaatgtgaacacctagtcatactagagtaaatgaaaaatacattaattgtaaatgtacaactaatttacagctagcttgatttcctacaattatgaataacaatgtgataaggatttaaaagtatttataaatcaaactaatgaccatgaagcaaacatgtgaaccaagcattatatttaaacaagtaataaaataattctgttcctttattgataaatgaaattcaagataacattgaaataaagttttagttagagcataaaatccaataatatgtggatctatttgcccactatgtggactatttcgatattttatggtaattgttatatgtatcaactagatggtcacatgtttgcttattatctattcgtaatgtagcatttgtaagattacttgcacaaataatctgattacgaacacaatttcccgactatgcaatcaagcaatttttcttgatattctagtgaatttacatcacatgtttttaaatgattattgtatgtaaatagagataaaagtagaaaaatcctattgctcatgtacatacacaaaatggtctaagcagaatcattcatgaaacgctctaataatgtcaatacgcaagactgtactttatgtagacaaaaactctaaaactttttagac

SEQ ID NO: 226115 - DNA, 2480 bp, Cannabis indica
ctctctctctctctcttttcatatttttttgagcctatagtgaaaaagtacatgcccacccataccaagttaagtactcaatcatagtgtgtaagactttgaagaatccaacacctgaaggagaatcgggttcagatcttgataatactctatgacagaaaggaacaaaggttagagatgtgagtgggaggagacatattattctgctgtcaccaatgtaaatttgcttaaactttataatgtctttaattacattattttagagaatttatatttagagtgtttatcaacatacttgttagtaaatctagattctggtaaaatatattccaacaacttcatatattttgtaatatattattcattaattacttactttcagggcataaattccaaccacaaggacatttgtctttacttaaaaaagtacatcttaaagtttttgcttaaggagctggggcattctctataacttatctccctcgacgccttcacagttggattcgtgttctcaagaaaaggagtccccacaaccccttgggttttagttggagacatagtgcaaaaagtattggccatgtcaacaacctcttgaatgaataccacgaagtcaaatgaagggacgctggttaaggtggtgtagatataatccttgagcccctggtcatatgatttcttcttctcctctactacctcgagttggagagcagtaactttgtcctttagctctttgatctccttatttgtttttaccatctctatccccacttatgagatggctttttccttgttaatcagtgagagcttagcatgcttcattttctcttgaagagcgacattttgattttttaaggagctcgtaatccttcagcatttgctacgtcaccatgaaagagtgagcatattccatcatccctttgatcatatgctcagaccaatgactccaaatatatgtgactaaagcactctcaagatcaaagaagaagtcaccattcaagtaaagctcttgtagggctaccaagtcacgagttttagtggctggatccaccacgagtttctttcctttgttctgtgtggctcctggctgcttttttgacaagttgattacctacgaatcaaggacatcactcttccttttcactctaggactcgcaatggaaggagtcgcaccgtctttggtggactttggtttgtggacgaggggacactctttaagaaagtcatttctgcaaaattaaccaagtgtgagtaatcacatatcaaaaatcaacaactaaggatgctaggcgcatcactacttgtaatttgttgatttttttttttgccttgcaaggcgtttcttgatcttctccttttgctttttaaaaggttctttgtacaccggttctcgttggagtttggcatcgcaacaaattacaccgtgctcttgaaaatttgtaggtgtacacaagattttacagtcacgagatttaacgggaaagacactgactgtagggttggcaatatacgatgacaccgctaaaaaatgacatgaaataaatgggtttgagtgacacgtttaataattgtatcgtgttcgtgtttgattttcgaatacgtttaataatcgtgtagtgtttgtgtttaagttttctacacgtttaataatcgtgtcatacttgtgttaatcgtgtcgtgtcatagtcgtgttgacacatttagtaatcgcgtcgtgtcataatcgtgttgacactataacacaaattaattttcatatattttataaataaagctcaaaatttttgtatttataatgatatttgtgtcataatcgtgttatatcatgttcgtgttgtgtgacctactaattaaacgtgtcaacacgaacacgatatgataaacattcacaatgcgctacatatcggtatggtgttaggcaccttaaggtgtctaatagcaatgctcatagaattataacaaggaaattcaatcataaattacttaagcaaccacataaaagaaaatgataaataccattttcaatcttgtgtttcgcaaaagttaccgatcagatcgactctcttttttattttaaataataaattggaccatgtaaatattttctaatatggtacaaaataataccctaaactcagtttttgtcaattattttcttaatataaccaacctaaaattattttttagtgagaacagatgtaaaatacaatcagtctggtcataacacctcaagatgaagctttttaagttttatatatttttttttatgaaaattgagttcatggtactattttgtacttgttatagtgcgaattttttgcctaaaaatgtaaatacaatctcgtcaatatttgacacatggactcggttcccgatgaaaaatgatgacatgtcaacatatagctctagttaagctaacctcgcatgacataaacttgcgagaatgtgcgaccgagacaatgtctaatcccacactatgccca

SEQ ID NO: 226116 - DNA, 1844 bp, Cannabis indica
attttgtcatttaacaaagcacagggtctaatctgcaacttttacaaaacacagggtccaaaatggtatttaccctaataataataataataataataataataataataataataatttaagacattaaaatagttgaccaccaaaaacttgtttaaagcaaaattgattgagatttaggttccaaacaaaaaaaaataatgaaaataaaaacaaaaaattcagatcgatcaaattcgaaaattaagattttttaaaatttttgcaaacccacaaaagaattatgttctttttcatctaactttcaattgaacactttgtcattatgatttttagtttataaggagaaaaaacaagaacaatcactaataattaattttagtttcttttttaatttttggtttagcttcagctatttcaaaaaaaaaatagtctttttttttgtttaagaagtccaattctttattgtaatattcaatatgaatgactagtgttaattatatgattaatatattaattaataatacagtattgacaatttacaagaggtgagattgagataaatttactactactaacattgtatcttttcgaactcgagactcttcgttttccactttctctctccatgcaaacgaacaaggctgtgaacctcgaaccagtgttttcacaccactcccaaaaccgtttccacattgtgaaaccaatgatcaagcccagatctagcgatctcagtggctccagctcctcctcaaacgagacccaatgtagttcgactctcccaagacgacccagaagcacggcgcgaagtcgacccacccactcctgtctcgtcagcatttactccgacgattcttcaagatttccgtccagtacgagcattaatggcgatctcttcagatctcccacaggtattcaaattttttcctccttttctctgctcagtgtcaaatcgcttctgcaaaaccgagtgcagaggtgtaagtttcgtttcaaatatggtatacccattaaattataccctcaccaaacccattacactacgtttaggagtaatggcaattctatttattctctgataaatagtgagtatactgcttgtatcaaaaggaatttctttgtttcatttattaagttttgtactggaactactctgcctgatacaaagagtcgggtccttttgcaggaaactctttccccattaaatgctttgatccttgttagtttcacatcacatagggactgtctatttaagaaccgaagtgttcctagcacatgcatccttgatttagccatatatagtcttacaactatattaggaaccctgctctgcatctgttccctctcgacacaatcctttttaggcattattctccacactttatgttcttatcacacacattctcctctatccctgtcgactttccttatataccacctgtctgcctctctagatttttttcccatctgtgttatatacgttctttcttctttctgcacgcacagactcaatactatggatgacctaaccaattctctttccattgctctcaatctcacagagaccgaaagtaccattcaaactctgcatgaaccaaccctaccaaatacagccgaccctgagttcaaccaaacccccatttatctggttgctaaagtccttgcggttaagtcttttaaccgaaagaatttcattgaaaaaacgacaaacaattggaaccacatatcccgttcccccgtcactattacagaacgctcaaatggcctttttctcattgagtttggttgtgatggagatagacgccgggttttgcttcagcaaccttggacttatctcaaccaag

SEQ ID NO: 226117 - DNA, 2818 bp, Cannabis indica
aaggttgacattttttcaacttgcgctaatttcgatgatgtttttcgcacaatcttttgggcttcttctatgcttttagcaaagattaagattcaactagtgtctaggttgacacatggcactgggcctagttcccagattaatagattgtcaggctgggctatttccaatcaagttcttgaaaatgtgtttttggaattttttccatcattagaaataataaagattccaacaaacttagggagaaaaccataatcccgagaatctagaaacaggacctagcccctaggttgacaatcaatctggtgcgctggttttgatcactcaaatgtcaaatctagtttgaccattgaatttggaatggtcaaaaaatgaggtaggagacctcatcctcaagttctacaaccttagaagtatcaaaacgacatcccagaagctctgaaatgagtacccagcacacatgttaaaaatcacttgtgaacagacggttacactcaactttaatttcaaatctttactcttaatttatcttgatgttttatatttttactttttttttaatattgtaactacattaataagagttaaagtacaagttaaaatatgaaaatattttggaatagtaccattctaaacgacctcgtgtgtgcttctctcctaatgcttgtctagctaagttatgagaaagcatatttttatatcttgatacatatatgaaacaagaacattagaaaattttaaaacaaaggctataacatgttgtaacagattagacagagatgaattatatttctacatcatgctgattttatcaaccagaagtttactatccgattcaaccatagctaaaggaaattcaaccaattcacaccaacttaaagtccacaataaagctttggcctcagcatgaacaggagaaagcttagcatgataggaattcaacaaaccagccacaatatttccttccaaattttagatagtccctcctatttttatctttcttttcctttcatcaatggttgcatcaactgataatttgtagaattttggtttctgtaacatttcacctgcacttacacctttacaaatgtcttcagaaggaatcaagtatccttgatcgtcaatattttccagtctaccatcttgagctttagaatattcctctaataaagagtagacatgcacttcaacactggaactattataaataccgtttctgaacagaaattggttacctcgattctaaatttccaatataataccaagaaacaaacccatatcatctttgtttatgctctcaaaacctcttaacaaatatactttaatatcaaaattcttatttttagcataaaagttcgtaaagatagtatcctccacacatgtttagttttggaacactctaagagggcatgcaaaactgattcaattctattggagcatagtgaacaaagaggactttggattgaacttctatcgaaaaggtttaaagcacaagagtggatgtggtgaaagtttttcagataaaatgcttaattttaggaagaattttaagttcaaaagagttttccaccaccttttgatggaagtttggttagaaggagtgggaggaaatcaagaattttcagcaagatgacatgcatattttacagtgaaaacatctgactgatgcaaccccaaatgaggcagtcatctttgaaacgatcacccaaaggcacgctgagaataacatcatcaaaaacttagaaggtttatctaagttcccaacaaccatctttgttgataaaaaaaatgaaaccttctatatgatcgtcacccactgctaaggcttctccctctctcacaacgactgcctgagcatccgacggaggaggaaggtccacgatgttagggttttcaccattgttgcatgccatttgaccgactggttgtacgattgcgtttcttgttgctacaatgtttgtaaatgacaaaaatggtgatgaatttcttcagctctcaatgaaaatactaaaatatttactgagcttttcaaaaccaaatataatgaagattaagctaaaaaatgtatgactagaaaaaaaaataagacaagatttttatgttgttggagtgttaatgagccttagtctacgagtcactgttattgagctcttggttatggagattacaatatattttttggtttttaaaaaataaaaattcttaaccctttgcatgcaagtttaatgccaaatttataggcatttttcctagatggagcgcactaatctagacccattagggctatttttgtgtaaaaagtccactgatagggtaacatacaatataatttgagctattggattggataggtgaagcgcaagttggtttgagctaccttgttgtaatgttgacaatgacaggcgatgcatgtgtcagtgtggagaagaaggaatgttagaataatgggtgttcacttaaaaaattaattttctttttacgatgtacctttccaaggactgatacgtgggacaggccacctaatttcacaagatcgtgtcagagaagtgtcacgtggggtagcttttgagacaccaagtaatcccgtacaccccttagtattctgttcacggatgactccttcaacgggtaccctcctcatgttcacattgtttgctatgctaaatgtagaatgataatccaactcttaatgtccaaattcgttgctaagaagcaatatcaataacaaatcatatgtctaattttgcctaattaataattattactcttgaaattaactcatacaaatttgacagtaaacaagactgcctctagttga

SEQ ID NO: 226118 - DNA, 2255 bp, Cannabis indica
tttttgtaaattttttttgttatttttgtgtacttataaaataatccctatatataattatatatatgaaagcttagtatatttttaaaaataccatctcaattcatcttatttcatgttggatgaattgcatatggatagttccaataaaattttattcttgaacattttttatttagttcatttattccaacaagaggatacacattacaccttgattttgaatatgatttgaattagaagagagaaatgatagatctattcacactatcaataattaaattaaatcttagtatatcataagaatttttacagattgattaaaaaataattcttgaatgagctattcaactttagggatgaatcgaaaaagaaatatttattggttctacttcttattttacgaagaaaataaatctttttaccgaaagtttagaaaaaaaaaagttcaaatctcctgcgaaaatgatttggaagataaaaaatggagacagctaatcattatggattcatccaaaatttgattgaaatccaatatagcacctgcgggtacatatttgattttttatactaaaaggggaccaaattaaaaaagttgtccttaagttgaacatcataataaattgatgcccatctttcccttcattttaaaaatacccctctcataaaatttttccatttcttttctcgttcccttttctcttttcctcttggccgccagtttctctcttgaccacaccctgttggaactttgtgaaattttataaaattgaaaagtgaaatgtgtgagtgaatagagtctcacatgggatagaaacacttcactagaagtatatataatgtgcaagtttggaacgttgggtgggccccaagggtacccagttttatgcgcatgggtgagtactcacacgcgcacgccgctaccgtcatccaaccgaccataccgagctggcaggcgggtgtagtgtcactttattttttagagaaaatttattgattaaattattcttatttatttaattacttaaaacagttttttttttaaacatgtttaattaattggtaaatagagactccttaattgttagcatcgttcccctaatctcacactatcccacgttctaagattccctttagtaacatttttcttcccgttactaccttacgtgcattgcctatataatatatctgaaccaacaggataaacatatctctttttttcactgaaaaacatatacaatatatacacatgataatattacatatatatatttcgagcagtagtaaggtcttttaggtgtggtatttcgataattctttatcgtgcaatagatctccgatacaatgtgttcgactgagctgttttatccttctaacgacgaggctgatagtctgcttgcacatatctgggtagtgccgcgaatgtcttaaagagagcgacctagtccgcgactcaacccagattttaattcagtaaattcattccttttattttttatagcaactattttcaataattttaagatgatgtgtttctgccatgactagtgatgagaattttggtgttattgatataaacaaaccttttcgttttgagagaaaccattttaaaagatattaacagaaaatgttatttttcctcactatgaaaaatgttgctcatgttctgacgactgataaacttgttgtttgtgatactgctaaggatgataaaaagcagaagtaaactgctgatttagcaagttgagtcgagaataattttctgtgcaaaaattatattctcaatagtttatctcacgatttgtatgactactataattctgacaaaactgccaaggaaatttgggacgcactttaaaagaaacacgacactaaggaggaggaactaagaagtacgttgtcagccgctacctcaaattctagatgactaacgataagttagtggatgctcagtctcatgaacttcaggaaattgctcacaaaataatttctgaaggtatctctttagatgaataattccaaattgctgttgttattaacaaattgcttcctgattggaaagattttaaaaatattatcaggcacaaatcaccactccttttttatttttaaaattgatttttatgttttaaataaatgaaagcagtttttaagttataaactcccaaaagaagagtgctaattacaacctcatattacaacctcttagtcaatctccacgttcgaaattatatgccggaatattttttttcata

SEQ ID NO: 226119 - DNA, 2172 bp, Cannabis indica
cctatgaagtctatcatagcctaaatgaccaagttgtaaatgccatagatatgtttcatcattattattaatcttttgattttgtatggtttctaggtttagaaatatttaaaagtttgttcatgaacgcaattggtaattctggtcttaaagcataaagcccttattccatgtgagcaacggacaattaaatgccattacgagaaatagtggaaacagaacccaaaaaattcaattgataactttgtgtcttgaaacatgaaacactaatcaagtttctacaaacatttaaaataaacaacacattgtctaaaatcaaaaatttattctgatacttgaggtgagcttttcatctagcttggaccgatacaaattcgctattcccaaccttaagcttcaactcccctagatttaagtaatcctaagtttcaagcagctgtaatgaagagaaaacatggttagtagatccaaaatcaataatccaaatggatttgtaattctctaaagcacatgattcaaacacaaaagtgttaccttcattccgatgttaagaagtctaacacatcttgctttaaaatttcccttctctatgcagtgagaacatagaagaatacgtctacttagttgttctttgattgtctcaattaccggttcaattttaattctatcttttataattgaactcgaagatgcaacattgtcagtttaatcatcctcaatatcttcagctttccttttgccctcctctacaacactggagcgagccctcctgggaagtgacaatgtccgctcattaaaacacaattcagtatccagcttatccatgtcggacgagttccaattgttaaccgtacatgatacaataaatttggtatacttaggttaaaggctattgagaataaattgaatcaatttctcctttgatagaataattcctaaaaaatttactttctggaattttgagttcatcaaaattaagtgtgaagtgatgctctcaacatcttcatggagttcatttgcaatggcatatactagttgaggattggggtgaggattgttcatttttatactacaaatatcaataaatagaaataaattacttggttcaaataaaatcatacacaaattcaaaaaataacaagtgtagaaaatatgtttgcaaaaaataccaaaattaaaacatatttaattattttccaaggtttccaagaaactgatacagtgtcccatttacgcaggagtcaaagatattattcattgaatagagtagtcagctcatctaaaatggacaccactctagcaaccttttatttgatcgaaaagagaatctgatgttgtcccatttagaggagagtcaaggtcattcctatttcatgagcttctactattgtttcatactttgtaagcccttcgcgtagcagccactattggggtgatcattactaaaagtaaaagaattacaataatacttatctttccagattctacggtgttaaactgcgaatgaatgaacatctattagggatgaatctgatcaaaacaaaaactgtgtagaacgaacaataaagattgaatatccttttgattaaagatcattatttaaataatgtatttttagttcatcatttattttaatttatatattttaataatgaaaattacttaatttaacttgctccaaaaattattaaataactaattttcaactttaatttaattttcaagtttaatttggaaaaactatacatatattaaatataatttgaaaattatttcaaaaatatataataaaataaatacttgaaaatatctaatttatgttgttctaaaataactaaattttcaactcaaatagttttaaaaaatttcattaaataacaaattaagtatcttgaactaatcaccttaattttttttaaaaaaatatcataatttaatttgatctaaaatttgtaaattaacaaattttcaacttaaatatatttcaaaagaatatctgaataactaatttcctagaaaaatctacttaattattaatttcaaaaaaatattctaattaaagttgatctaaatttaatttgaaaaattaattttcaacttaaatatattttctaagaaaattcaaataattaagtatctagaaaaatttaatttgttataacttctttattt

SEQ ID NO: 226120 - DNA, 2281 bp, Cannabis indica
ctctttctatctctgtatctcgaactctctgaaaaattggttgttgatgaaagtcagagaaaagttttgtttacatataactttatccaatagagttagttagtaacagaactaactaacctttttgctaagttgtccgagaggggactaaagtaactcttcactactacaaaaagtacaatttttgtcattttttaagcgtcatttaaagaatttgtgtcggtttaaaaaactgacgtatataccgtagtcacaaatagttttttattagcgtcgttttttaaatgacgcgaaaaataattatcttcatttaaaaaccgacacaaaataaacactcttcttttttatcttctacgtcggtttgaaaatgacgcaaaattattcgtggcatttcaaaacagtcactaaaaacttataacgtcagttctaaaatgacacataaattgttaaaatacttttttttacctattgcgtcggttataaaatgaagcataactatatgtaaaagaaatttgcaaatttttatgcaatttttcccacctgcatcatcaaatttaatttagaaaatttttaaatattagtaaatgcataatacaaaaaaaattagcattctttaagaaacaacactttaataatttataagataaatgattttccattcataaaaggagaagcttgataaactaatacaaatatataacaaacatacccctactggttcatacgcgttcaaacacaactaagaaaaaaatactacctaaaaacaacaacaaaaaaaatagagaagtcataaccacaaacaagagtcaactaaaatgcagggaaaggaagggatcaaggtcattacaccactccactcctatctttgatttagaattatacttttttcaagtagttctataagctttataatgaatgatcaagtagctttctgcaacaaccaaaaaaaaaagccaacacaagaatgaactcttaccaaatgtttccctttcaatggctgtaagttttttcttttttgctttgtcatttttgacatcatctctcagggtgttacagatcattactgatgaattttcagataggagccgtatatttgtggtcttatgtgtataacattgttcgtgtatcttgaatgagtataaatgacatcaagtctttgagggaatcattagaagaaccactagttattattagaaactttattaaacaacgcaagaaagaatcataaataacaacaaccagataacactttgcaatctcaaatcggcagcaattgatgtgcttctttaagaggcatccaacaaaaagctaagttttaaatataaaataattacaaattaaggtgcaaaacttcagaatctaccaacccaaatttggtttcaagattgaagatttattataaaccaaaataaagtacaatctagaaaaacttgaaaggaaagaacaagttattttaacttaccaattgaatatctgtcaccatttcctgaagaccacgaccatagcatgggacaagcacagcaaaactgttgtctatttcatcatcactctgaaactcagggccatgaggctccaaccatccaatcgaccaatctgagttgtcagattcagaaccagaaacacatccaccatcaaacggcacaatgacaacatcatattcccgatcgattttcctctcttcccaactatgccattttcgcttcacctttctcaatcacgaggacacattggaccttttaaccaaaggaaacttagagcatcagattcccaagtacctaactcaggtgaagaactcaaggaagacccattgcagagtcttgactcttaatgcttcccactcaatgaccaccacgaaagattggttaaggctaaagccatactgtcactcaacaacgaaaccaattttaatgcaaaaaattctagaacagtaaagaatccatgttaaaagtggagtttctacctgttacatatatcaatttaaataagaacaaagacaacaatgtataaggaattcaagaaataatatacaaaggcatacaaaattgtcaaatatgcaattcaatggaaggagtggatgaataatgttcataaccacaaaagaaaaaagatcacggtttgtagcaaaagttttacccttcaattaaaaaaaaataagttaatactttatagttgttagaataccaaaaattatatgagaagaaagctcagagtgtcttcaaatatatctttggtttgaaactgaaatgccagatattcaaattttcttgcataagcattaata

SEQ ID NO: 226121 - DNA, 1513 bp, Cannabis indica
aaatggcacctacgaatcccttgctacagtggactaagcagatcataatctgactgaaccactatatttctctgtcttattgttattttccagccttcgttgattgtttctcattccaagtcgagtactcgccattctaggttgaatactcgcacttgtctttacatataaatttcttcttatcattaataatacaatataatttggtgttgcgaaattcactcgacaacaggaagctatttgacactccaaataattccctccaaatcaccacaatacaatttaaacttgttcgacaaagaaacaacatttatacagtctaactctaacaaaaaaaatccttcaaactcggatccaaacttaactatgcatgtcaaaaagatccatttagttagaatgggtttagctctgattcgaaacatttgaatacttattgaatctcgaatcagatctgctctgccccacctattttttttttccaaattggaactgatccgatccaatttcaatatattaaaaaaaacttaattcaagactcggactctcgactcggaccgaacccgcccggaatctaaacccaaacctaggacttaggctcggacttgggacccgaacttgagacagtacccaaacccggacctggatccgaacctgggacccaaacccgaacttagggcccaaacctgagacccagacccagacccggacccggacccaaactcgagacctggacccgggacttaggacccaaacctaaacctagaccgtagacccaaaccttgacccggacccaaacccaaaacccgaacctagacccgagacccagatccggacccgagacccaaacttgaatccaaactcagagcaagacctggatatgagaccccagacctgaacccagaccccgactcgagacttgagacccaaacttgaacctagacccaaacttgagacccggacacgaacctagacccaaactcgggacccaagacccaaacctggtcctggatccaaacctaaacccagacccaggacccagactcagacccgaaccctagacccagacccaacccgaacccgtagttggtgttggggacctaaacccgacctgcagttggtgttggggactcgaacgagcctgaaacccgagacgcggaccgaaaccctaacttgaacctagacttggatccaaacaagacacggatctggaccggacctaaatccggacctgacccgacctgtagttggtgttggggacccagacctaacccgtagttggtgttggggatccgaaattgacctgtagttagtgtagggaacccaaaccagacccagacccaggacccagactcagacctatacctggaccctacccgtagttgggttggggtcgagtttattgaaaatatattataactttacacaatctattaatacaagtcaataccaaacatattattgtattaaataatactaatacaaaattaacatggatataaaattataagtttag

SEQ ID NO: 226122 - DNA, 2499 bp, Cannabis indica
gtggctgagcctgcaccctcactaggccttggggcacccctgcctaaaggtcgttccctcctagttggagggtcatccatcacgagctgctcgattggcacaggccctaaaggaggaggaagagatgatcttgcaacattcgtagcacgagtggtttgagccaccttggccccagacaacccgaaggctcctttgaaggtccgtcagcaagacctctcaacctagaaacatatttacaaaaaagaaagtagaaaagttagaatacaaatcacaaatattcgatgtaagacaaggatataagagatggtgcaatcgactatcaaataccatcatcctcagaagaggattcatctgaatcctcaacaaccgccttgcctttgcctctagatgcaggtaagggacaagtgggtcctatagtgctctggcctccaggcgtaatctgaagagaagcgtctccaattgtgcccctgtgagctaagcgctggcggggggccctttctctcttctccatacctcaagctatctgagacaaaggcacatcatcgtccatgtcaaagacttgtccattaccaggatatgcccccttagcagctggggctctattcacgctaacttatgggccgtgggcccccataacaccagaggcaaaagggtacaggttgtacctctgaaagttggacgcactggccaattgaattatgttcatcttctccgaaaggagggacatgatgtgatttgccctatctcttatatgcaatgtagggatgaagcgcttataaaatggcactcactggaaatagtggtgttggatctcacagatgtcccaagtaatgaagtagttttaagcatacccactaactttggacataggtatgttgttggtgtcgtccaaccattgatggtcaatctgtctgaagtagaagtatccagtccggttgggcatacccactaactttggacatagggggcaaactttagatcgaagtaatatctagtctcatatgaagtaggttgaggccagcctagctcttcatacaaaacaaacattgttgaaagatactttatacttgatttgtgttggacacatcccgaagtaagcaacgatgtctctgaagtatgggtgtagtggcaacactaccccctattgtatatgacgctccaaccatgccatccaagtgacagcaagccggtgtgctctctaatctctagtgggtatctcacattagacacccctcataatatcactagtcagtatcatgttaaaagtctcgacgagaatgacaaatgcgggagagacccacctgtctccccacgacctagcatccaaaacctgaggctctgaaaattgaattaagacatggtccagacccatcactgaaggcagaccaagcctattcaatggcttcctatcagcatcatatccaccaagagggttgctagcgaggacacaacaagttctgcaagtccttctcttaactggcgcaacctcttccacctcagattcggagttagactatcgaccccctagtcaaccacaagtacctctgcttgatcgacctctgggtctacatcctcacgaggttgtgtggcctcctctataactctaactttggccatagttgccacccctagcaacatgggggtcatatggtagtgcactatgatatgatcatttcgttctgggcatgattatcgatctgagatcacacaaaaggagtaaagggacagactaaatgctctctcttaaaagcgaggctgacaggacctatgacataacaactgacacctcccaaaatcacctacatagaagagataagggaaggtgagcaacctgataaagctacagacaaagttctagtcaactgtacctaagggtaccttccaagtaaatcacattgtacaaggctgagtatcagcaaagtaccggcttaagtacatttacttagacaaatagtgagtcctaagttgtgtgcttgattataatgaactcactaccaagtctcataaaaagtttccaaggggaccgcacatgagattacatttgtatatgcctccaaggtcgtcgcgagaccccagccaaggtcaacaaaggaaaaaaaattagccacccgcttggaaccttagccttggctagccagggttcccaagccttagaggattggtcaggtcccatgacccaacctaggaccgacaaggaacttcacttttaggcataggccggccagcctatagggtatcccccttggccagccagacccatggtgaccacccacgaccggctaggtcttgaacaagacctccttggctgggcaggaggtgtacaggatccaaacatgtgttttttcaagaactcaaatacgttctttgtgttcttcgtgactcaaagagccaagaatcataatgaaggtcataatcagatcttttttggtctagaaattacacatcacacatcctaaaactaccatgcagatcaaaataccgaaaaaattacaatctaac

SEQ ID NO: 226123 - DNA, 1687 bp, Cannabis indica
attcacacatttctatattaataagaaaatcaaacacagcaaaaagaatttaagcatgcatcaccacacattatctagaaagaaacctcaccaaaccatctacaatattaaatgttgagatattacagcaattacaatggtacccaagaaggactcaaaccccagaccttgtgggagcaaaacatcagactatttgacttacccctcttaagtaagcatgtctcaacatgtattatcaacatttatttacagtttattcacaattgcaaccaccaacagctacaggggcatacttactgtggatcgcataactggaaccatgctcaatacaaaatataccgtatatgaattcaaaatgtgttggtatagtcatattgtatcatgtacttgaggagaaaaaaaactacaattttctgatgtttcttcttctgcaaaaagttaaaaactacataaacaagaacagcagacaaacaaatcacttttctctacaaagtagttgagagagtaatttgcgtttatgtattatcgaataaattgcactaaaaagttatacaagttcgggtgtctgacatgattaactcccaacacaagcacagaatgccaaacagataggtcggctagatcaatgactaccatgtcaataagtcagtatcaaagagaaaaaaaattgccaaagataggaaaccaaaaacttttcaagcacacaccttgagtgccagatttccacgctcaagaacctgatctttaatttgacgtttatcacccgtcaaattatgcccgccttggccagtatatatgacatcatcggcattgtctaagtcatcctcatacatgccagatagaacaatagccacagcaattgggaatgtataagtgctgtactcctgcaatttcaccaataaaggaaaaatagagtaaattttcctttttataataaccacataaatgatttatgtacattccctatatgtattatatctcagatcccttaacaaaagagggaggggaaagattcattacccctttactgtacgcctgccccatatagtcaattccatttaaccagtggctatggaaaccaacaacaaccatttcagctcgagaatagaactgatgtccaacatcaatacctgccatcaatagttttttcagcattgaaagagtatcataatcataagttttcaaaagtgtaaggttactaatgtataaatctcatcaccgatagacaataagctcaaaagtgaattggacatgataaaaacttatcattcttcctttcaaccaggccacattaataatatcatactcttgaaaacatttaaaatgaaagccacaaacctggaatattgcctattcttttatcaggaaacaaaaccgttttagtctctatcatctgcttaaaagaaatacttcataagtccaatgggtgacaaaaacataagactaaataaaatctatgaacaaaacaaaactgataaaacactttgaaaatagaaaatagcccatcagacacttgccttggatattgccttcaaatcaggtcgctttgctttgatcttcgtatcttctacttctacttctactacaacttttttctgtaatatgttgaatactaataattataagagcattctacagtttcaactaaacttacatgaacaccaaaaaaaaaagcagaaaccgttcc

SEQ ID NO: 226124 - DNA, 1627 bp, Cannabis indica
taaaacaaatacatatacaaaaatatactacaacaattttttttttcaaaaaacacactgaaaaaataaaaatatatcctaatcatataaaaaatgcacatatataacagttctatgtaatatacaaacatatttttttaaaaataaaacactctaaagtatattgtatcaaaataacagccgctcaaataaaattctcaagaataaaaaaaatatacaaaagattttacaaaaattacatcatataaaatgacatgtatattagtggcaaacaaaattatatcaatcatcaaatatatgattaataaaataaatcagatgcaaaaaattataatatactatacagtatacaattctataatatacaagaaaaaaacttaagatatacagtatcaaaaatacatttatacatacatcaataagatccttaaaaaatgaaaaataaatcttaaattatatagtatcaaaattacaattgaacaaattgtaataaaatcctaaaaaagtgaggaaaaaaaaacattaagtatacaaactacaaactattaaatttactctattttatcttgggtccaacacacaatcaatgataagaatagaaaacggtaaaaaacaatacggcaatattaatatttaaaaaattcacgtcaatactgatattaaataccaaaaaacgtgcatacatgtaaattttccatttttaaataataatattaagtttattaatataaacatgtcacgtgttacacataaacaatttaataatttaaaatattttactattaaaatttaagtttaaaaaattaaatacaattgaaataatagttgagagagtttaacggcaaaaaaaaaaaaaactacttcataattacatatcaaaaaacttattaaaccaactaaaatcatttacattaattcctttcaaaagtgtataataaattctattatagactattaaaatttaagtttttttttttattattgtataatcaatcatcgacactctgttctcctaataagcaacattccgttaaaaccgaacgcgccaaatattataaatcaaccttttttgaaactcgttcaacttgcttcttttaatcttacttgtatatatttctttccctgtacaaaatctggtattaacatttagccactgtaaaaaatttgtcactcaatgaggagatggttatgaaactcatcatcttgaccacaaaggcaacagctacgagtgccaaacttaataaaccctaatctttcaaatattatgtatagaattaaatgtcccaactaaatgatattgaagctcaaactatgctatgatactcatttaatattaatgtatataatactcatttatgtagtaatcttttattaaatgaaattatttattttacgtacttatttaaattattttaattattcttaccatttatttgttatttagaagaattaactttatatttagttagaagttttcatttttaaattgagtaatttgcggcaaaaatacataagttttatcccaagtagcagataaatacctaaatcgtatttttggtggtaaaaatattttctatcacatttctggaactttcgtagatacttctctgttttcttccaagtaagt

SEQ ID NO: 226125 - DNA, 1996 bp, Cannabis indica
tgtaggagagaaacccaaaattcttgtgtctagttgtataataatatagagtgttactgttaatctcctatttagcatctgaaaatacttgccagaatatatatttttattttattttttcatgtcaatgctcgatataatgacaatattgatgatagagtttctaatattttagtttaccgcctgtgttgaaaaaattttaaaactagtttcggcaccataaattatgtagcaatttttaaaattttataggattagtgtaattataacgaataccgccataaaataaaattagaaaaagaaaatattctaacacgtgtgttttttgattctgagattgtaattaacactctttttatatttattatggaacagaatttgattaagattgattattgaaatatatttgttcaattagtacaatgatattattataccagttgagggggtcaacccttttcattaatttcacttctctctcttactaaaacacaatcttgaaaaaaagacttcttttttatttgtagattgtaaatgaagctgcaaagttcagatacagaagtgggaaccagttcaattgtggtggtaaattttcaacttttttaaacctctttttcttcatctgtgctgttccttaatttcgtttttcatttcattgatgaggttaatgtaatttgttccttaggcttaactataagaaccccttatggagctgtgggacatggaggacattaccactcacaatcaccagaagctttcttttgtcatgttcctggtcttaaagtatgttttatgtttcttagttactttatcccatgaaatatattgtgacaaaaccaacatgttgttaaagtattgaaatgtcattcctattagtattcccaatcacattcttatttttatgttttcagtctctccaactaaacgccacctaagttttttgcttgacattattggaaaataattagataccttaaatttgtgtagtaaaggaatatggagcagcttattgaacataacttgtgaaatggttaattgaattcaacttctcatactctttcatataggtggtgatccctcgaagcccgaagcaagcgaaagggttattgctatctagcatacgcgatccaaaccccgttttgtttttcgaaccaaaggtattgtctttctgttgaatacatcagttccaacaagaaatctagattgaaactttaccattttcgttcggttcagtggctatatcgtttgtcagttgaagaggttcccgagcatgattatatgttgcctttatcagaagctgaggtatactacattgtgtcgagttcagttgtatttttctgttgttaaagagtgtcatgtagtgaaagcttaaatctttttggaagcttaggtgattagagaaggaagtgatattacacttgttggttggggtgctcagttatctgtaatggaacaagcctgcattgatgctgaaaaagtaagctttttgttttcttaactacattttggttgaaaatggttaacaaggtctggtttttaagctttgtaatcaattttcaggatggtatttcttgtgaactgatagacctaaagacactaataccttgggataaggaaacagttgaagcctctgtcagaaaaaccggaaggcttcttgtaagtaccttgtcttaaactctttttcggtgacaactaaaagatcactttgagttcttagtaacaatacagagtgatttccttttctttttatgcagattagtcatgaagctccgatcactggaggtttcggtgctgaaatatctgcttcaatcgtcgagcgttgcttcttaagggtaattcactaagacgattcttgtttttggttaaaccctttttgaaactttgtgtgtttttccagttagaagcacctgtaagtagagtatgtggtttggacacaccatttccccttgttttcgagccattctacttacccaccaagaacaaggtaagaataaaa

SEQ ID NO: 226126 - DNA, 1783 bp, Cannabis indica
ttattcaggaatacacattgaaagctaagattacgcattgaatttctattagtagatccataatcacgaggtaatctactgtttaccaagattcgacaattgaatattgttagagattaagaaagtaatgaaggcgtaaataataaaataacaaacaaggaatttttatgtgtggttcaggcattaactatccttagtccacgagtttattttattaggctcattggccgatcactgttgatacatatataaaaacaatagacttttactcccttccaccgtgttcctcctaaggaagaggaagcttagtaggaatattttggagttaatagtagggttacagagatgagtttgtttagaataatgaagattaagtcttcaatccaaaggtaaaggtctaaagggagatcccttttttgtgccaactccattgcataggctatcttcgatggatcaccggagggatgaaatcctaccattggattggtaggtggtgtatttcccatgtggcttttatgggtgtcagaatgtaccagctatacaggctgggctttggacgcgtgtcaccttaggctcattcttatttgaattccttttactcataaccattagatcatttttagcccagtatacaaggacatacatgcattacacaatagcgcatagtgggggacaacctctgacatcgtacatgaaaaaccttagtccctaggtccatagtcggacatgcgtgggctgaaccttcgcgagccaaaggcgtatctcggactagtgcctccataaggtgctttcacatggtttgagaatatccatattcctcacgagaggaaaaggtctcgacttctgggatggaatgagactctagctcacggatacccctcgtatggccaatcagtaggggagacttcttccatggagacctttcccgcaatattaaatgccttcgtccctcttggagtgctaagttaatcatttgggtggcttaatgactcctttgccttttttcattaatatccatgtgtcgtgcttacgaaaatgcggataacatttatcccaagcttccaggatataccatggttcgggagcttgtagtatctctttctaaaaaaaaatttcgcgcacgtgggacttaggacaggttctttaattcacttcaccatcaatcgcgagactgaagcatcattactgaaaatgcatgattacttatattcttttgttagtgccttaaacgttgactttgaaattttttgtgtgtggtgggtgcgtattctgcgcgatgctcaaaatggcggtgattagatttgtgctttattctcattcactgtatcccttttacgatgcatgcaatgatgggagccgactattgggaagtgagatatccccttagtttttcgttcatccaaccgtcagacaccttttgagtgagttaaagtgtctacttcttgtggaaggtgcctcttccaggtgccccataaatactttcagaaactgttccacttttccctttccttgcccatcaaaacaatacactttgagtctcaaatcttctcatgttgtataagaattcatcaccattacagtcagacactctctccttcatcgtggacgtttcaccaaaaccgttaatccccacattgtcttgtcaactggtaagttttcttgtttgtttacttgttttataattttgaggaatttgtgaaggtgcctttgcttctggaacactggttccacgtccattgtcttcgaaggttctggaattacgccatgtgctgacccactttgt

SEQ ID NO: 226127 - DNA, 963 bp, Cannabis indica
gggagcatgatttagtacatattgtcaaacttcgggggaaaaattactaattagccaagaaaattaattagactccatgggatgaataatgaaaaatatatatacgtatatattaggatttaaatataatataaatatggtttttaataaagacatatgctaaaatttaatataattcgtaataatattgtcatttcgttggttttaaatataataattaattttatgtcaataaaaatataataattaattctttgtatacaattaaaaaattagatcgccatatataattggaactctatatgcgtaaaagtcatgtaaataaatattatatactaatttttaaattatcttccaatatatattaatttttgggaccttgttttttgttttttttttcctttcataaacacgctatataggccgaaattgtttgttgagtttattaaatttgataacaagttttaagttggattaaaaaaatgttatatgttggtggtgctccaagataaagcaatactatattcaaaatgttatatatgtatgtaaaaatttaaaagagaaaaaaaatataatacattttcatgagcaccccctaaaaatcaagtgttgtatacatatgattaatgtatatgtgtatttaaagagaaatgttaaatggcactagtggtgtttagcactcttttatgtgttaatatatattggttcaattaaatatcgggttccacataatttaatataatttttagaaagtatcgccagccaatcgtaacacgacatgtcgagaaggtgttaggcaccactagtgcctaatagtaatgttcataattatattaaattatatgagactgatacttaattgaatcaataacaatattaacacgtaggaaggtaataagtactactagtcacctttaacgtttctcttgttgagtatatttaccttagatcaatactaaaagc

SEQ ID NO: 226128 - DNA, 1650 bp, Cannabis indica
tttttgttagatagaggttagaatttagttttgttcatatatttggctttgaaaggagaacaatatcattctaacgataacttcaaaaaaaaaaaattgtaatgatatcatgagaacaattcggttaactaaagtagatgcagtagaacttatgtttgaatttttagatatgtttaggtttaagttaagttctcactacgaaatgcataaagaaataagtatataatcctttttttttttaatttgaaatacaaatttgaaaacaatgtgaggatttaaacaagaatctggtgtctatgattttttgttattctaaagcttataatttccattttagatttcagtgaacttaggaaacaaaaacatagaagtgaatggaaagggtatgtttaggcagtcctaaatttattgatccatcactaatcaagtaactaaaaatattactaaataacttattacgagttattgttttcttaaaaagaaattctaaagaaaccaatatttcgatttttgtcttacttctgttatctatcaattgtaaatgaaactaaattgttgttgtgctatctaagcaaaagaaaaggaatgttgttgttgtgttgtcttttgtttctttttaggcttcaatactgctttattcttgcatgatcgtttgttgtgtctgttttgattgcaatttcaacatctaatttgtaattgaaactcaagtatatttttgtatctgtctttcttagaacggccaacatgtctcttatgctttggtggcaacacaattctttccttaatttcatttggtgtaccccaacttattggatcacctaatggcaatattgtttcttcatatgttgtcagaaaggattattttgtgtagtagtacgagcaacagtcatagcaagaaccatgcctctttgttattagaaccattgcatgtgcacaagacatttcatcaaattggaagtgtacttgtgcaagtttttttctccatgtctactatataaaatttgttcacgtcatggactaggtatatctttagatttaatatttcaacatgcattgttcaaaaaagttagtatgtcttaattaattgaaaatgcatataaatttattatacatgagtagcctttgaacaagaaaaagtaaaaacaggacaagaaaattgtcaatataaactaaatcaacaaagcaaattaactttacaatctaaattgacaactcaaaactaaattgaataaaacacatcacgcttacaacaatcaaatgcatttattgaaaaaaagttagtatgtgttcttaatttatagattatggatgtaaatttattatacaagccaccataccttatatttgaggctcacttttctttgttgcaatagtatttcttcaaggattttttgccaaaattgtgaatgttcccaatgctctattcttgttgttccaatacaatttttgtaccagacagtggaggcattctaataatttttcaactgggaattccctgatttctttgattgctgcattaacagattgagctatgttacttgttattgttgcatatcgtttgctgcagctgtatattcttgtccattttccaataccaacttcatcaaacaagtatggttttatcctctcatcaatactgtccaagtctct

SEQ ID NO: 226129 - DNA, 1205 bp, Cannabis indica
tccatgtcattagggctacttttggtggaaacacctatgtatgcaccatatgtaatatatatcatacatattacatatatcatatattatatacacacatagatatacatttatatacatgtatatatattacactcgggtatgggaattcgaccaccatggtcccccgtggtcggctgctccaagagccaccatggccacggtggccatggtaggccacaggtcaaatgggcacaggagaaattgaatcagaatggcgcatgtgataaacaagtcatcaagacccgagccctcacagttcgtcatcgtcggacggtaatagggccataaccctcacgagtcatcttctccagccatagtacgaacaaggaccaccgtccctttatccacatacacgggtcacaagacccggagacccataatgggtctatccagtcgcataagatcaaataggattcaaatccctaactattgctctatgagaagctatgacatcaacgagagcatgagggaggactgatcggcccttgtcgaggttcgtcactacctagaggagtgagaccatggaggtttggggtggtgaaaacaatcgagacgttaaacgtccttaacgtctccatgcatgcagacctactaactcatgagcatgagaccaaagaccacggaaggtgatcgacgtcatgcaagttggggtcaaattacttgagctaatggtggtggcggttgtagatgtaatacatggctggggttcgttcaaacttgagctccgtgcttcatgagcattacatcataaaaataatttacataaaaaataatttttagaaaattaaaattacataaaaaatcctgtgccccaatattggtttacattattttctagaaaaaataatagtgaaacctagcattattacaaaaatatgctttagtgacacactttagtgacacgtacttttgtgcgggtcactaaaaagttagcggtgagtttcagtgacacacacaaaaagactctaaaaatttaatgttagtgtcctacaatacgtgtcactaaaaatatgaagagtcactgtagagtaattcccataattactattacttttttttaaaaaaattgttaacttatagtgacgcgacatgtgtgattgggtaaatgtatcgtgacatgcttggcatgtcactgtataataaccttaaattattattttttt

SEQ ID NO: 226130 - DNA, 3605 bp, Cannabis indica
gagggttgcatcattggaacttagtacatcaagggaacctataagggcgtgatgttagtgcaaagttagttagatggttgagtgaacatggcatacatatataaatagacaagggtgatatataagatagttaactcgagagtcatatcctgcgagatgcacatttagatggaagggtgtcaatgaagagttgggtagtttgacattcacgtgtgggcttgttgttgaggacgcaaatagatgaagtgggggagagaccctcatggttcagtcggcagactaggtattcattacaagcatcgagttgagtattatggagatggaatgttgtttaagatgtaaaattaagaagactcagcacacgggcagtgccaattatatagggtgaaagtcagcaggactcaggtactaagataacaccattgtaatgttggtctaaggtgaaagtcagcatgactaaggtacataggcaacatagaaatgtcgaggggcgaagagttagtatgactgatgcattagttcaacatcttcatcaatgtgacatttggaatggagggaccgtatgcgagctataccttgagaggtattcctctaagagagaagttcttcccaagttaatgtgggggagcccactaatttatatgtttgaagaatcagggtacttgttcagttttagtgtgtgaatccagaggaaaacactacaacagatggcttattcagtgcaagacttgcatgattaatacaagctgcagatagataatatgcatgggtgtaggctgagattaagactgagctagtttgcagcatgttatgggcgtgctttgtgtttgtgggaacactggtgttgtatgggacactgtaagtcgaatggtttagagagcatatgccgatgggagatagcggattgagatgacttcaagtcttaagagtaagacttcgtgatatcaagtttatcaaaatctagggagtcgtcaaaggatgcacaattgattttgggagatggacttatgacacagtgtcggagagccgacacgagcaaaagccagagggcaaatttatggttttgggagattgatagatcattgaccacatgaaagaagctcagaggagcacttatatattgggtcagaagggccttttgcatgaagtcgtgggtgtgcggtagggccaaaagactaatatattgagtatttttgtgtgcaagagtgcacttggtgctgcattgggtacagttggcttgcgagcctcgtccaggagagacacatcaaattttgtcctacgataaatgtgtcttggtcaattgccatcgggaggatggtgcaccatggagttagcatgtgaagtttccgaagggacttagcttcagtggaagcgtgctctataggtgttgttgggtacgattggtttgcgaacctcacccaaggggtgcaccatattccttgttaaaaggagagcatgcattggacatttggcgaatgagctactatcagaggatgtgttagttttagagtcagtgttgcaagggtgtgatatcaaggaaatctaattatgaataattaagatttattatatattatgggtaaattaagtagtaatgagtaggattatgatcttgctaatttaatttagcataaattataaattttgctataagtggataaataaatgtaatttattaattattgagatttatttgaaatatgtgaatataatataagttatttgtgagataaaaatattttcaggtgcgacaaccctggagacccgattggaggtcaaaaatgtcacaacgatattagttagaattattgttggaattattgagttaagtctattctagaaatattggggtattttggagtactcagagttggccaaataccctaaaattaaagatttcttaatagctaaaaaataataagataactattaataataaaatttttattaatattctgaatattattattattattattattattattattatgaatttaatatatattatatatattattttttttaaaaggctcttttaaaactaagtcatatatatatgttaagttataaacagtacgaacaaaattttctctttcggtgtaatgaaatcttcttctccctttatttattttctttgactttaacccgaaatctagcgatctaagctccggtagtagcgggatagaaaatcactgaagaaggagagctcaaggtaagatttaatttcattttatattaaaaataattggttttatatagtggctttgagatttagagtggttatagagattctgacttcgtagaattattctttggtagctacgagactagtttcgatgtttactagttgaatgtgaggtgattttgagttaaaaatcaagtttggaacgttttaaagcttaatccgaacgttaatggagtttttcatttaagggcttgattttaatttctgttacataagaatagtagtatttatgatatatatgtgccctgtgaagtttggagtgatttggctagatttcggtagtgtttcagtgagtgcgaaagttagaattttcgtgttctaccgtttttggaaattcttaggagttgagaaatcgtatttttgtcataacttttcacttgggtgtccgttttggatgttctatataccgtttcaaagcttgcaatgagctctatcatatggtgtatgtttaagagcaaaaatataagttttattttagtgtgtttgtgctacaggatttagtaagaaaccttaggttgtcttatgtgagtgctaagcagtattttaggataaacacttattggtttacttttgttgtgacataggaccgagatcatcggggatagttctctacttgggttggccgacatgtattaacctggattaaaggtaagaaaattatattgtattgcatggtacgttgtgaattgattaatattgagatatgattaataatgttatataataaaaagattgattggttaagtattgataatataatgatattatggatgtgatatatgggctcacctgattggtgatgcgttgattttgacgacatatcgagcgtaggtatgggcatcggtgatatgaaaatttccaggttatggcatagaatgaaactgttgtagggcttcctgccaggttatggcatagaatgaaaccgttgtagggtttcttccttgagatgtacttggcgtaggtacgggagtcagtgatatatgagtactgagcataggtacgggctcacctaattaggtgatgcaattatgtgatatgtgggtgccaggctatggcacgggcttgccttattaggcaatgcaatagaggattatcagactaaagcatcgacttgcctgattaggtaatgtggtgtaatgaagataattactttatgaggtaacatatatataatttatattattaaatgaatatgattcctattattattataatagttttgtattactagatatctgtatactgatgcttgttcatggtagatgccaatagtgatttggatttcatgttatgaataatgtgtgatggtttgattctgattgcctataaatgataatattcgaataataaaatatat

SEQ ID NO: 226131 - DNA, 5426 bp, Cannabis indica
  modified_base (5412)..(5412): a, c, t, g, unknown or other
  modified_base (5417)..(5417): a, c, t, g, unknown or other
cacttttctattcagaaaaacctagagcctctctctctctaccttggtcgaccactctctctctcttcctccttaagattttgaaacacttagtgattagaaataatttccaacacattgctctaagtcatctcattctttacaaagaaaaagttaatgagcccacaatcctcaacgtcaaaaagttgtgactagtctgaatggtttttccagatagcttgtcctccgtaaggaaagtatttctggatagcttgtcattagtttagagacatacttccaggtagcatgttgtcagtcttgaacgcccatctggagggcttgtatctatccagatagtctcgtccggattgattcttatggattatccatactgaaagtgcattattgaagctgacgtggaatatgttgctggagctgacttggacaatatcatattaatgtgttcgacgtcccaacatcatttttttaattaacctccttcacacttttcttttaacaaacaaaaattatgcacatttttttaataataaaaaaattacacatatgattagaggtaattatagctttttttttgttaatgaaactatgattttttaattatcgtgatatagtttctccaactgaaaagatctctaaaagttgttttagttatggaaagataagtgccatccggaagggtgttcctgaatttctatcagttccacccgtaaggattctcagggaaagctagtctttttttccagaaaagagttatgaatggctagttgttccctcctagaatggagtcccgaatagtcgactctaactgtgttttcctatctgggaagtcccttcaacatgttttttggtcttcagtgtacaaatgtgcactcatcacaatgccataaagaattgcacaaacatggtataattgaaaatatgaattattgggacctaccattttttgaagcttgtgttttaaggaaacaacataagctgaagttcactccagcaagacatacaactaacaagatactcaaatatgtgcatgctgatctttgggggccatacaaagtgcatactcactttggtgagaaatattttttttttatataattgatgattataataggtgtgtttggacctattttctagaaactaagaatgaatgcctagaacagtttagagtttagaaaactcaggtggaaaataaaaccgatctaaaagttaagaaccttaggacagacaatgggttagagtttattaactctgaatttgacatgttgtgtctagagtatgtaatcaatagttatagaatcatagtgaagatcccagagcaaaatggtgttgctgaaaggatgaacagaaccttattgagtatagttagatgtttgttgttcaattatgagttagagaaaccagtttgggggaagctctagctactaccacctacattataaatagaagcccaaacaaaattataggcttgaaaaccccttatgaactgtggtacaacaaaaccccaagcctaattcatctaagaacctttgggtgtacaacttatgtacaccaatctatcgataagctggaacctatatcagttaagagaactttcctaagttatgccttaggtaccaaggggtataaaatatgtattttcaagaagggtagaccaaaggttgtgattgttagaaatattgtttcaatgagttaaaatatcctcacttgacttttaagaaaggtagcgtgtctccgtgtgatgcaggagaaataacactacgcacatggaaatggaatatggaaggaaacacttggaagaagattcatagccggaagctagtatggaaccgaaaataatgcacaaacgaaagttgatgatgagccaaaagattacaaagaccaaataggggttctgggaggattcagataggaaggtttggaaggttatcatttggcacgtaatagaaccagaagatagattcaccctccagcaaagtttgcggaagcagacttaatagcatttgcactgtcagcagtacaacaaactaaaattgaagatcccagaagccataaagaggtgattccatgtggaaacaagtcaaaatggctccaggccatggatgtggagatggattctctctggaagaataagacttgggtagttgtacggaagttagagttcaaaaagattgtgaagtacaaatagattctcaaggtgaaagagggaattaatgagaatgaaccaatttgattcaaagccaagttagtggctaagggctttacttaggtggaaggaattgactacactgaaatcttctcacctgtggtaaagtacaagatgattagattgatgttgtctttggtagctcaaatggagtttgaagttgaacaaattgatgttgaaattgcctttcaaaatggattattgaatgaagagatctacatgaagcaaccccctggttttcatgtggaaggaaaatgagttgaattagtatgcaagctcaacaagtccttatatggtttgaaatagtccccaagacaatggaatataagattttatacttatatgcaacaaattgagttcaatcgatctacatatgatcattatttatattttaagaatctagagcaatctacagatgtgttcttattgctaaatacagattatatgctcatcatgagcaaggaaaaatatgagatcaaaagtatcaaagccaagttgaaaatataatttgagatgaaggagcttggaccagttcaaaagatacttggtattgaagttttaaggaacaagcaggaatggacaatcaacttgaagcagtctgggtacatcgagaaaattattcagaagtttaatatggaagatgcaaagagtacatccattctgttgggcggacaatttgttgtcgaaggaatagtgtttgaatagtgcgaaagagaaagaggaaatgaaggttgtaccttgtgatgtagttttaggatgtctaatgtatgtaatggtgagcaccaggtcaaacatagctcatgctctaagcatcctgagttggctcatgtccaatccaggtattgaacattggaaggccctcaaatagttattaaggtacttaaagggcacttgggattttggtctaaactatgagaaagaaaaaggagaactggagttaaaagggttcgtggacgcagacaatgctccgaatagagatactacaaaattgtccacttctcgcttattcatgagaaaccagaactgtatatgttggaaggcccagttacagtatgtggttcctctttccacaacagaagcagaatttatggctacgacgaaagcattcaaggaagctctatggctttggggaattttgtttaaattgaaacaattaagaggaggagtgattgaataccggatagtcagtcatccatccatctttgcaaagagcccgacttatcatgaaaagagaaaatacatagatataagactctactagattagagagaagatagaagaatgactggttgaattagaaaaggtcagatcagaagataatcttgttgatgttcggactatggtcttaatagtaaacaagttcaaacattacttgaacttgataaatctcagaagttagtataatgagatttctggaacaccaagtatgatgactacattctttcttcattaacgttatattttaatttgaacgaactaagtagaatttgtggtatagttcctccaaatgaaaagatctccaaaagttgttttagttatggaaagataggtgccatccagaagggcgttcttggaagtctatcagttccacccgtaaggattctcaaggaaagctagtcttccttcgaaaaggagtttcagatggctagttgttccttcctagaagggagtctcggatagttgactccaactgtgcttttcctatctgagaagtcccattagcatggactttggcctttagtcccagaagcgtaagtctcatccagaagcacgtttcttgtgctgacgggaagattttgtttagaggactttattaagtttgttaagtcctaaccaacttaacaacttagcacgtacaaccaccgactttagaatctatatcctgaacctataaataccaccaatacttattaattgaggagaagagttcagaggtgatttcgaagagagagattgagaggtacagagagaggtacaaaataaagagagagattggatttaaattttgtatgaagaatcttctatagatgaagaagattcttgagtgagagtgtgagagataaatacttttagagaatctgacaaataatcgatattgactatattgtacctagttcttgctcaatcaataaataaaatttggtagtgttcttgaactgaagtagagccatagatcacatcgatctaaatgatttgaactagcatatatcttggtgttggttgtattattttatcattttactactttaattgttcttggttttaatactctactcatttctgttttaatctctgtttgttgcatgtgaattattaatcttatcattactaattgtttgttgattaaattttaattaattttaactttggacattagttgtaattttcccataattatgattgaaaaaataactaaatttcatctgtgattaacattattttcatttataaattgaattcattattgtatgttataaatgatcttaataaatggggtatcatttagttgtagttgtacaaggtcatcttgagttgatgtttcttcaaatttattttcttttaattacttatttttgtgaatggtataattacaacgatgatacataaatatgggtgtggttgacatatatgataatgcattcaaagcatccaaaagtataaagaataatagaatttatagtaatagtaattgagtaaacaaaacgcatataaatgagtgatgtttaaaagttttgctttctttcacattaactcctaattatgtagcatttttatttctttatagtgtagttgacttagacaacaacaccaatataattatgcatttggtagatttttatcacacattttcaatactatttaatttggcttatggtttgtcaatgttgttaaatttgttcttatatgattttaataaccctaaccgagcccccaagagagtgattagaatctatgttgataatattggtgttgctagaaatgatcaaggtaaattaattaatacaaaatcaacatttttgaagcaaccaattgatgttactacaaatgagctatgtgctataagaggtgccaatatggctgctgaaatgagattcttgagttttgtgattgtgttttattgctgccttgcgataacttttattaataggcaagttagccattgtgccattggcacaattcagtttttagagtgaactatattttagttnttagnttagctaag

SEQ ID NO: 226132 - DNA, 1813 bp, Cannabis indica
gagcaaactggtttctattggcacgaaaaaagatatagagaactgatttttttgacttgaactgtaagtacacacatgccatccttttccttccccattttattttagccttttatttaaatatatgattaggacttcttctatctatctagaaaacattgcatgttcgaatcctactactcttttattgctcgagaacaaagccttgtacaaaggttttccacaaaaagatttgaaagtagagaagttagtcatcaaaatcaaccttagataagttggcttgcttgcttctcactagagcattgacgcctaccatgtccatgatgtccacagtgaccctccagatttcaaagaagtcattgcgacaatagttgtagacgaagtaaggaaggccatcaagaaggacaagtgatggctggaagaatgggctcagtttcattcaaagcccatgaatgaggagatggagctggaagtccatttcaaagcagacattcggttggaggtgttctaggtgccaacacatttggaaaaggtaactctcccttccatttattatgtgctccgcatctggaagacctagaccgagattttcagaaatagaataaaaattataggaacttaagaataaataattaatgggtaaagtataaaataagacaaacaaattttaacgtggttggggcgttaagtagccttagtccgcgagtcggtgttatttaataagcttttgcttgtaaatgccttaggaaaatacacataatgtctattctcaaattttcctgagcaaagtattcaagagaattcaacccttaatccatgagattaatggaatatttattgtaatttgagaattacattaggttttccctttccctctactggggagtttacagtgaagaatatgcgtcagctttctcatgaagtccaacctatggagaagatgatctactgactagacagatcagattgggattgaattggtcaacaccgcatacacaaattttgggcaattaatctaaattaattgcataatatttgttgtagaaagtttcctttttaatcttgatttgatgcactgttgtgatctgccaactagaatttccttatttacgtgcaggaatataaagggaaattgaaaaggtcttctaagaagatggtgtcttgtctctctagtcttgtgataccaaacatgtcttctgggcttagtttgtcaaaggcagaagactttacgagtgcaaaaatgttgcatgtttttggaaggtaacatcaagatgggcttggcccattttgtctttcatgagggtgccacataggtcttaaatgttgatctggagcctacgtgtccaatgccaaaaacatggataacatttaccctccaagctttcagagtgttgtgtgtggtggaagcttgcataaatttcttaacttggacatgtggaaattgaggaatgaaatagtggtatttcaaacaccactcgaccacaaaagctggcttccgtctgtgatgatgatgcgtccacgtgtcagtcgcacgtgtttgacaaggcgcttccattgaggagtcgctttccaagatcagctacattttgacggctatttaatttttggcacaaaaatccaaaaaggggcattttcatcatcacttcacaccttgattctaaaatgtattaaatgctaagatacgtttggattgttggactcctcgatcgttggatggaaagtgtgtctttagagaaaaaattgtggccgttaccactttacatcttctcacgtggattgcctttttgccttaaatacccctagtgacttccag

SEQ ID NO: 226133 - DNA, 1129 bp, Cannabis indica
tatagttacaacattatccctgtaaatttttgaatagtttacagtaccgaaaatggagttttcgatattccagtctatcgcacgtgtttaaaaagcttcaaatttattttcggcataataaattattcaaaatttttaaaaaatttataggaaggatgttgtaattataacgaatactactatgaaacaaagttttaaaaaaattattctggtatatgttcaagtacaaagattgactaagagattgtaataggagattgactgtagtactctttatttttttcctcttcttctcatcattctaaattatttagtgaattaaaataaatataaaaaataaaatcaattatttaacaattctaaaatatactaatataaaacttagatattaactaatttattgttttttagtgattttttttacaaatagaatatttttataaatagtttcaattaaaaaatttatatttatttttaggtcttattttaagtttaagaaatttaaaatttgtgtttggttgttcttaatacttatgtgacatgttagactaatttaaattaaaatatacgagatctgatattaattaattgtactaacaataatacgaaaattcgtgaacatggatagatagcaccagaagtgatagcagagcacactgtgacagccttacgccggacagtaccaccagcagtaccggggattgtgttcctctcgggtggacaaagtgaggaagaagcaacccaaaatctcaacaccatgaacaagctccaagtgttgaagccatggactctctccttctccttcggccgagctctacaacaaagtacactcaagacttggggtggcaagaaggagaatatcggcaaagctcaagaggcgttcttgacgaggtgcaaggccaactccgacgccactcttggaaagtacactccttcttcagcctccggtggcctcgcctcggagagcttgttcgttaagggttacaagtactaaacaatttgaagaaagaagaagatatgagagaaaagcttactctacgtactcactatgcatgatcatataatgtgtttttttttttcaagattttcaatttatgttaatatatcatactctttggtatatatattg

SEQ ID NO: 226134 - DNA, 1394 bp, Cannabis indica
ataccaatgctatttttgaagtctttcctttacttttctcttctctcctgccacatcatactatagcccacctcctttttcatcaactatataggcaactctcattagagttacccttagacactagtggtaaaactatggtgagatggataataccttgcatatatagttaatgatatcacattatagttatttatttaaattatataagactcaatatttaattttatcaatagtaatataatattttagagagtattaaatactacaagtgccttttaatatttctttttttattattttattttaatgaaaccagaaaaagctttttaatacttttataaaaatacaaatagcatgtattttctaataatatttatatagtatatttatatttttaaattatatatatttagaactctcaattcaaatttaatcattataatcaaactatcttcaactatataagttttaaattaattttaaattcaaatttaattattttattatatataattaacagtagtttgatcaattaactcataaaattttattgaaatttaaattcaggatatattaaatatgagcaatttcaaaaatataaaatactagataaatattatttgaaaacacatggtagtagaattgtttttctttttttttttcatataatctgagaatatccaaaagacatataagaccatgtgaaaatgatcataattaattagacacaaatcaaagtataacgactgatttatactaaaaaacctctcttgcaagtgttatcctgaagcttaaagtatagggccaactagtcttatcaattaagagtgtggaactaattaattttggtagttaatcaaaaacaaaatgacctggctgtagtgaggtttaggtcattaagaatcgggttcctttaattaattactttattagttatttatatcataacaaagcaagcaaagcagaaaagctagaatatataaaaaagcaagactttacttccctgaaaattctgtttggcccatgtgacactattccctttttttatttttctttctaggataagcataataattttagaagaacttacaaaagtactgtaaaataagtgaagatttgcataaaatattgtcacgtagaattttttacatttttactatactaattttacgaaaatattgtgtttaaagtttcaaaattacaaaaatattatgttttagtaaaatataagacaactcttaaaataactaaaaaacaattctacaacaatttaacaaaacaagatgaaaataattataaacaacaaaaatataactacaaagtaacatattagtaacaaaatattgacctaattacaataagcaaaataatatcaactcctcaatatgttt

SEQ ID NO: 226135 - DNA, 1990 bp, Cannabis indica
tcattgtgataaattgaaactaatgttcgactatggaacaggaagagttgcagaatatgacactccagcaagattacttgagagagatgattcctttttctctaaactcgtgaaggaatactctatgaggtccaagagtttcaacaacttaacaaactataactaatatcacttcaaatattatgcattgtttagttagaccaacaagttcttaataattatagacttcaagttctctagatcaacaaaacatttatttaattaaacaagactacaaatgattagaagcccaaatgatatgagatcatgcatgaattgcttgtttgttgagaaactctgaggttatctccacttctgatgttgatgctattattttcatagatttttcttagttagaatttactatctatgatattactcttgagtttgaatccagtaagttcgattttattgaatttggtagcagaattacaaaggtttggagcttttcgagaggctctactctcctactttcacctttcgagagggtgaaatctctccactcgagtcttctgacttaatttctcagctccccttaaatgaactagctaccctcctatttatatgcattggtcttttaagacattagccacttaggattacaattgggcccacaaaataaaacaaataaaagaactaattaaaagtccaataacaaaagaaagaagaattaattattccctttaattcttatgtgatacacaaggagtcctttaggcttatcattacccctaaagaccttcaccttgttctcaaggtgaaaagtaagaaactgtttagagatagtgtgaaagtcttcccaagtagcttcaaactcctgcagggactgccatttgatgagaacttcaatggtggtggggtatgaggccttgacgcgttgctggaaaatagcctatggcaggacacgcaactttaaattcgacttgagctgggaggaagagttggtgaggaatggttatcaccaatagcgcgacggagctgcgacacatgaaacacggggtgaatggtggcatcattgggtaattggagcttgtaagcgacttttcccactcgttggataaccgaatagggaccatagaaccgagctgatagttttatgttggtgcgtcacgctagggacttttgccagtacgacctgatcttgagatacactttatcacctatttggaattccatgtcatggcatttatggtcagcatgtttctgcatttgttgttgtgcccttagcagatgcattcggaggtcatcaagtatggcatcacgagactccaacaagttattcacgactgaaattatggttgtccctcttttatggggtagcaatagtgggggtctacacctataaagtgctttgaaaggagtgcacttaatggaggtgtgataggaggtgttgtgccagaattctaaccatgcaagccatttggaccactccttggggttctcataagtgaaacactggaggtaattttccaaagtttggtttagtacctctgtttgaccatctatttggggtggtatgcggtgctacgtttgagttaagtgccttggactttgaataattgttttcgaaagttgctaagaaaaatttgatctcgaccagaaattattgattgcggaagaccatggagtcgaactatttcaaccatgaagcattcagcgactatgttcgcagtaaaggaatgtcgtaacttaaaaaaaatgggcatacttggataatctgtcaataaccaccaagatggtatcccatccacctgattttggcaagcctttaacgaagtccatggagatgtcatcccacacctgagcgggcagcggtataggttgaattaagccagaaagtgtggtagtaaggtacttgttttgctggcatatggtgcatcgctgaacaaaattgtatacatcagctctcatgctttcccaaaacagctctgcttgtaagtgtttgtaagtc

SEQ ID NO: 226136 - DNA, 2013 bp, Cannabis indica
ataaaaatattttttttattatatctatttaatgttaattacatataaaaataaaatagttatttattaaagaaatatatttattaattagtaaacatttaaattttattgtattttttattaattaaaatgatcatttctatatattttatcactatgttatttatttttgttcgatatgttatttatgtacatcatccgcataaaatttttgtataataaatatatatatgtgattgctaataatttaaaataactcagttaaaaaaaattgatctcacagactaaatttatatatcataatattttatttataataaatgataatattattaatatttaaatttatttattaatttaaaaatgttattcaaattaatatgatggaaggtaataattcaatcctacccttttttaaggtatgaacattaccctcctcaagggtagttatattactaggggaataacattccaagactaaaccctccaaacaaacaaggtaatgtttcacattaccattcccttactaggattaacctattccaaacagcccctaagatatatatatttattttcagaattttagaaaagtccacgtgtcaaaacataaaaggttgacctcaaaatttgtaacctttattgtattttgctaaaagtcaacagggttgtgttgaccacagtgcaaaattgtctgaaatgtatagtattggacatcacaatcaacttttctataactattcataacaaaaaattaaacttaaaaaaatcttctctataactatttgaagtagacagaagtaagtctagtaattgtttggttatttcattatgtgacaattttgactttttttttttctgagataatttttacattgatttgataggcccttgatattccaccaagcccaacctcaagccctatagatgaagaaactgtaaacccaactaggtccgtttccaggcccaaatgtttattgagaaaattattggggtaagttgaaaaatacccctcttattaatcaattaatcaaatttacctttaattttatatttatttgaaacatacctctttttatatgtattgtacccaaaataccctaacataagagagtcacatggagagtatcttgaagtgacagaggcaaaattggtacaatgtttagaaaaagaggtaaaaatgatagactttaaaaaagagggtaaaaataaaagaggacaatataaaaagggtatagagtgtaatttcctcaaaaaatattaggaatttttacaaaaatactagattttggagaaaaatttacaattttactgttatatggaattttttttataaaaatactatctttttataaataacagtggaacagctaaaaaacaactataccgggaacaattgtgaaaacttagtatttttataaaaaaattttgccccacagtaaaaaagtaaaaaatttaaaaatttaagtacgtggtgtaaaaatcccaaattattatgctacattacaagtgttttttttttttttaaaatgttgtagtttgcaaagtgatgaaatttaaatgttaaaatagtattatgaattattacatatataatacaacaaacatgaagataatgtaatttgctgggtttatttctttctttgaaatataaacagatgaagggagaaagattatgattattttttaatggttaaatattattttagactctatatgttataaatattaaggattgtattttctaaaatatatagtctcaaagctcaattttaacaccaatttttttttttaaatataactatcctgaagtcaatttcttgtattattctaattataaacatttctaactcaaattattattaagtattattttgataatcttgtcataattactaccagggtcggcccaagcattgggcagcttgggccattgcacaaggcctccatttttttaaggttcattttttttatttttattttaaaaaaaaagcctattttttttctctttttttt

SEQ ID NO: 226137 - DNA, 2314 bp, Cannabis indica
aaaccgcaaccgcaccgcgaagaatttcaaaccgcatttttttttgcggtgtggtgcggtcgggcggtttgagcggtttgatatacacccttaatgcaccatccaagtagaaagttctatgggtgtcctagatacgaagtaataaattattattattattattattattattattattttattttttaagttatgtaatttaaaatgtgtttcaattggaatttgtaatttttatttcattataagttttccttattttttatttctaagaaatgttgaaaaaggttgtggctttctaatttgggtggacactgctcttcaataaggattcaatcaaaatttaagttgtttaataacaaggttaaaagaacttgaagatgatgttagagacctgcacaaggtttttcagaaagaagatgaagacattgcaaatatttttagtatgaaacttgtaaaatttgagttttttatttttgtttttgttctggtattgtttaacttatcataaagtaatgacaattatgattaagtttgtaagttattttgaatgtaagttagttccataaattttaaatttgagttgttgggttaattatgtcttctaacattttaaatcatattcaataataaattatcattattttattttttttggtgaaagttggtgtctgaggcaccatacattaaagttttagttattgagttaaatatatgttccaatattttgagtcatattcattttttgttgtttgtgtgtaataaccgcattttataatatggattagtaaaggcaattagcactaattatactaattattaatatttttatagtatttgtagatttaaattatttgtgggccccattgttaaaagtgggctttagagttataatttctcaattttggagattttattaaactctaggagtattatttatattatatgtgaattatgtaatttttataatttttgctcagagacaacggaaaatgtgatggattgcttgtttgatcacatgggtaagtctagaaccttatttcttagtgggatgtatattggaggaaatagaatactgagtttgagcggggttataatttttgactattttacccctagactttaaaatgcctaagtttatgcttaagggggtattttagtaatttcaaatggggggggggggttaggtggctggtttagaaggggcagctggccacttagttattttcacccaaaggaattaacttattcatttaagaaaataagaaaagaaaaaaaagccaaaaattcaagaaccacctctctttttcccttctctctcttcgaaccagcaagaaccaagggagatttgttgctgaatttctcatttcagcaaaggattcaagttgaattcaagttgaggtaacccctagatcatttgctttagtttttcaagctttgactttggtttggatatgcgattttggaagttaggggctgttagggtttaaaggttgtgtgatttgatttctaagcttattttgagttgattctaggtttcggataccagttttgttgtgttgggatggaatttcacaagtttgagctttgaaactcaaacttaggtctttaatggtacattttgattcttggtgtttttctgagatttagtggttagaatatgttgtgtatgccctgtttaggtactctgaaaggtttggtggcatttgggtaagttttgagcgtgttttggagttgttggggaaacttggtgcaaaccggttaaccggtttgccaggtcttgtaaaaccggttaatcggttttgacagattccctgaataactcattttctcaattcttgcccattttagtgccttaattgggtgttttcctatttcctaggatattgtaattccttttaggaatagcagaaccttaagttgtaggttcgagtttcccggattagggtttttgatttgtgatttacccgattgtattatgtgattagggcatccatccagcacaagactttccgtttaggtcggccaactcacttgaatcttgaaaggaggtaacaactgtgtataatatgtaatataaatatgcaaatgtatgtttatatatttgttacactaccaacacttgtacgtatatggtacagagtgcattggtatagtgtatattgtgaaggagtacatcacggtgttaccagcacaagtacatgaaagtacagggtatgtgtggtatatcactcagtggtactcagggtacgaaacaaaccctaccaacactcgtacaatgaggtacgtagtgtatgtggtatatgttggaaattat

SEQ ID NO: 226138 - DNA, 3040 bp, Cannabis indica
ctctctctctctctctttcacacgcataggctctttttatcacttgagattttccaactccattctcatattgtaatctttagagagctactacaaattccacaatacttgtgatctgagagtattatctctggtatcaatacaaccaaaggggagtaggtcattacccgctaactaagggggccaaacctctataaaatctcgtgccttatttacctttttgttctcattgtgtaacacatggtaagtatcagtaataaatatgactcaactatcggttggccaaatctaaggtcaatagttttgtcctttcattaagagcgagttgttaatttatttgatcaatgtcttggttaacacaaagagaactctggctacgacatctgcctcctcgggtgttcctcaagatcctatgggggctgatcccaatgttcatgttccagtcataactggaatccccaccaacttgacagatgtggcaacccttgccatcttggcaggcaccacgaacctggccaccacaactggtcatgtcgacccaaccatcccagtgggtctcaataatcgacctatgtcatgtagggaggaccctccacttgcacctcctaatgaaggaagaacccacgtggagcaacccccaggcaccaccactggatttggtccccggtattaagttggagagacagggccaagaatcggcgagccagccattgacgagccccatgtagacttgagagaagatatcgagttagctagacttagagaagttgtttgtcatgttagccaaactgaagaaccatgtgttgttagctacaatgtatttatgagatggatggataagcatgagtacatcctttgatctcacctggcagagctggaccaccgtaatagagaagctagaacttgataaggcagttcaatgagacaacagctagaagaggtcaggatctcattagagatcctctccaagggagactagtcgacggatcggggaaggtctattgataaatttttgaactaggttcctcaagaaccaggacaaaccttccactatgcgaaggaggacaagtcttttcatgaagatctggtggcatgaacaaccaaatcctagtagctagcggtttggggggccagccagggatcaggctcaataaagcccccagccccttggtggtacacctctggctagccagcagggtgaactcctatctcggggtcttcgagagcgagtaacctaaatgccaatctttaaccggctaggtcttggaatgggtggaaacacccaagataacaacttaagaagtgagtctagtgaatttagatatctagatccacctcactccaacatttggtgtgatctaccctctgtcaacacacaggctacaccagccaatcaggggagaacgggcgatgagaccctattcagcatagggctagccaaccatgaaaaactacccataatagggctggctggccaacgcgagtccccttttctaggagtggccgacccgatcttggctcattcagggctgtagcccattcaagaggggccaatcagccaagtccctacagcaatagatccttctttgcaagcacacttggatcaaataagtcacatgattaagggcttagttggcccaaaaccttcagtgtaacacccgtatttaaaagcttgctaaaccagaattaatcttattatattataattatataatcttataggtcgggatcccaagttttaaaacacaattgaaaaattcatttactaatacaaaatctcgtaatgtattttttttttttacaaacaataggcaacaataaaatacaactaaaatgttgaaagactgaaaccctccaagctgcactgttgcgatatgtacaatcactgtcaagctccaactcattgcttctctagcttagcttttccttaccaacacaaggtagcaaactgatgagtcaacaaactcagtaagatatgcataagcaatgctataaggactttatgcttaagccatcctaacctaaacaacagctcataatggttaagaacattctcaacgaaagtatgaccactgtaccatatccactaaagtaccaactcatactcgtgttggtagggcctttatcgtactcctgggagtcactaagtgttgtaccacatgcttgacaaaccccctagtactcgtgttggtaacactgtaactaccctaaaattctacactgtactaacacccttaaaatcacatttctgttagtgttagtcgtgtaaacaattaataacaagcatacattcacacacatatattatttatgctatcttacctcgtttctgtgctctggtgtgccggtcagcctgagtagaattgcagctcgacgctttatagggcccttggatcaaagcttgtcaattcttaccaacaatccttgaaacaaatcaagcagccctcaaactctagctgctcccttgaaaattcaagagaaagagagagaaagatcaatgtaaatttcctaaattttctaatgatataacttgatttttttctagaattatctaacctctgtataaattaaaaccctcagatttcttaagtcccataaagataaaagtcttccttagcaaattaccaaaattgcccatacccaaaattccatgattaaataacaaccaagggtattttagtaatttacaaacccaaacaatttcccgacactctaatgccttacaatgataccccaatattaataaaattctataacatacaaaatgtgactctctaatggcccaacgtcgccttccatcacttccgaacacagtcataggtaaacgagaaattcacatataacataattaacatatattgaaattaaataaatcttcaccaatatgcaatattataattaataatttaatttcataattaaaccctaattatttaataactcagtatattgcacttaagcgatctttacaattaccccccattaaaaggactttgtcctcaaaatctaacctgaatagctctggatgttgatgttggaa

SEQ ID NO: 226139 - DNA, 1549 bp, Cannabis indica
atttctgatctatattaataagtcaatctgattatattgaaatgagttttatttagggcataaaacccaacaaagtcaatgtgcaaagatacaatttttcaaagtaatccattgtcgtttaaagatgccaacgcattcccgacgtttataagatatcaattttttcctacacaataacttgttgattgctaacaggatagaccctccaccaccagccactagagatgacccaggtggagttcactgaaacctagagggcctacccgcgatacaccaaataccttcaattattggaggaataaaccaaaccaatgtgttgagggagccttttcctccggtagatgggacaataacgtcagtcacccctcttactgatagggacctttaacccttgaggtcaccctcttctgataaggtatcatgtgacacatgttcctcacgatcaaggaacctctcgtcatagacctagtacagaaaaatgggtttactcggtaagcccaatctttcgaacctgccttcatcaagaagtaatgaatgacctacgattaaaaaataatgacggtaagaactcatcagcgatacttgtggttgaaaactctaagtatatatcagaatttaagaaaatagatgaaatacaagttaacttaagaaaatttgtagaacaacaatggtggaaaatgtgctttcttgtattgtcaattcaaaggtatattttaaaaagattttccaaccacccctttcaaatttaagaaaacaattatttataggtgagtcttatttcctttcatttacatgttgatcctctaacggtccctaagttaaagggaaggatatcctgctcctcaaggttatagttgcaggaggtggtcttgcaacttgtactgttgtcaggtgtcaggtagtcctagggtaggagttatggctgcaatatactccttgttggaccatcagagtttgctagtgagacgcctccactactcgtcctctttttgtgcttaggtgttgcaggtgaagcaaggtcgtacccgtgtgtgatgtccttttgcttcttcctgtcataacgtgctaaatgtctgctaccacattgagagacctgatcattcaatacaatgcattgatagggtttgcgatgtcaagaaacatccattcatgcaacgagagtttgaggcatgagagtggcatgcttcatgcgagttgaatgatgcttgtgagtgatctgctgcatgcaagtgtcctaatgcatgtgagttactagttgcatgcgagtgtcctaatgcatgtgattggccgatgcactcgagtggcttgttgcatgtgggtttttagctgcatgcgagtgacttccaaaagttgcgtcctcttgcccactccttacctcttgcctgttctcaccctctcgcccactctcacccttatgttcgttctcatcatctcacccactctcaccctcttacccactttcaacctctcgcccaccatcaatgtaacaccctactagtttaggtacactatagtacttttcttagttaccgtgttgtcctttgctaat

SEQ ID NO: 226140 - DNA, 2781 bp, Cannabis indica
tcttgtttatttctttgaccgtacaattttgtttgatacctaaagttaagttcttacttcttagggtcaaattattgggagtgagagtgtgattgaattgccactactagaatggttctttttcttttttttcccctttacacttgaatttttattttggtttaatctggtctcttggtcaactgatgcattaccagctaaagaggaaaatgtagctaaatatgttcactgatgtaaattgagtaaaatactatatatgccaaaaaaaaaaaaactaactaaacgttgtatacacctctagcatctaggtctggttatcactatgtgttctattttgacgggctctaagtattattttataatattttagaaaatataagatttaaattgtcatttaataaaataagggtttgattgataactttcgcaaaatactaaatcaagaaaaaaaggtgcaagttgtccttgataagtaacatttgggacgtccctgataaccttttcttttggccgaactgaccatgttattagagatgacgtaatttgtctctaatattttttttttaataaaaagtatttattatttaaatttaatattaaaaagattaaacattcattttttatatcaaacaatttcattaaaattaaatatatttatattaaatgtgatgttatcttaatttttgcccacatgaggtggcactccacgtgggctaaagtggaagacgcgtgggggacaggtcagcaccaatcggtcaggttagtgctgtgcattaggggtgtacgttggccagtttagtcagtttatgctatattttattcaacccagtgtaagaattaggttacaaaaatctaagtgtgacttgtccagttaagaaaaaaaaatagtaacctgtccaatgaaattggtcagtttggtcgggttaacccgtccaaattgaccactaatattttttttaaaaattcttatatttttacatttaatggttatattttaattaattttaataatgagaatcaaccaccattaaaaaacatattaatttgaatttatatttttatatagtcatatatatataaaccctcttaagcgggttggtcgagatactttgggttgattgatattatttttaatctacccaatataaagattgggtgggttatattttcatcagttttttcggtttgtatttgtcttcagattatctcaatttagcttagacgagttattcgggttgggtggcttacaaaaatttatgtacaaccctatgtggagctcctcatacatcaagttctcaaggtttgcaaatggactcaaacaagaagagcatggagacctacaagattcacatctttaaggttttgaagcaagttcatcctgatatcagatcatctccaacaaagatagagatacacaagcactagtaagatcctggacgaacctctagctggccggcaaaaggtgacagcccatgtaccgggcagccaccaaatatgattggctgaccaatacacattacgctttaacaactgtgtttttcccataggccttccacaagattccaagtcatcaacgacacacctacaatttcagaatgacttgaactgcccacaaaattaggaaagattcgtcaaagtgtatgtaacgccctaacaataggaacgccacgaatcatgcctaaacataagcaaattttgttaaattgggattactagaaatgtaatatatatcccagaaaataatttagtatttaattgggtatattttattaaatatgcaattattctggtaatgaagtaagattatgattttacttaagttaattaatgtaaatttactaaatggttaaataaagcgttttttattaattacggagattttattagattatgtgggtgtcgtggataccatttttgaaataaaatatatttgggcccagtaaccgtaggaacttagcgtagtggtcaaaaatatcacgacaataaaatatggattgaattgaaaattataccggactagtttaaaattttaggttgtcggtttggcaaattagttaaaattaccaaaatacccttagattttaaatagtttaggttttattaggaagggcaatattgccatttcattttagagttagaatttctatttttctgtcctatatgttttggctgaaatttgtagtggattcatgaggtattattgataaaaaaaaaaagagatttgagattaatttttttaaaaaaaaagttaataagttcatttctttttctcttctttttcttccttgttcgaaccctaattaaggagccagccacatctaaatattgataaaaatacttaaatatgtataattaaaaaaaaacattaattattttttacaaataataataaaataaaaatatatttcaaattaacataaaaataaattaaagagtgtaaatataaaagtcaacagtttattttttttaaaaaaaaataagttaacaaaactattcctattcaattgtacaaacataaaattgataagaaactaaagttgagacacccctttatccaaaaaaaaattataaagttagggacaaacatgttaaaacttatgtatttgtagatcaatttgctaaaaaaacaaatttagtgacaacttatcaaaatgtatatagttaagggacttacagtacagataagacaaatgtgatggtttccttaattttttattgtgttaattttaaatatttttttaaaaattgttagaatttgaggtaagatgaatggggttctat

SEQ ID NO: 226141 - DNA, 4245 bp, Cannabis indica
ttttgtaaaatttatttttattttcattttttaattttattaaagtctggtctaagtctagattcgtattcaggtccgggttagaggccgagttcagggtcagagctgtggagggatttgggtctaggttcagtcggaatttaaaatattaattaagaaaaaaaaaactatttaaaaaaatattgaaagtgaaattttttattttaaaattttgattcttaattaaaaaaattaaaaaatgaaaataattttataaaacttacttttaaaaaatatttaatattttttaattttaaaaacagaaaactaataaaaaaatattactaaatctacctaaataaaaacggtgagtttggatttcttttaggaatgttggggtttcacttacctgctccgcttctatcctatgatgagctattcacctacacccgcttttggtgtgtttctgtattacacttattattatattattattttattttattttttttgttccttcttcgtctttcgattctcaaaccctaatcccaaaaatctcagattacattccagttttgctccagtttaatgcgtggatcgtattcttcattctcttcttctttttatagtatttaactcgggaaattcaagcttcgacgtcggcgatgaacgccttgaaggaagattttttggagatacagatcggcacctccgccgactcgttagcgaagtcattggactcgcagagagagctattccatagccaggtcgatcagcttcaaagaatcgttgtcactcaatgcaaactcactggcgcaaatccactatcccaagaaatggtatgctttctctatttccttttcgctttcctgtttggctatcaagaaatgctaggaattagatatttttaactttccaagttaaggaattacggtgcctactcgttttgacgcgatatgttaatatgcatgagagtaatttgattcattttcccctttaaatatgtgtgagtgttatttgtaacaaccctaagcaatttgaaagaaatgattttaatgaaaatgtctaatttaattcaactccttgctttaagcttgattttacatcaactgccaaatactttggtacatttgtgtttgccagacaggaatgagtgtgcgagcttttattttacttagttattataaatataattaattgttcaattgacatcttctcttccctacaggagtttccgtttatgttcttaaatatctttgataataacttaagatagtttttttctttccaaagtaagagataatttttcttaattatgtgttcagaattgtacttttggaattctccttttctcctcctcatctggaaccaaaatgcaagtgtaaaatgaaaaatcatgtttcaaatgcatatatgtatacttgcatcttagatctctattttataaaacgtaataatgacctgtacttttttgcttaaccatgatagtacttgtcagttcaacgtggatctctgttgtatggttctgtatcatatacattcgtgtttcccatacattgagaagcttgtttagataatgaataacaagcttttttttttatattgttgtatgcaggcagctggtgcactttcaatacaaattggttagtctttctaacagacttagactcaataatgcttagtcattttgtgtttgttttattggttattagggctcattctgttgttaaatgcatttctttaactttgggtaccaaaaatttctgcatttttgaaatattggttataatggtcacatttaactgtgttatttatacgcaggaaaaaggcctagagatttactaaatcccaaggctgttaagtatatgcagtctgttttttctgttaaagatgcagttagtaagaaagaatgtcgtgagatctgtgctctatatggtgtcactgtcactcaggttcttattttttgttctaataaatgatttttttttacctttgtacagtcattaattttctctctacaccttatcattaattttccttgtaggttcgtgaattttttgccagtcagcgttcaagagtcagaagattagttcggttgtcgagggagaaagccactaaatctaattcatgtgcagaactgaatgatggagttcatgcaatctctgatcctttactaccttttcaaccaattcccttaaacaccattgctcccaccggtatagaagaaacaccatcttgctcaacagaagatgatgttctacccggcatagatggcttagataagcaatttgttgagaatattttcagttggatgcggaaagaagaaacatattctgggcaagtgaagctgatggagtggattttgcagatgaaaaattctgcagtattatgttggtatgatacctatcttctcaccacagtataatgtatcagtatgttgccatattttcttctcccatcaccatctgattgcatgtatgtaggtttttaagtaaaggtggcatgatgataatagcatcatggttaagtcaagcagctgaggaagaacaaacaagcattttgctagtgattttaaatgtatgcctgaaattttcttgttaactggcagtacatgttataaaaatttgttaccagcgcattgattaaaataaattacaggttctttgtcatttgcctcttcataaagctcttcctgcacatatgtcagctatactgcaaagtgtaaacagattgcgattttacaggacatcaggtgtgctttgctgtagaaacttattttgttctatctcttcccactttgcttttgcttgtttttgtagggaatttaaaccttaacgtataggtaacattgcacatctttaattgaacgtagatatatttatatgtattgtttttgttgctcttaaattgcttttagaaaaataacagccctttgctctttagctatattcgtgctttgaaaatttgaatctcatttatctgatttgaagaccagacatatcaaacagggcaagagttttgttatcaaaatggagcaagttattggcaagaagtgaagccttgaagaaaccgaatggcttaaaatcttctgttgatgcacagcagcagatgatgcttaagcagaggtaagtttatatctctccatcatgtgtgccacatttataaattgcctgtctcgttaattaataaagtctatatttatgcagtttaagcgatgttatgggagatgattcatggcagtccagtattgatactcctgtgagttcttgtatttaaaaaatagctcgaactagttacgaatggtgaacttattcttactatactttttttgcatactgtgtaggaaaaccttcttgatagttcagaaaatgtcaggtgtgccttggatttctttgttctgaattatatgcagtctcattgtctttgttttttacagttgaggttttaattcttaactttattgttcaggaaatttgaacaatctgtgaaactattgccagcgtcttcagatgatccaaataagaagcacattcttggtttatcttcatcccgtatccttcagatttgtatttttttttctccatttaaaacaaaaattatattcaattttaatataaaactattcaatgtttgtgccatttttgtttagattgagattctacttggattcatacactttaacaaacacattttattgaaaggaaatttaaaatatgagtttatctctaagtagaatgttggggatgattatttccttatctagtaacagaatttagagaacgcagaaaggttcagttggtagaacaacctggcaatagagctgctggaagaagtccacagactactagagcagcaccattgaatcaggagagaccaatgtctgctgatgatatccagaaagcaaaaatgcgagcacaatatttgcaaagcaaatatgtgaaagcgaattcatctcatgaaaacaaagaagcgaagactgaagggcttaacaaaccttcaacttctcaggtcagcaatgtgcctacagcttctaaagttgtagttcgacctgatatagatgaacacaaaaaacctacaataactcccctaaaagttcccaacacactggaagcttccttggagtcaaagccgataatagatttgaaagagtccgtgtgggagaagtgtaagagagtccagatcttgtggaagacacctccaggtacatgtcttttcgtacattttcattggtactttgatttcgtgtctatattactgcagtgcaat

SEQ ID NO: 226142 - DNA, 1160 bp, Cannabis indica
aagagagtgcaaggtgattttaaaagtggtccctcagggtttaacgtccttgggtgttagtatgatacaaatatagatttttgttagtacacaatttgagagaacacacactgatgaagagaaacaaaatctactgcaaaaatctttgacttagcaagtcaaattactctgctaatgcacacattgattgaacattttacctgaagtgtgacagcagggttaatcctcttcatgttgagagtattggattaaaatataaactcgtaaagttaaaacaaactctatgataaatctcaactacgttacacctacatttgatgtaggaaacagtagttggtggagggattgggaaataggacaagtaatgaatgattcaatttgattgtcactgaatcatttttattgtcctataatcagattaatttggtaagtttatgagaataaattagatgagtgagagaaaccaggtctcttgaatttcttagagtacatacccatcagaattcattttcaatgaattcatgcttagacagccttactgattgcttacttcattaattaggattatcaattctggacaagagcagatgaagatggtcattttaccataaaaaatgttcgtacgggtgactataatctttatgcatgggtccctggttttgttggagattatcggtatgatattcccattaccataaacccaggtattctttcctaaaagcttaaatatattgaaattgttttaccaatataaacaatgtggtcttgttagcacaaaattatggtttgacaaaatgcatactgcttgtcatcttttgtaatcttacatcaatattactattcttgtttcttatattgaaaaatcaatttaaaatacaggttcttgtatagaaactgggaatcttgtgtatgaacctgcaagagatggacccactttatgggaaatcggtatacctgatcgttcagctgcagagttctatgttcctgatcccgatccaaaacatattaataaactttttgtcaatcatcctgacaggttggttcctttttcaatttgttaggggtttatttatagtgatcaaaagcatctgtcatttatatgccttgtgtaagttgaatgactcattcatatatttcgagtttatggttgttgtaccatg

SEQ ID NO: 226143 - DNA, 1043 bp, Cannabis indica
taggagtaattaaggttaaaaaatcgtaacgtactctgagacccattattacgtactataagacccatttaatgtaccacggaatacattccgtgaaatagaacaaaagcgtctccctatatatataatagaattagagaaagttcattgaaaaatattaagaaagtaatttacttggtagatttattaattattacatgcatgaaaaaaaactctaatggagaaatttatttaaatagcacaaaaggtataaaaggactaaatattgtatacgtcactaatataaatgacatctatctttccaatgaagcttttttcagtgctattgaaacttacatggatagtatctacagaagagtactcggtgattaattggtatggtattgtggtataatttttctaaaaaaagtatttgtaatcgtcatttctagaaagttgttcaattatgaatgaaagtaaatataactatgactttgaagtcaattatttaaatttattttactaaaattaaataatgttgattataattatgtaatctaaaatctgaaatatgttttaatgcaacgaattagacacataaaaattaggatttttacattagaaatacagcagaatatatcgtcactttctgttcaattactctaatctttgaatcactttttgtagcaaggtattgtaatctgataaatttagatcttctttctctcgattgcacactaatatatgaacagtcttccataattttcaaagtatcatcttcacaagtgtgggttcattcactttagtttctttgtgattggaaaaaatgaatgagagggagagagattactaggtttaggttcatattaaaataatattatttttgatttagaaatataaattaaaccttatatttatcaataaaagaatgtgtaatacatttttctcttccaactaaaagtgtattttactatttttctaattaaatttttaataattaataaaataaataaaagataaggtgccgtttggtaacacttttgtttttaattttttaattcaca

SEQ ID NO: 226144 - DNA, 2329 bp, Cannabis indica
aaaaataaatcaatgagaggaaaggaaggtgttgaggtattgcttttggtattggtttggtctcaaattgaaaaaacaattattagtataacaaaagtaaagtttgtaaacttattaatttgtacttactactcaaaaatataaaacaaaataaaatgaagatatattatatcatttttaatagtaattttttaaaatatgatttagtagcatttttcaaatgttactaattttgttttgttcgaataaaactaataattatgtaaaaaaacagttgtacaaagctttttcgttcatatgaagaagattattattgcattattttattatgtaatactttattatattatattattaattttttcggtataaattacattatgtgcgatgaatcaaaatttcctgttaaaaaataatattgtcttacactatgttaaatcaattaaaaatttaattttttaataaataaaaaattaattgacgcgttaaatttaaattagtttaacactattttttaacagaaaattttgatctatatgcaacaatatatcaaacataatagttgagcttaataagtaattttaaacaacattgataattaatttatatattataattttatataatttgttatcataatcatatattggaaatgaaataataataataataataatgtttatagcttggcgttgacatgcataaccacaaaatgaattagttttttcttttattaccatttgcagtttataaaattacatttttagaattattttagttgaatatttgtgtcattatcattttaatttttttatgttactcaatttgtttggttaattaccacataaaacaaaatgtccataagaaccatatgaaagagaagtaatagtttgcttccatcttctacttatattattattataaagtatatgtgcatggttttgataaagatattttcaaagaaggtttaagcaccgctaataatttggacatcacaaattcaaaacaagtaagagaagaaaataagagaaataaacattcacaagtgacatctctctactctaatacccgacacaacaataacaatgtgagtttttgagaagtcgctacaagtgagatacaactaagaccaaaataacttatctgaaagaatttcttggcacgacaagaccaatgtgggtttgtgagaagtcactacacaaaactgctactttttgtgacaactttttagtcacaacataatttttttatgactaaatgtgacttttagtcacaacaaaatgttccttgtgattaaaacatagtatataaatacaagttgtcactaatttaattttagtcacaacaagtattgtcactaaaaatacatttagtcacaataaattgtaatttttgtgactaatatttagctacagatattttagttacaacataggaatgataatttataattagtcacaactttttcatttttagtcacaagttttgttgtgactaaaagtaagaatttttgtagtaagtgttgggattagaataaatattcgtgcaacataaatggattcaaagcacaacctaaacgataaaggatactacaatcaacttatgatttactttatggacaataatataagtgtcaggctatttttagtctaggtttcgggtttatatttagagttatttttagtcatttttagtacttttaggatggaattatacttgttttctgaattttcaagttccggtagtttttacaagtttagtgcatcaatatttgataaagaatcaaggcgagacaaattaaattgaaaaatctatttttcatgaaatctcaccgcggcgacaacgacttatggccacggtgagatcactacagaatagagtttttcgtgttttgttcagtggccgcgacgagaaagaatgtgccccatccagacactctcgccgcgacgaggggacttatggccgcagcgagacgataggcagaggcaaggttttttgagttattgaactcgctgcagtgaggccattcttggccgcaacgaggtagtccatacaactcgagggcagtttcgtatttttgtgatattttgagtttaatctgattctatttaaagggacttcgagttagatagtgggggacttaaaaattgaaccctagaagcagaaaaggacgatggctagagcgagaatggcaacccggatccattccacaatcaatttctttcttctctttttatttcttttatgttaatttatgtttttagtttcattatggatgtgaacgtgaatattatgaactaaatttttaatttagagatatgatgaatgt

SEQ ID NO: 226145 - DNA, 1462 bp, Cannabis indica
cggcagcaactccgacaacttttttagcaccgacaactactccggtaatttttcggcaccgacagtaaactctagtgatttttccaataccagtgacaaataaaactacctaaataaataaaaacattaaataagagatttgaaaacctagtttacgtatatatggcatatcaaataccataaaaagacttaaaaataaaataataccatataaattggtaaaacttaaaagtgtcacattttacataagaacttttaaaatctcatagtaagtgtaatttcctcttaattaaaactataggatttgtagttataattatttggagatatttaatatcaaattgtataagattatacagtggaaaaaaaaattggccaatagccacacaattgagcttattggttggcgcagttttttctgaagaattttatttgcacctaaaaatttataaatacaccatattataataatttttattttatatatatatatttttaattgtattatatttctttaattttttttcttccaatttatatttttaaaaaatatacttacaaaaaaattatattttaaatattataacagaaaaattaaaaattaaaaattatatttcactcgctttattcaatgtgaacattcaagatgtgggaagcttatgttttttctgctatttttcagaaaagaaaccatttaattaataatatagtaattagttactattttatatattttatctaaatcttaactagttaacattaattgaagaaatttgttaagtgaattatattatattgagtatactctattatatttatacgataattaattagttttcaaaataataaatacatatatataataattggtatagtaaagttgtagcttgttatattttatggaaactcattattaattaggttagaaaataatttttaaggttacttaaatgtattttaaattataagctaccataatataatttaaaaataactaattaattactaggatgtatacaaataaattttgaagataatcaaaatgtatcttaaattatatgatataaaaatagctttttttatataagtgtaactaattgatttcttatcaacgcaaaaaattacttttgaaaatgaaagatttaataaaaaaaaaaaagtcaggtttatagttaacgtggtacgtcaatgataaatcgtaattattctaaattagataaaaaaaatatatattattgtaaattaaaaaaaaaacataaccaaattatgccaacttatttaggtactcttggtggtgtgaatgagttaggtgcttttcttctagtaatctaatttggtttttaaatttaaaatactaaattataccattcatgctagtaaatacctaccaatgtttataaatttaaaatatcttattgcatataggttaaatagtaataaagtactcaatgtttctaaaact

SEQ ID NO: 226146 - DNA, 1527 bp, Cannabis indica
ctgtgaagaaatgaaattatactctagccgttggtggtagtgtgctgtcactgtattaccactgtggtcccagtgtaacaaattcttgttaggatattatttcttgtgtaatgatcaatctgttatttagtgtaaaaaggtccaggtcattctttgtacggatacattcaaatctataaatatactccaacaaccaatgattgtggtgtgctgagatttacattctttctgcatcgtttctctgccttatttccttttatacttttctttgttttctgacttggtatcagagcgattccaccggtggtgcgtcctctcgtaatctatggcagagcaaacaccagttcatggagagcaagggtcaacagcaagaagcgtgaccagcggagttgctcagatctcagcaccaacatcaaacatcgtcaaccctcatgtaggtagcactctgactcaaccttttgctttgaaattggacaggaacaactatgcgctatggaaaacgatggtgtcagcgatagttcgtggtcatcgattggatgggtatctcaaacgtaccagagtgaagccaatcgagttcttgccctcagatgcatcttcaggtgaagatgcattgattgtcaacccagagttcgaagcttggatcgtgaatgatcagcttctccttgactggttgtatggatcgatgactgaaagcatcgccactgaagttatgggatgcgattcatctgccagcttatggcaagccttggaaaccctttttggagctcattcccgagtgaaaatggatgagtatcggacgaagatacaaacgtttagaaaaggaaatctgtccatggcagattatctgcgacaaaagtgccagtggtctgatgttctggctctggctggagatccttacccagagaaacaacttgtctccaacgtcctctctgggctcgatatcgaatatcttccaatagtgcttcaagttgaagcaagaatttcaactacctggcaagaacttcaggacattctcctgagttttgacaataagttagacaggttaaccacactgtctggttcctcaaaacttcccatatcaggttctccatctgcaaatgttgctgctacaagaccatctagttttacaggaaatagacctcccaatactgccaactatggtcaaggaaatcgtggtggttcaagccaagcaagaggaggcagaggcccaggcagatttagaggtcgaggagaaagaagtcagagcaattctaagcccacttgtcaggtttgtggacgatatggacatagtgatgcgtattgttacaaccgatacgatgaaacatatatgggttcagacccaaatggatcgaacagtaacagcaaagggtctcagaacaacaacagtgggaatagtggagcatcagccttcatagcctctcctgagatggttgaagatacagcctgatacgtggattctggagccagcaaccacataacagcagatgccaacacaatgactcacaagactgaatacaatggtgagga

SEQ ID NO: 226147 - DNA, 1843 bp, Cannabis indica
acattaattgctccacaattcacattaaattcaagcttaaagatatgaaaataattctaaatcttagagttatcactgaccatttggccatgtcaatgctcgcaactaaaacaaaacagaacaaactgcccttaataaaatgggcataactctctcaatttgtatcgaaatgacttggttcaacttgcattggaaagataatttcaagacagatctaagtgtatagcataaccatggctcaatttggaagttatcaggtccaaaattcactcacaaggtagactagtacactttactcgagaatcgagtagtgtaattaagtgaggggtgttggaggacactgccactgcccatgtggcattttatgcaaatagtggcaccccaaaacatatgttttaacacctatcaccaatgtcatgaattccaaaccgagtggtgacatccattgtcactccatttcaaattagtgcatccttagcctaaaataactatttccccaatatttgtgggattttggcctagaaacaatgagatttttgtagatattttttttcttgtaattttttattcattaaaaaagatgatatacgggatttgttagtgagataccccgacatgtggggatcactaacaaaccctacaacctatataatgagagtaagaggctgaactacggatcttcttctggatcttctcttttggacttacttgatggcagccaagaacaccatacctattccttcatctttctctttaagtccaccgtacttagttgaaaccaagacctcaaacaccagtgacacatcccattcttctactttattggtttattgttcccaagaaccttacaaccaccaactttgatgagatttatgaatattgagtctctcatgagtcctatgttcataagtctcgattaagattttacctaaaaatcctttactgtatttttatccgcacactcttgagatttctcaggtctttgttaactttggatctactaactgagcagctctaactctgtctaacaaatctgattgcaatgttaaattattaagttttcttgctacaaacttaatacccaatttgaccatgtcatttgccaactgaggtgagatcataattgtgtaaataccaatccgaaaccttttctactaagggcatctgccactacattggccttcatataatgatagagaatttcgcaatcataatctttaactaactccaaccactgcctctgtctcatatttaaatctttctgagtaaagaaatatttaaggctcttgtgatcggtgtatatctcacacttttccccatagagatagtgtcgccacatcttcaatgcaaacaccactgcagcaaactctatgtcatgaattgggtatctctgcacatactctttcagctgacatgaagcataagtgataaccttactggcttgcatcaaaacacactccaaaccttgtatggatgcatcacagtaaaccatgaactttttccgatctgacagtaatgctagtactaaagctatgatcaatcgatgctttaactcttgaaaacttgcttcacaattgtctgttcataaaaactactgattctttttagttaattctgtttaaggcgttcaaatcttggaaaatccctcaacaaactggtggtagtaaccagctgaaccgagaaaacttctggcttcagtgattctctttgatctcagccaatccttgacggattcaatctttttcgaattaaccatgatcccatccgtactaacaatgtgccctaagaatgacacttgagatagccagaattcatatttcttaaacttggcatagagcttgtg

SEQ ID NO: 226148 - DNA, 3717 bp, Cannabis indica
cagatcgttagcttggtgacagctatcaacaatggggagatgcatttcaacaagttaggagtgtcgtttgaagatgttatagcttaattgtctaaatttccgggggcagttttgtcccatgtggctcgctctgtgaatttagcggcccatggcttggcaaagcatgctctgcggttagacgatgagctatcctggttcgaggaggttccagcgccggtggcggacgtgagcgtcgtaaatttatgagtgattctaatcactttgtacaaaaaaaaaaaataactctcttatttattataagagaaaatctatagtattatatatatatgagttgtggttattaaataaaattaattataaacattaattttaatacctatattgtactataattttttttttgagaaaattttaatacttattaacaagtgttacatatatatatattatttattgatggttactaaataaatttaactataaatattaattttaaagataataaaccattagattttgatccaatgacaaataataaaagaggaatttaaatttatatgcttaatttactacttaattaaagataaaaaaaatatctccttttacattatatcaaaaatatatttatataccacagatatgattctacaacactctgttaaataaaagcaacagttatttttgacagcaaaagaaataatggctctggctcttaagcaacaaagcaaggttaactggatcaagtttagcgacgaaaactccagttattttcatgtgataatgaggaaagaaagactggaaaataggataaccactttcatgaagggggatgtaattattgacgactttgaggaagtggtgaaacacttagttaaacactttgagaatttcatggacaacaagagttcagctataagcatcattgatgaagcttgcgtgaagcagggtaactatctgagtttggagcaacaaggtagattgattcggccttttaacaaggggaatgtaaagaaagctcttttcagcattcacccttcaaaaagtcctgggttagacgggtttggatcaggttcttacaaggacttatggagtaaaattggtgatgaggtctcctctgcagtcttgaacttctttgaaaatggccggctgtccaacatattaaatgagactgtcatttatttattcctaaggtggacaacccctctttggctaaagattatagacccactggctattgcaacactgtctataattgcatctcgaaaataatttgctccagactgtcagatgtgttgccatctattgtcagcgacaatcaaggtgcgtttatcaaaaatagactgttggctcataaaataatgatattccaggacctcttgaagggctatactaggaagaatgtctcagccaggtgcatcatgaaaatcgatctcagtaaggcttatgacacggttgactgagactttgtggaagatttacttagggtgctctgttttcctactcgatttatcagatggataatgacttgtcttaaaggtactagctatcatctgcttcttaatggcagaatccaaggtagcttcaaagggaagaaaggtctccgccaaggagatccaatgtccccattactctttgttctggtaatggaatacctcacaagactgctgagctactactctagacaaaagggttttggatttcatcctttatgcaagcatctacgcttgcctaacttgtgttttgcagacgatttagttatcttttgcaagggtaacatcaactcggtgaggataacctttgaagccttcactaagttttataatgacacaagtttgtctgctaacacctcaaagtctcaaatatactttggaggggttagggaagagataaaatccaagattcttgatattgttcagatagaggaaggtaggttcctggttaagtaccttgtagtccaactcagaccaacaaaatggaaggcttcagattgtggaattattctagacaagctgaatccgaactgttgggcgagtagaaacctttcttttgcaagtcgggcgcagttgattcactcggtgttgcttggaattatgaattattggatgagtatcttcatcatcccttccaaaataacaacagccattgataaaagttgtcgtgactttttatgggggagttcagggaataagagtaagcttcaccgaacttcttgggaaaagatttgccttcctaaaaaccttggaggagttgggtttcgggaagggaaaagtggaacaaggctctgttggctaagcatctgtgggagctttctaagaaggaggattgcttatgggtcaaatggatcaactcaatttatttgaattatcaaaacatatgggactgcccaaagaaagatgatgcaaggtggtacttcaagaaaattttgagcttaagggaccacttggatgaatcaaagctcagacaagctgttagaggaggcaaaatcagcactaaaagatgttataacatgtttgtggaagagactcagattgactatgcaggtgctatatgggacaagcttgttgtaccaaaatatagattcatttattggcagatttcaaactcccaattgctcactcgggactatttgcatcgtattatggccattcctaacaatcttttccctgtctgtgaagctgatgtggaaacacatgagcatttatttttcaatcgcccttactcttatcaagtttttgaggccgtcaataagtggttggggactttccattggcctcggacgacagctgagcttcttcagggctgctgtaacacgaaaaatgacttgactaaacgcattattaatgttgttatggctgctgtgtactattttttgtggaagagcatgaataagtgtgtgtatgatctttgttgtatgactcctagctgcttgagtatagaagttaggaaaatagtgcatatgagaattgtttgtaagggtcctttcaaagattgtaagagaaacaagtatttacttaatgtaatcaacaattggtaggggtgtctaaggcttttgctgctggtttttttattgcagcagcagccgctggtttcaggttggccttgtgccttagttgtatcttgttggttttttgaataaaaagtttttttcgttaaaaaaaaatatatatttatatacaaaatacttaagtcaaactcaactttttttatctttttttttttgctgaaaaactttttttcttaacttttttgtttcaaccgatagaacaattccaacccatataatgtaaaaatgagaagttttttaattaaatagaaaaattaagcctaaaaattcaaattttcttaattctactcatgggtaatacccattaaacatatataatatatataaatttctatttggtttgatatttaagagaatttttttattcaattttttttttcttttcataattatttaggattacttgtaaattttttaaataatttatagtgacaaaaataaagttcaaatattttgttacatgtatgattctttttttttaacgagtggtaacaacttcttgaattttattttgagtaatttgcggcataaatacttaaattttatgtcaagtagcagataagtacctaaatcatatttttggcggtaaaaataccttctgtcactagtgtggaacttccgtaggtacctggccgttaagtgccaggccagta

SEQ ID NO: 226149 - DNA, 1898 bp, Cannabis indica
ttttttttttttgtctggagaaagcttctcatttaaaccagaaaaccagaaaacaacatatcagtcacatgaccacagaggggccaagtcctcagctgttaaaaaaccagaaaaagagttacaaaacgcccaatgtgcaagcttgtgagccacctgcacactagctcggggttgccacacaatctccacctcaggaagctcatcgagcagctgcaaccagggcccagaaaagaccagcaagacgccaatcgggggccctccgtgcgtgtaaaccatgcaccagcagctggcaatccgagacgataacagcctgcttccaacccctgcaaatgcaccatttcacggcattaattaacgcccacgtctcagcctccagcggctgattagaatcaaaattcacagccatggcctccaggcaccagcaccgatccctccgagatggacgccacaatcccagctgcagcgcgcatatctttgaacgctgcatctaccagcagcaccatcttaccagagtaaatttcagtcaaattttactgcataacatcagtaacactaggcgagtcccaagcggctctaaggttggcagcaggagaagaggttgtatggatttaaagtcagtcaacgcaaaagctttccatggggtcaagtaagaagtaatggtaagaattggtccaaactatatgaatagtggccaattaaataatcaatgtaggcattagtgtggaaaaatccactgataacgtgtggaagtaattaattagatattgaattaacgtgtggaaaaatcctttcctattagatcaaaatctcattcgtcaacgaagaatttgcataatactatttctcacaatccttaaataacagactagtttaattagttttgagcatatttgccaaacaaatcttggcaacatgacactccatattttcaaaatccttgctactacatcatcactatcactagtatgggcaatcactttcttcttcatcattctaccaaagttggataacaccattttcttattggtaaaagcttctcaatatgaatcaccatcaccatcacaggcaccagcaccagcgcccaacagtgtcacagctaatctcgaagaaccacaactgaattctctgtttcaaaccgactggtgtaaggacaaacacctcttcaacagaagcatgcattattattgcaaccagtcatttattacttgtgacaatgctggccacattactcaaattcttcaatatattttttatgatggtgagaatcctgagagaaaaggaacgctccaaaacttcagtacatcttgctttaaacatttagttcatctggatctttcgtttgcaagactcgagggtgttattccgccggggataggtgctctttcgaagctcacctaccttgacctctcccacaatgctttcacgggtcggttaccactttcactaaccaacctttccggttggtgaaacttgatcttagttttaatcaactcaacaattccattactcaaaaacttggcaacttgaagaatctagttgaattaaatttgggcaacaacatcttaacaggtgcaattccctcatccattggtcttttgaccaaccttacttatttaactttgtggagcaatcaaattagtggctcctcctatcagtataggaaacttagtgaacttactttactttgatttatcatataacagcctcagtgggtcattaccctccactctttttcgattaaccaaattatctgagcttcatatctcatctaaccaactcactggtgaaatccctaaagttttaggtaatttaacaaatttaacctctctatctctcgactcaaacaagttacatggtccaatcccttggtccattggttatctgatcaacctcgagta

SEQ ID NO: 226150 - DNA, 2936 bp, Cannabis indica
cttgtaaatatatcccagatttcaaaaacataaatactgccaaaatcactctataactttatcgttgtaaaagtttaaattctaatacaataaatttgtgaactaagattttattaaaaattttaaccatgtaaaattagtatgtgttgtccattttcatattcattctctcttctccgatttctaatttttaattttgtagaaacctcaatcatttttagtattttcattgagagtttgaagagaaaatttttcatttacaagccacatctaatagtgtctcaccctttggccctaaaaatagatcactccatctaacagataatatccacgtacccgcgagaggcactgatgtaccaccgccaacaactggagaagatgagatcaatgatgaattcatctataaaggtaacaaatatggaggatataattatgactagggggaatgttatgaagaacaagagaacgaagagtccttcactcccacgccgcaagtcatcaacttgagaaactaaggggttgtttggcttcataacttaaaaactattttttagttttaaaaaataaaaaacagtttttaaagactaataggaaccaatcttttaaaaaactgagttttaaaaaactagaaaacctgaaaatattgttttcaatttccaaaaataatttttttttgtctaaaatattatattttacatttttgctaacattctcggacgctaggcccggaaccagatccgaactcggacccgaactcggaccccgaactcagaactggactccggaccccaaatccaaaaccccagactcgacacggacccggaccccgaccccaaaccccaaaccccaaccctggacgcagacccaaaccttgaaccccgaaccctagaccccggactcgaaccccgaccccaacacagacctggacccaaacctagacccgaacccaaacttggacccgacttagatccaaatcctgaccccgacttggactccgaaccccagcccagaccgtggaccctagacaacggacccagagccgaacctagacctcagacccggacccccgaccccgaccctggacctcaaacccagatgcggacccagactatagaccccaaaccctgaccccaaccccaacccgaactcaaacgcagaccccaacccgaacccgaaccccgaccctcaccctgacccgaactcggacacggactccaacctgaacccgaaccccgacttagacccggatcttgaaccccgacctggacccaaagcccagaccaagactcaaacccaaactccagacacagaccccgacttaggcccaaacctgaatcccaaacccagatcctggacccaaacctagacgtcagaccccggacccgaatgccagaccccgatcccgacccagatgccgaacctcgacccggaccccaaacctcgaaccccgaacccagacctgaccaaggacctcagaccttgccccgggttttggatccaaatttgggttcgggttcagggtccggggtcgaggtccgagtctggggtccaagtctaggtctgaggtccgtagttggggtctgggtccgaggttctagtctagggcccagagtatggtgtttgggttcgagttcaggctagggtctaagttcgggtcgggatcggggtaggatgggttcatgtcatggtatggtgtagaatattgaatttttttttagtaagaaaaaattttaaaataattttaaaaaacttgtaccaaacaccattaaatttttcaaatgaaatttttttttttctatcctcacttttaaaaacacaattctgaaaaatgaaaactaaaaacacagtctaacagccttcaagtggctactcgatagacggagttagccactcaaaaggacaccttcaagattacaagaagtagttcgagcaatacatgctgccttcaccacccaaggacttgagatagacctacaagccaaccctccgccgatgctcccacctcatgataaccaacctccgagtgcaactacatatagacccaaaaagatcctagagaacagtgagaaccgttgagttccccatagacaacctccacaaggggttctcatttctctacacaaacaaaaaaaaaaacaaaataactcattttctaattaacaatatcaattactataccactaccatgtacaattatacattagcccactatttcactactccttaacactaacttcagttctccatattatctactaccaaacaaaattaacacaaaagatttaatatcccaaaactcataaaccataattatttattatcatattagttagaaggatgtggataacattgtagttatgacgcatggcgacagcccttgtacactagaaacaaattacacatcacaatctaatctgataatacaggtcaaggattataaatattgcaaatccaccttttcgaacttttatgcccagaaaaccaagcaccaatattataagtcatatcagtaagttaattcaaaccatttcaatgttggattgaatttgaacattaatacaagaaaatcataggcataaggagtcttaattcaggaaccttgttttggaacatgtttggacactgtaaactgtacagaaaacaatgaaattaactttttctgataatctggttcccaatctcaagatcaagagagaaagagagaagttagtttgcttctctcaatgacaacaatagctttttgatgagttcttactcatcatagtaagtgccgacaaacttgctcttgatccatttgaagctattgcgcaaagaggacttgagcttaccttctgttgcatacatgttataagctgcaaccctcttcctcctcttcatctcaggattactagaggaagtagccaagtcatcgtcaccattaaagctgtaagacgttg

SEQ ID NO: 226151 - DNA, 1525 bp, Cannabis indica
taataacttaaaacataacactaacactttcaaactttggggatccccatttttatttatttatttattttttagaaaaaaaaactttataaagttgccaacttaacataatatttaaaagacaactaattgttctcaaaagcgatataaactcacttacatgcaataaaataggattttttttcttaattctttttcttattcttcttttaagaaaacagcctcagagacatcactaaaaagcaaagatctcaaagggaccgagagctaagaaaattcatttatgcataacatgagccagaataagatttcactactacaaaaaagagctttagaggtaaaaattttggagcatttggcatcaatttcggtaaaacttggtatcgtcactattcaaaaagatgttgtatgtgctcatattaatcgacgacacaggagaatcttggtgcaaatcaaagactataaggcattagttgttttttataaccgacgccgtagtccgttatactgtcggttattaagaaaaacggatgtcatattgtctttgattaaaaatcttttatatttttagttttaaaacctaattcttggtcgaatttctaaaaaagagggattttagggtgcatgatagcggaaaaccctaaaagcttcaggtaacagtacaaaagattgcgataaaaaggttatactcgtaaggattcaatacgggccgagtcaaccctagcagtcgacatttggatttatttcaaccaaaagttcgagaattaaaattcttacaacaagtaaattaaagcaagcaatcctacaagttcactgagcaataatcaaggaattgtaaaagttcaaggaaaaagaactaactcaatgattgtcaagtggttgatagttctcgacaagattacttcaatcaaaaattcaccagtcagataattcgagaacaactttctttgtgatctagaaaatttcaaatgactaaaaattggaaatggatattttgatcccatttataggattaccgagtggtatggtggtaattaattttaaagtattcgatttctctccaaaaaagcaaaaaggtaatcattacaagggttgtgtaaccgtcagtgcacgatccccaagaagtaatttctaaggcaaagaaattaataagaacatttgaagagacagagaaagattcacatgcatcgagcaagagtgatagcatattcatgcaaacacatgggcataaaggtgtgtcacctagtcgtgcaacttgtaagacctagaaagtcccgtatgactagaagttttcacatggacttgtggcgtaaatgtaatcccaaaatttgtactggtgacatggcatctggtagatgacacatgacaggaagattgccccttagaggagtataacaccagtataccgactaggctagttgataccgaaatctttgaatgggcttcaggcttcactgcttgctgaatgatgtgagccacgcaacatggagagtcgataaaaagaatttgctaaggatcttcagaa

SEQ ID NO: 226152 - DNA, 2864 bp, Cannabis indica
ggaagattgtggatgttttccttaagaaagttgtcaattaggaagattttcctgactcgattctcccttctcaaaaatagtgagctaaattggtgtcgactatgacagccccgtccaaaatttctaccccaaacataatgggtatgagaccagtaatccgggaggtaaagtgtgtgaattttaccttaggcttttaagtagagctgggtggtcccccacacttctctctaaagacctcactattcatacccatgatgagtatgaatattcattgcctctatataaggaagtagatggaaaagtccatagatgggaccatcggttgatgagtggggaactgctttatgtgagcagccccaccttcaaagtactgtacgcattggggttggatcaatctggctccaaccttatgtttgaaaaagataatactttagttctccccatggagagagtgcatatagttttaggacaaggtattttctttatttccttgcttgaatttcttgacttgacttggatatatgcttgtggttgcactttgtctttatgttgtttcccataattatgtcttgcaatatacttgtgtaataattcttatgatggcagacatgtatatttccctttgattttttaggtaccatggacgttttagcagcctctgtcaaacaagcatctaaaaggcaaagggtgaacaaaaaggccatgcctcctcctcaagccaaggagactcccttagcggcagccgccccaactcaaggggtcccactaggtgctgccgttgcaccttcacaagaggttcccacatccacaggcttctctcctatggttgcttcaccttcgggcttggctccgtccagcttgccacctttgacggctgtagtagcactacctacgaggccagctgttttgccagtggcccctccttttggtcagcctcaacacccagtcatggggccgccatcttgctatactcctgagcaaaaaattttctatcagttggcccagggacttgcattcaagggagaggcttctgatgtctatattgcccgaagcaagcaagttttgaaaaatattggctcggaaaattcatctttacacacctcaactagtggggctctcgacagtgatctggtcccagtcaataatttggcgcaacgacgcctcaactcccttgctatggtgattgaacctttaccacttcagcttatgtagatgtatgtacatatatatatctattatttttcttatttagatacttatgatgtcgctgactgttttactttgtctttgtagttcctttttgatgacttcagcctttaccagaggaccactgcctcccataacatatatccaaagaagtgtaaggacctcaagaaacgcaatgggaagccactttgacaattaaggagcttgaggagaagcttgcttcttttaagaggaagttggaggaagcaagtgccaaataaaaagttgctgaggaagaggccaaaaccaagaatcatgagcatggttcgttgaatgccaagtttgttaaattggaggctgagtcgaaggttatgactgacaaccacaccgtaaccatggataagctcgagtcggagaatgcaaggaccattgagcaaatgaaaatatatcacaaggcagaagttgctcgtattgaagagcttgccaaggagaatgtttttgggatatcttacttgtgttggtgccgaaaataggacatggacttcagattcatgggcgagcttttgggtgattttcaagagcattgtcgcaaggcccaagcgatcgcaacgaccaacgaggtcactgcagcggaagccaaggagaaaggagaagagaccacttctgaaccaaccccagagtcttgaggagaggagttacacaagggtgttggcatgttggcggtgctctgccttgtggtggcattccatgcgagagctgccatgtgttagtgctctccatgattgactttaggctttgtattagttttgcagtactccatgtgagagccgccttgtggcagtgctctccatggactaattttatgcactttgttatttgcatgcgaacatatttgtgtttatgtctcctagtgcaacatacatttattttggttatgtattgatatttgggcccatatgggtaggttcactcattgtccacttggtgtggagtgctcgctagttaaagctaacaagtctttttcacatctttggaactttttaagcatatataacttagcttattccatatcttggtgcctttagaattttaagttgaatatatttttttggcttattttattccgatgcttattatctttgtaacgtggggttttaaagatcacgttaattttattaccaatggtggcttgcatttttactagtttgagcaagttgtcgacatgggtctttactctttgggtactcaattttagcacgcgacccacttgttaaagtctccaatgtaggccatttgagatgtctttggtaagtggaattttttgagttatggctccttggagagccctcatttatattttatgtcgctagtgtaccaactttgccccatgtccgagatgaaattttgaaaaaatattcatggcaaatttttttaaaaaatttcttgctcttaatgtgacgtgttagtaatgacattgagatttatttttattttgtcgatataccgactttgccccctgctcgagatgaaattttgaaaaaatatccatggcaaaattttttaaaagcccatgctcgtaaagtgacgtgtcgacaatgactttgagatttattttgtgaattaatggagtatagttatagcctagaccatatatgccccccaagttataaaagtattgg

SEQ ID NO: 226153 - DNA, 1060 bp, Cannabis indica
agggcataaaacccaacaggtcgatgatttaaaagcttctggtgctcactttatctggttgaataaacatgattctggtgcttgcatttattctaagttggatagggtcttcaaaaatgagcattggatggatgttttttaaaatatagaagtcatttttaataggagatttgcttggatcatagctactgtttggtcaagcgcttggtggttgttttaaataaaatatttcttcctttgcttaaaaaagacaatcttcattaacttgttaaaaattatttgatagtaaacgtgtaatattttaaaacttgtaatatttttggcgctagagaaaaagtttatgtatttttggctactataaaaataaaaattaggtatttaagtattacattttttaaaatattaaatatttttaccgcaatttacctttttaaatataatttataaactctagatgatttaaatttttaaaaagggtaattgatggtgatcctctcttatgtttaatttatatgcatttagtccttttatttatttattttttttgtagcaatattttcttaacttcaattttttttttttttttacgaatttgaggcacaaattaaattttactattaaatgtaaattgacactatcactttgtatacatatgtacacgtgactataatcttgaaattaataaaaacataccacgtatatacatggtatacaatgacaattggtatttaatgatataatttaaataatgcctcacacttaaaaaaatatatgaaatcaaaagtaataacacaaaaaataaaataaaaggtagtatataaaactaaaatataaaaagatttgaaagccaattacatatttaaaaaatataagttccttgctaattcagtccatcatagtctaataaaaagaataattaaaaaatttatctttttgatagattttattacttaaaatatatagtttgttaaaaatttcttaggtaggataattattaagatggtaattacataatttagtaattacactatattttaaaatgcaaggtgtgtttggatat

SEQ ID NO: 226154 - DNA, 1358 bp, Cannabis indica
cgaaagtgaaggacatatctagtaaaatgcaaagtgtgtaacacttgctgaagaggtaacattaatagtaatgttttcctatttaacactcattctactcatgagagtttgtgtccgagcctcattgatcgatgaatcgtggatttgatcttcattttgcagtgtcactttcgagagagaagctcgtgcagattcgttttgagtatactatatatctataatactaatgtatgcagcagttgcagaagaagcacctcaaaatttgaagaagaagatgaaccgaaaggcggtcagtcaatacaaaattgttgtttttattaccaactgcagaaggagatgtaagagtttggttgtgtagctatcaaatgagtcattaaactcacttttagttatagtttttggccaaacttctttctcttctttcttttcttataatgcttttgtttagttttttcaccatattattatatctgattttgagtcaatcaagttgttatggcttatgtacttttggtgtattatatttatgtgcttagtaaaatcccatatagtataacttaaacatttttcagattattagagaaaggtaattgatcattcatcactattgtttttaagaaatgttaaaatgcactagtaccatctaaatgtgttgtattgctattagtgtaattaagtgatacgttaattatttgcaaggcatcatttttaagtgatgttaaatacaactagtgttttatagtaatttttgttattttaaatcgtattttatgaaatcatttatcagttaatttttttagtattgctattagatactagagatgtttagtattatttagaggtggtgatttgtaaacagttaatatattcataatagttattaatatattttataaaagttattaaatttaatgatgtcaaatttaatatttaattatatcaaataaattctcttcaaagacataacatatattttatggggtgtttggttggtggtccaatgtgccttatccttatagattgcttggaaggtagcatatattatgacttcaatgtattattattattgtatgttttgagggatctagtataatccaattccatccatccaatgagatgaatggggaccattgattactatgactttattatttttctattttttaaataatcaagatttacattccccatttggacatatttgtgatgttatatatgacaacttgagatctacttcttacattattatgattataatttgataattagctcatctttgtactctttcttaataggtataagaactaagcgatcattctttacatgattagaaccaaatttttgtacatttaatctag

SEQ ID NO: 226155 - DNA, 3416 bp, Cannabis indica
ttatcgaaggtggagtttttcctcgtcttaagaatctttattttcaaagttgtttgagactcaaagtgacattgttaggagattattttccgtcattgacacggcttgaaatatttaattgtccattgctaagaacacgagtcgagagggagacagggggggactggccaattattgctcacatcccaaatatcattatcgatgacaagaaaatataggtatccattgctcttttgtcttctcttctgtcttacttgtttaaaagatttattcaatactgaatcaaagtcttcaatttcttttccgttttaggctgtattgtgttgtgtgtacaatactgaattaaagatcattttgcacctttatattttcaaagagtaaattgttattataggcatgggaaagtcactaagaacaagaaagtacctgcagtgaaacaatcactggtacattgctgcatttaattctttcttttgcaatattaaatcaaccattaattagtgtttaatgatagaatttggattcatcagctaatttgatgcatacatattcagcatgtgaagttgatgaagctggtaatattagttggttttgcttttgattactctatttttgcagggtccaaccataaatgatttgtatgtttgttgctgacgaccaattggattgagttgaagtaaaagggtgtactgtataagaccaacaaagtttgagtgtggtgtgtgtttagagtgattagagcaatgttcactaaaaatattttggttgttggcagatattgtaataaacagaactatattatttgttctatagtttttagttttaataagtggtctggtcttgcttaaaaatcagattttgaactaaatcagtttatagattttacatttcttccttgaaaacaaataatgtcagcatcttaagccttgacaaactttttcatgattacaaaacttaacttttcaaagcagacttgagggcgttgtgtttcaatccacgctctcacttagtatttgaaaccagcttctgtttcaagcttggaagtgttctcagatgcagattgggtgggctacgtacaaacttggatgatgccaaataagcacttataactaattctgttatttctgcaacttttattttaacaagctgtaattgttacttgtaagttgtaacaattatatctgaatctgatacaaccttgtaagattggtaaactttgagtgctattcaaaaatttgtatataaccattaaaaagtaataaaacaaaacttaaagtaggaaagttggacattattgtgtatttgtgataatgttgattaatttcatgatctaatttttgagctgtattctaattaacctctacattttataatcaaatattaaatattacaatgctacttacttagttttctcttattttcatacacgtgaaggcacatgtaatgtactattttatttctttattataaaatttatctaaaccatgcacctgggataggaccactaccacagtctaccaagattaaattaacatataattagcattactttacagtaattaagaaagtgttattcatgttttgttttacactattatccataaaacaaaacaaactgatcataatattaaacaatgttcaatggaccccatgatctgcttttgtgtaatcaaaagttcattgtaaactaaaccatatatgctactaagctcactcactgagctctgtttactaactcaaaattttcaccaactcatattatttctctctctatttcttgttttcaatatctgatggctgaattggttggaggtgcacttctctctgctttgcttaatcccttggtgaacaagttaactactgagatgaaagacttcttcaaaggaaaagatgtcgttctcaagctgttgaaggagttcaaaactctgctgtcctcggctgatctgctgctcattgatgccgaggagaagctcatcaaagacccaagagtgaggaagtggcttgatgatctcaaggatgccatttatgacgctgatgacttggtttacaagatcgacactgaagcatggcgaaacaaacttgaaggtggtggtcctcatgaatctcgtagcggctgcacttgtactagtaaggtactaatattatgctctgtcatgagattggctagaaaatattctaagatttactatgctttagacatagttattgtcacaacacggagtgtagctgttgcaacgattatgaaaacagggtcaacttttgaactaggaagaataaatgaggctgctagttggcaattatttgcaaaacatgcttcacttgttgtggactcaaatgattacttggatctcaaacaagttggggaaaaaatagtggacaaatgcaagggccttcctttagcaataaaatcaatgggttttctgttacgagggaagcagaaaaagaaggaatggatcaacatcctaaacagtgatttatgggagttgtatgatagaaaaaaagttgaaattcttccagctttgtggttgagttattttaatctacgcccagaattaaagcaatgtttcgcttactgctccctatttccaaaagattatcatttcagaaaaggggagatggtgttgttatggatggccgaaggtcttttacagtcttcaaatgaaaagagagtagaagaagttggagaagagtatttcgaagatctaatttctatgtcattttttcaaccatcaaataacaattatgaggaggagccgacttttctcatgcatgatcttatacatgatttggcaatatttgtttctggtgagttttgtttaatgatgaataatagaagtaaatgtgctcacaaggttcgtcatttttcatacatgcaaagatgtgcaaagaccgataacccgaaggaatttgaggagctatttaaagctaaatgcttgcgcaccatattgtgggaacaagatttaagccaacagttaaggatgttaaagattgaggagttggacaagtcattcccaggcttgagagtactatccttatatgattatagcatcccaagtttcctgattcagtcggcaatttgaagtatttaagatatttgaagttatattgtcttgagattaaagagatacctaatacaatatgtaagttgtataatttggagacactattgttggaggaatgttggagggttacaagactaccaaatgatataggaaatttaatcaagttgcgacatcttggtgctcccttctcattagaagggatgccattgcaattggggaagctacaaaatcttcaaacactgaatagatttgttgtgggaagaaatagtgattgtggtggtattgaattgttgaaagagtttcaagatctacaaaatgttggtaggcgaaatttcagatgctgcagcaccatta

SEQ ID NO: 226156 - DNA, 1588 bp, Cannabis indica
ctttcatgtgacttatttgattctctaccaatgtgcaagcccccaatgatagtgagaatattgtgaggagacctagagtcactcacttcctcgtcacagtttccaccattattcgcttagggattttgatcatctgtccttgcctcatctttcttcttgtatttgtcaaatcgtccttgatgaattaactctttaattttatcttgaaagatccaacattctagagttttgtgggcaatatctttaggatacatacaaaattttctcgcatctcttttgtcgcagttgcctctgatgggtggtggtttttgaaaactcatttgtgctctttgattgtataaatttgattgcagggaaccactacttcagtgtagttgataaatcgaggacatcctcttaggcttcgccgtcgaggacttgtggaataagttctcgatcttggagatcacctattttcttttgttttctcaagctctgcgaggaaattctctatctgtctatagagctcggccatggtgaagaacttcactaacgactcaagtcgtttggcttgtgctatttttagaaatcaatttgaggtaatacacttataattaacatgcatagtaaagaagacttggtggctttctcgaccctagttacttccgcattaaaaaatttaaaataattgtaaactctcacctttttcttgttcaatattagacaacattgtgtacagtggtttgtaggtcatggtcacctagaagtgtgtcaagaataaatccacaaaagtctcctaagtagaaattgaggcttcgggcaactaactaaaccactcatgtgtgttatcctcctaggtgtcggcaaggatgtgacacttggatagttgtggaatctgatcagattccatgatagtattgaatttatctaaatatttgatgggattaattagtcaaacccttatatttgaatgactcggagaggcaaaaaccctttaggagttgagcttgtcacacttcaacagtgaatggcgatgttccatgcagtttatacacgtgtgtcctttattgttcaaccacagcaaactttcttgatctacccctacaggtgtgatatcagctgctgctgagaaatttaggcaaaatattcacattttttatggaacaacaacaaggttaacaggtgcaacaattgggttgactagtgcaacaactggattaactggtgaaggagcattaacaacattattaattattaccttaggttgttccgcgggagagggatgccttgattgtctgcttgggattcacggggctcccgtcgtcatgtgttgttattgtagttttctaccttaggtgatcgtgcaagaaaagcctcggtcagtcgatctcatagatatcctctttggatgtggtatttgcctccaagatgcataaaaactgatcccaaacgtgtatcacactaggagtgaaactaccagatctaaatgactcaaaatcatattcctcagggattctccaattaggggcgaacccaacatagaagcgaggcaggacagtcgctaaaaaaaaaatcaaaaagtagaacctctatccaagaatacacttgg

SEQ ID NO: 226157 - DNA, 1723 bp, Cannabis indica
ttaccctaattcttttacacctaatatacagctaatattctaacacgtctcaatgagaacattaggccacctatgacgaataatccaactcaagccttccttgagtccaacgaattttgcaatttcaggattaacacgacccacaaaactagatttgtatgcttcaataacatggccttggtggttcctcgcaatacacccgaagccaaatctgcccttgccatcaaatagagccccatcaacattgactttcacttgatctacatcaggagtagaccaatgcactttaatagccacactaggagcgttggaaagagaaaattctatcctggaatgtgcaaaattatactgatcaagcaagcttctagccgagagaatgacagcagcaacagtagttgttttctgttgccaaatagcttcgttcttacccttccaaacactccacgagaccattgcggcttcctgcaaaacatcatcttgaacccgatttgctatagccataaaccagctaccaaaattttactcacaccagctagaaacatcaacccgagatcgattccaacaggcccaagcaaaagagcaacaaactaatgcatgaaaaattgattcctcagatgagttgcaaacttaacatgtaggattaactggaatgtgccttttcgacaattaaacacaagttgaaagaatacctaaaaccgctcgccaaataaaattactaacttttggtggaatttttaacttccaaaaacaagtggcattattgtcagtccagtggcagttgccattttgttttaaatttttgtccattttattagtgaattttctttgtaaattatacaatattgtttgacttacactccattttatttattttagatttagaaaaaaattatataaattaacttgcaaaaaaatataaattgtactttttattttattttataggtattgttgaccaaactaagaaaaatcattaaaaaaatcgatatagaaaagtaagtttataacatttcaacttttgtaattttgaaattactaaagtgtatttttaatatatttttttaaaattcttcgttttaaaatcgacacttatccctattagtttttgttataaatcgacaccaaagaaaaaatatatatgtacacatttaagtgtcagttttatacaacaccaaaactaattagtcttagtttatgaccaacacttaaattcttatattttgtcactgcagaataggtatcggttctatgaaccgacactatagttataattagtcgagaactaacactagtttcaaattcccttaaccaacaccacatcggatcggaaaacaccataacaattataaaattctgaccaaaaactcaaaaaaaaatctaaccaacacaatgtatttcaatacaaacaatgatcaatgaatttaaatcaaccacaataatcgaaacactataaaaaaattacaaaaatgaactaacctactaacaaaggagttagggcttcgacgacgcaagcttcgattgagaagcgggtgaggaggattagggctttgaccatgagtggtttttcatgtcgcggggtttcgggttgacgatggagcaagagagagagagtggggtcccgagtcttggggttttcaggtgttgaggctttgcttgggtccatgacggagtccacgacgtttgggcttctccgactatgacagagagaagacgagagagagag

SEQ ID NO: 226158 - DNA, 3306 bp, Cannabis indica
ttaggatcgagacccaaaactgcgcccttgtctcagtcccacacctagaccgagacccagaccgggacctaagacatgaaccgaaacaaaactaggacccgttatttggctctagatcttgtcatgggatctaggaaccggggcttggacaagacccataatcggtgtcttgatttgggactcgaacaaggagctgaagctggaccaatacctgaccaggaccttggaacaggaccaggaacgtgaccaggacctggaactagaccgagacccggaactagaccatgatgaagccccgaaactctatctccgacccagtctcaaactcggtcctggacccagactaagactgagactcgaacccgaactagaacccaaactcgagactcgatcttggacccaagccaggtccctgaccgagactgggattcagacctggacattgacacaaacccaaacccagaatcgaataccaacctacacctagatcgggattgaaacacgagacctggactcagacccaaacgcagacccagaccaaaacttggtgcccaaactcagacctggatcaatctagggatttgaaaaactcgaacctggacttgactaagactttgaccccgaccccaacttggaccgagaccctaacctagaaccaaacccggacccaaaatcaaaactggaactgtgactaggaccaaaacatgagaccaaaactgaacccaaacacagacatgagactagaactgaacccaaaccataacctaaactcagaacagattctagaccgagaccttaattaggattgggacctgagacttgggacccgaacctagaccgagacctagacctaacctggtcctaaacccttgccgagacccagactaggatccatacgccgatagggacccaaacccgaacccagaccaagattgggaccgagagctggacttgaacccggaccgggacttggactcaaactaagactcggactgaaacccgaacgtagacccagaccaggacccaggaaccggacttagaagggggcacctagccaagggacctaggccacggaaaccaaacaaagatcataatccgagaatcgaacccgaaccagaacgtgacatggaccttggaatccgaagtcagacccagacccgaactcaaaacctgccccggacccaaaccacgataggaacctagacacggaccaggaccaatctcgaacccgcacccgaacccaaaatcaaactcgagccagggacccgaactgagacttagacctagaatcaaaccctaacctagacctagacttagacccgaactcgaacccagaccgagatcggaacccaggactaagacccagaactgaacccaaactcatatctcgatcaaaacttgggactcagacatggacttggacccagacccaggacacgaacccacaccaagagcctgatccagacctagactgaaatatggacccaaacccaaactcgaaccccgacacgtacttgaacccaaacttgaacttggaattgaaactggaactggaactggactaggactaggatcggaaaggacataaacccaaaccaaaaccaagataaagacatagactgagatcaaaacctgaactgagactaggactcaaactcaaacctagaccgggacccaaacgcagaccagacatgaacatatgacccagctcgtgacctggcactcaaaatggaaccagacagggaccttagatcgagattcggatctagatccgaggcttggatcgaaactgtagtcggtgtctggatatgggacctagcctcggacccaaacccagaccaagacccaaacctgaaccaaaaccagaccgagacccatgacaggttctaaatctttacttgggatccgggaaataatgcttggaatagaaccgtagtcgatgtctgcatctgggactcagactagaactcaaactcgtactaggacccaaacccagacctagacttgagacccaaaactggaacctgaataagaactgtcagactaggaccctggaacaagactaggatcgtgaccaagacccggacccagacctagaaccaaactcgaaccttgccccagacccaaattgagaccagaactcgagcctcgacacagtcgtgtacctagaccgggatcgagacctggacccagacttaaatctagaacccgattcaagacacaaactcggacctagatcgggatctaaatatgaaccaggactcgacccaaacccagaccgtgaacgatacctgggacttagatcccgaccgagatcgttaaccagacccaaacctggacccgcacctgagacctgaaatcggacctggacctgaaccaagacccagactgggatccatacctagacccagacccaaacccaaacttggaccaggtgtcagagcccgacccaaacctagacctgaaccagaacccaaacatagaattcgagtatgggtctgtgttcgagtctgggtcttggtctgattacaattttgggtttgggtccaggtcctggtcttgttcctagttccctatccgcttctagtttcagttccagttttaagtcacggggtacgggtcaagtccaagaatcgagtctcagatcccaggtcgcgatgtggttctaggtcaatgtttgggtctggggtcgtgtcccgcatcctgatcaaagttcctaggctcatgtttttggtccttgtttgggggccccattccttggtcttggtccccatcaatgttcgggtcctaggtcctagtctgggtctaagttcgtgttcttgtttaggttcgggtcctgggtcccaatttgagaacagacctcggtttggattcaggtctgagttcgggtccaagtaccagtttgggttcgggtttcaggtcccaggtctgagtttaattcttcgctcctgggttcggccccagtttttgggtttgggtccaagtcctggtcttggtttagctcccaaatcacaggtctcggtttgggtccaagtcctagtatgggttttggtctgcgtttgtgtttaggtttgggtcctgttacagtcccaggtctgggttctcatcccaaaccttgtctgattctcattccaggttcaggtccgggtctggctacggaactgggtcttggtcctagattcaaacactaactacaagttaggtcgaagcctcaggtgtatattcagatctcaatcttggatcccggtcttgttccagtttgggtcctaggtcccgggtcgagtcctgttgggttctatgccctaa

SEQ ID NO: 226159 - DNA, 1390 bp, Cannabis indica
tatgatggatgcattttcctcataaatagcctttaaccacttctctttattgctactttcaatggcttctttgtaagaggtaggttttgagttttctaactcatttgctgctgcaagtgcaaatgcagagtagtctgcaatgccatacctagcagggggtttaacacttcttctacttctgtctctggccaggagataatcatcaagatcttcttgagctttcagagagtcagcattatcttcttaagttggcatttcacctaagttgttgggaggatccacctcaatgttcagtttggtgaagttgctatctatattgagtgttgggacaagtaggggtttcattgccatttcttcctctaggaagattacatctctactgagtatgcaccttttaaaacctggttcgagacaccatatcttgtagcctttgacaccatcagggtatccaaggaacatgcacttcaaggctctaggtttcaatttgtcttgcttcacatgtgcacaggctgtacacccaaagacttttaggtgatcatagttctgaatctcacctgtccatttctcctgtggtgccatgcaacttattattgtagatattggacacttgttaatcaaatatcaggctgtatgcaaagcttcccctgaaaattttctttcaagtccaacacctttgagcatatatctaaccctcttcaggagggtcctgttcatcctttcagcaagtccattttgatgtggtgtgtctctaattgtcaagtgctctgcaatcccttccttgtcacagaatgccttgaattggttagagcaaaattccaatccattgtctgttctcaacttcttaacgctttttccaatctggttttcaagcagctttctccacttaacaaatgtgttgaaagcttcatcctttgatttcaagaggtaaatccagaccttccttgagaaatcatcaatgatgcttaagaaatagtgagcaccaccaagggtaggaatcctaggtgacccccacaaatctgagtgaacataggccaattgttccttggtgttgtgcctaccaggggtgaacttttgcctgcaactcttgccatagacactttcttcacagaatcctagttttcctattattcttccttttaagattccttgcttcttgagttcaacaatacccctttcactcacatggcctagcctcaagttccatagcttggttaaatcatcatcatctgcatttgaaacattggacactaaactagtaactattttcccttttagaaaatataggccatttttatatcttccctccattacaattttagtgcctctagtgattctaagcacattttcatctattttaatagagcagtctttagatgctaatgtaccaatt

SEQ ID NO: 226160 - DNA, 2900 bp, Cannabis indica
atatatatatatatatatatttatatatgtatttattaattattggtgagttttatagagggaccacactaaaaaaaaatagttacctttagtgacaactttttagtcacaatattaatttttttgtgactaaatgtaatttttagccacaacaaaaaattatttatgactaaaatatagtatttaggtacaagtttgtcactaatttagttttagtcacaataagtattggtgacaaactaatttagttttagtcacaataaatattggtcacagactaaatatttatgtacaagtttgtgactaatttaatttgtgactaaaaacatatttaattataataaattgtaatttttgtgactaactttagtcacagactttttaatcacaacataaaaatgatatataatttataattggtcacaaatttttttatttttaatcacaaattttattgcgactgaaaataaaagtttttgtagtgtcacttttggtcctacgtaatactgattaagtacagttatatttttttatttgtttaaaaagcaaagttctaacaatccgtcacacattttttttaatatgcctgtaagagacaacatgtaaaaacaaatattagggagacaaatatacattacaagaaaatgtcacttttattagcgaagaaatgtcacttttattagcgtatattgtaaattaattgaactaataaaaagatcaaaattttactagtgcacatttacagtagcaaaattctaacttttaccaacgcaattcacaaaaacttcaaaaaactaaaaaattaagaaaaactaatctaaaaccctaattataaaagtatgaaaaattatttttgccagtactttttattttgcacgggcaaaatttttaataccaacgttaatttgccaaccccttttgccaacaaattaaaagtaaattttattttgccaataccaacttttgccaacatattttcttgtagtgatggtataatattaagggttcagattgattatttcaacaatagtactactactttgtgctaacaagtggtatcatataatacataattatctaattagtaattagtatatatataatatgtatttacaaaatttgtattgaatccatcaacctggttacctagtctacacttgtccacttgtcccagtggtgcacaagtggtatagtatgtacatatacatatatatatttatatattattatatattttttgtctattcatattaaataataatttgattgagtcatgaaacagattaaaacaaattaatttctaaacatatataattttctaaagctatatataaagtttcaaatgcatttcagttatgtaaataaatctgcaaatttagatatatatacacacacacatgaatatgtgtttagtaaaagtggtgatgatcatttcatatatctattattccttatttatgataaccctagttcttgctgagaaacaaaccagccatgagatgagtgcaaagaagttagatgtgggaagaatgggccaccaataagattccctttcagactcaaaggcaagcaaccatcccattgtggttatgatcctggctttgacctctcatgtacaactcattccaatcaaacccttcttcacctcccaaatcttcacttgaaattacatgtaacaaaaatagactataaaaaacaatcattgaaggcatataatccttattgcatccacaaacacaatttgaaattcctcaatctctcaaattctccattcttttcactatacagtggtgattctatgctattgaaatgctctttcaatgagtcagattactatgggcacatgtattcatcaccaattccttgtttaagtgactcatccaaatattttgtttatgccattggtacttattctaacatctggggggatatagttgggtgcagcaggatgtataacaatttgcaagtcccaccaacaatattccattcaataaaaatggaagaagtagtgaggatatacttatggtggtcaaaaccggattgcaaatattgtgaatctaaagggaagaaatgcacactgatcaagaggcctaactcaaacaatgccacccaatgttccaaggatacaatgaaaggtatttttaattaatttatgattggttattactttttaattttctaatatttttaatataaaacaagcttgtgtgtttatttatatctatatttttttaacaggtgttttatttcaagtttcattaatgacttcaggtgagtatttgtattataattatgaattcagttagaatttaaaataaagtgaatgaggttctatcttaaaattaattggcaatgggaggagcagcccattcatcttatatattctattatctttacacatattagcaatgtagaattctctaatatccgctctcaagatagtagctattttatttgctctcatcatctaggacaactcgatcataagcggcccttttttggcttactatctttgatcacaagtgactctttttgctttactttttggattggtatttttaaatttttggtggctccttttttaggcttctacttggatcgatttttatgggtcggactcaaaatcaattggcaatgaaaggagtagcccattcatcgtatatattctattatatatatttccacaaattagtaatgtaagaagactctctaacaaattccaacattattttttacaaccttgttaccttgtttaaatttagtgtcttgagaatccctatatattgatatatataattgttttttaattatataccttactaattttaataattgatcaatatataccaacgggttcattttctatcatattggggctccttgcaactttttatgtctgc

SEQ ID NO: 226161 - DNA, 1682 bp, Cannabis indica
cacaagatgcattggagggccaccatgatagcttcaaccacgaccaagagcaaagaaggcttcactaggaccaaatcgagagtttgggaaagattaagatctaccatttcgagaggaaacaaacacaaggttttcttgcattttgagagagagatcaatcatagtagagtgatgatcaagatgactttcatgtgcaagaagtaaggcttgaacttcttcaagactcagaacatcacttcttgaagtaattcctaaaacaatgggattgatgtttccgatcaaggccattgagctactaaataatgagatcttgatcatttactagtgaaccagcaacaaccaagttatcaaagatggattgaatcctgtcaacataatctgatagtaagattttcctttaactgtcattttagttgaggacgccacacctttgtttggctcaagaatgtttgctcaagagtgtgccaaatagtttaagaagtgtgatgatttgccaagatgccaagataccctcagtcatcgaagatcgaatctaggaaagtaagagttgatcttttcactttcattgagagtatgccaaattgatttcactattgatgagagtttgtggagaaggaacactaatgaagagaatttcatcaaaatcatgacctatgactgttggtaccacttgcgatttctaagccaggaaatttaggcgatcaagattgtgagcgatgaagtgagaatggaagaacaaattctagacatttttaggggagttggagtcactggagctggagtagttgtcatcaatgatggaacagtggtaaccattggtgcaacgatattgctaggatcaaaagttaaaaaatttatggatgtaaatcagaggtgattgataccatgtaaacaaggcaaagccaagaacaaagtaatatttgaaaaaaaaaattattgctatgagctaagtgctataaaagcttaacctaaaataattgactgaactttatttatatgagaattgttttacaagagaaatgtacaacataaggctaactaactgagtttgactaacaagattaattagtatgttggtttacaataataaacatttatgtacgagatgactcataaataacaatgctccataatatatattaattgagaaaaaaaaaattaaagccttgagctttttgactaccctttaactcagaatttataggaaaacatacaaaataaacacacaatatttttatttaggattgaaatttgataattgttaactcacaaaattgtctctaaccaatagtgagtatgaaaaaagagtcaataatatagaactagaagaacaaatagagtgtgacagttggatacaacaattgcacaagtcaataaatgtttgaaaaagtatatataactgccaaattttgctttccaatcacaatcaatggttcctaatatttgcctttcaactgctaatcagagtactaaaccatgatcattattaacaaagttgaaataatttggttaatttttacatgaacaatattggtgcaaattagagggcattttgcatcccataaaccccacccaccaacaaccccaccccaaaaaaataaagagaagaaataaaattaaaaaaaaaaaaaaaaaaaaaaaaacaaaaaaaaaagaaaaagtagagcaatagcaagacgttg

SEQ ID NO: 226162 - DNA, 1124 bp, Cannabis indica
aactcaaacttgctcaacctcaaaataagccaattataatagttcaatccagcctaaaacataaattaaagtccacagaaaacaatctgaactaaaagtcaactaaactgaattaaagtccccaattgacaaccctaaactcaaagaaaccatccaacaacaaaacaaaactaaaatagagttagcgtaggatttttacctttagtaaactcttagatttccactaaataacctctaaaactgatgaaatctcccctaggttgctggttcttactcgccgaataaggaagaagaagaatatagggttttctctttatttcttcaattttctacttgaatattctataaaataatattttattttgtatactttaattaattataacaaagccagcttccactcaagaaaaagaaacacatattcccatggtttaaaatgcctaaactactcttgcctcattttctaatttatgatatggcctaggggtaaaatggtccaaagccactatcccgcctaaactcaaattccctatctcaatgtactataactttgaaaaataaaaggttccatgtttacccatgtgacttaaataaccctccgttgcatttttcctcgccactagctaaatcaaagaacatattttgcatttaacataaatatttacatataattattattaataataaaattattatttataaccctactgatccatatctaaatcatacggtcattacaattattccgctgtgaaaagaattttgtccttgaaatataacttgaataactctggatattgagtcctcatggcataacgcacactatatgtagcaggttacttttagaagaaaaatgaaagcttaaaattcaactgccacgttactttttcaaaatgataaaatttgttttttaaaaaatacagtcacaactcaacacactcaaccatatttaatgatacatgtataagatgacttaaaaactaatatgttactttatgcaaaaataaaatcaaaattaacaaactatacaaaaattataggtaaaaagtaccaagttacaatttgaagcaaaaacgaaatctaaaatttaacaactatgtcactttgtgcaaaaatgcaattaa

SEQ ID NO: 226163 - DNA, 1484 bp, Cannabis indica
aaacaatattattatctaatagcaatgttcttacaacagaaacattttatcatctaataatgaacttgtataaagagatacataatacaaagtacatatagatatatatgtatgaatgtaagacacttatatgtgtagatatatttatatatataaagtttttataaacctttacaaccaggaagatcaatccattggagttgaacttcaacttcaccacattcaacatttcttaatcttaaacaaaggtcttgaatgactttgccttcactccacatgatgcaactttcttcagccaaacaattttgcctacttggttgtactcttgtgattattgtcccacttggaagatcagaatctaaattcatcttcaatgcttctatgtatgattttatgttaaattctgcatctcccattttgtcatccatgctaaatgtgtcatggtcatatacagtctatacacataaattatatattaattagttactttaatggggtatagaaaaaagaaaatatggttctttttaaattaacaaaaaaaaataagtatatttttaaataggagtacttttttaagctctagaagcgagcctagcccgtgtatacacaagagcctgattaaatcgtatataataataattaattaactgattaagaaactacttacttaccaacataataggaagattagagtctgtgactgaaagggttagatcttcattccactcaggattaacatccttcttaactactcgtgtctttagtttctgtattaatgttaattaaagaattaattatagatttgaactactaatatatattagaaagagagggataacgataaagggcacaaataatacttaacgttgatatcatatttaagtattggatcagatgtcacatattttaatttaataattattatgaaaaaaattgttatatatttgagagggggtggatgacgaacctgaaattaattattccctaagtaacaacaaaattattgggtcatttttaaaagaaaatgttgtatatttcaaaattactaaaaaaatatgtgtatttttaattttaatttttgttttcgggccctttggatagggcctaggccagcgcttagcccatcttaactaagtctcaactctataaacactcactgatttattaaaaaaaacaattaaatcttttgatgccaaaatcatatataaattaaaattcaaaacaagggaaactatatggcaaattatccataatttaaattggaaaaaaaagtttaagacattaatatttttctttatatgaacttgcttaacttctttgataattcatcaaatttcttccaagccacatggcactacatcgatagttttacaagttttttaatgaatctcgtaatttttcatgacacataatagtgataaattttatcaaaatgtaaatacattttaactaacctgtttgcccatcctgacaacaagataagg

SEQ ID NO: 226164 - DNA, 1473 bp, Cannabis indica
tttttatgtataaggtccttaaagtctccaagagttaaccaaaaatattgagtattacaatccgctaagtccttcgataaaattcatctaccttcccaatcattcaatccatacagaaggccggtatgaaaaaattatcttttttatactaatgtgtttaattatcaaataaatataagtgtttgtcttcgcggctacaacaacctacataggtccgtctttgggtatatataggtctattgttgtgtttcgctaaaataaagatatagtaatgattaaaattatttttggtcatcgtttcttcatgaacgatatttttctaaagatactaggttattgttaggcgcattgcacatatacttagttatatttttagtttctaattttattgtgtgtttttttaaaaatttataaattaaaggaaactaattaattttttaatttcaatattaaaattgaacatacctaatattaaaagtaacaataataaaatagtaatgttacaaatagtatattaatatttatatatatatttaaattaatttaaaattagtataaatacaattaatttaaaacaaataatattaatatttatatataaatttaaattaatttaaaataaataatatttacatttatatatttattaaactaaccttactaataccgttaaactaaacataatattcttatcttcttaaaatattctgttaaactaacgaaaactgttagctagctacattttatatataaaggtatgaccattttgtttgtctaatgaaaccaggcaaacctttagtagattgaaactcaaaaatatttaaattatggggttttttcataaatatagacaaatatagtagggtttatttttatatagcataaataaataatgcaaaaaaatatgggattgaaaaattattaaagtttaaaatataggaaaaacctaataaataaatttgataaaacttgttataataagtttctccggaaaaatcactagaaaagttattgtcatcgggaaagtcactggaaaagtcaccgccggaaaaggcgcatcatcaccgaaaaaggcattgtcgtcggaaaagtcgctggaaaagtctttgtcaccaaaaatgtcactagaagtagatgtctcagatataaataaaaataaaactagttctataacataataatgaataaaaataaataactcaaaccagttataattgaaatataaccaattctgtaacataatgaataaaaacaaataacaaaaaataactcaaacaagttataattaaaacagaaccggttctataacagtgttataatgaataaaaacaaataacacggaataactcaaatccgttataactaaaatagaattggttatacaacataatgaatacaaacaagtaacacgcaataactcaagacaattacaattaaaaacaaggaaattagtttctaaaacactgaaatata

SEQ ID NO: 226165 - DNA, 1881 bp, Cannabis indica
agaatatatatagatgaatgccacgtgtacagtgacttgacccacgtacgtcggtcaaggatcttatactatgaaatatcaattccatctccattacactatagcaatagtactcctatataagcatttttcgttttacaaattaatttagttttggttagttatttatataatcaccaaccaaattatatatatattaatatgaatattttggtgttactcaattttagtgtttcaaagatactattaaattttttttgtattattattagtaattaatttaataattatatggagagtgaagagaaaactagtacaagtagtatgaatttgaccaattaatttaaaaaggtgaagtgatattgaggaggcatagactcgacaacatgactatctaaaaccattgctactcaatcttctgatttttttgaaccccacaacaaccaaacctcagctttttcttctttgtctcgattccttgaaaccatgcatcaaaagaatattatttgtgtcaaattagattttttttttttttaaataaaatgaccctacctcatttccatgtatatattttgtgaaaatggttcagttatttgatctaaaataataataatcatgtaataagaagaagctagtttctcatgattacatatagtcataaattgttgacttgttttctctttattagccgctaagtttaagtgggtttcgtttcaattcaaagtccaaaagttctaattcatgaagaaatatatacacttttaatttctacctatattatccgatcccactttaatatatagagataatgtgaaaattataaaaatatatagacctcgatcgaatatatatatttatataatgcaacgctagattttattttttttatatatatactttatttatatctaaaataagtaacatatatatgattctcgatatataagcattctaattctatgctctatcctaaaatagctaaaaaaaccaaaagtaattataattaagttaaaaaaaacatgaaggttcttaattatatgatatctatgctatttgttcttataaatttctagagctgaaaaaactattatttcaaagtggaataattctaaagtggagaattctttctagcctataatataggtagtcccacatgaaaagaaacgaataatggaatcatgagaaagaacggtaatagtttattatagatatatcttacattatttatttagatatacatatttatgcaatgtagagagccacacacacagtacacagtcgattatatggaatatacatatacaaattaaatagatattatataattaatgaccaattttctaaaaagtgtacactcacagtctcacaccaccatgtatatatatataggctgtgttcattagatactctttaatattattcctctctagctaatagatatgtgtgtgaaatgaatgatatttaaatagaaaaggggttggtttgaaagaggtagcaataaataaaaagaagatatattaaaggcttagaagcgtggaacagtgatgttaagcaatgattttgtctgatcagggacagcacaatgctcagctttccaagggcacaccacaacttaaaatcctttgaacccctttctatatattctaaccaatgtgcatggtcacaatatatattcatgtagatgaaaaaagaaagaaaaaaaaaaccaatgatttagcaaaagggagtgtttgaatttatttctaggtagctcatgagtctgagctggtcctaatttctatatggccgcatgcttgggcttttttgggggtggttagggcatgataaatgtcattgggccaatttaatgggccatatctctctctctctctctctctctct

SEQ ID NO: 226166 - DNA, 6819 bp, Cannabis indica
acccgaaagtaggcttaactaataaatctaagaacatgaataaaacccaacagtttctccttttcagctaaccctaaacagttatcgcatagcccttgggttttatgcgatgtacatggagtatgtgcgaaaggaaccttcgatggaggacttcagctacttttatgatataaaaaatgtgggccacaaaaatggcttctattgcttcagcaagtgggccacttctaatattaacggagtagaaggcatggtttccaatatggcagattggaaatctaagtggttctatatattcatagtaccagggattaggacagattttaatcgtcgacccagtacgtcgcactttccaatacttagcttatatttgttaccttatgaagtcgataacagttgtttcctcattgatcgtagatagaccggctcgacctgttctagatctaatccgaaaagaagttgttgaggtccttggtagcctttctgttcaagatcacgattggcgattgctgtacacaactttgaatttgtgagaacataagctaattctagagaatgccagccttcatcgagagacagtgtagaaggacccgtctaagaagcaaaaagagagaatagacaagtgtctatccaaacaaacctctcgaccaacatgagcgatataacataacatatatatagttatcttaatgtttttatcttcacagaaatgactttcttgaagcaagctccagtgcttaactgcaagcccaaagctggaactgcgacgacttctcctatcatccctcagaagaggaggagtgatgtttttgtgactcctgctgctgactcgtctaagaagcagattaggccctctcaggataagggaaagaaggtcatgatcgacccgtctgttagagctcttgactttgtgactcttcaggccaagtttgtgaatgacgagtttgtgttgagggtggaggcgatccctactgaggaattgatgtcgttaggggtggaactggccacatagttcatgactctattctcgagggcatttgtcgcaggttccaaagaggttgatcttttgaaaaagcaaatcactcagcttcaggagatcaacaagaagctaaagcaagacgcgaactccaaggacaaagatctcgagaacctccaaaagtccaaagagcaggtggaacttcaggccaagctctctcagtcaaaggttgaggagttggctctcgacttggatactgagaaggaaaatcgaaagaaacagtatgatcaagttgtttctgactatatatacacaactctatccatggtgccaaactttgacttctccatccttggagcggaagcggttgagatggccgaaggttttcatgctatgtcgcctactcaaactaaggggtacggagggaatctttttcctgaggaggcagagactacgaatacagaagaggtcgctgatgaagccgctagtaaggtcacggatagctctactgcccctattgctccaactgcttaaattatctaagttttttatttctttagttattaaactcttttagcggtacacaggtactcgcattttatacttggacaaatttcagtttgctttctttatattttgaacattatatatcccttcgaggatatttatttatatgtttgcttttcgcggtacacgggtactcacatatttttacagacttaatcttaatctgtttttccaattacagcttggtgtaataactttaaaaaatgactaagagcaaaaaaaattgaaatgtcgagaaattaataacctttattataacaagaaatcaatagtacaaagtagctttatggtaggctataccccctatattttgaacatttatacaaataaattgactaagtataaatacactgcgagtactattgataataatacttgagactttcaccgttccaagcccttcggatcacagtaccatcaagttctattagtcaataggtctcatggccaattttctcagtgataaggtatggtccttcctaattatcaccaaaaactccatgcgctggatttttcgtgtttggcatgacttttccaaaaaccaaatcccctactcgcagggttcgctctttgatatttgaattgaaatagcgagcagttcgctgctgataggccacattcttcaaatgagcctgatcgtgcttttcctctaaaagatcaagttaaagtaattgattttttgtatttccactaaggttgaatacatcttttcgtagggatcctgtcccaacatcgactagtaccatcgcttcgcacccttaggagagcgagaagggggtttcaccagtcgtggatcagggagttgtattatatgaccataaaacttgtggaagttcttctggtcatacccctttacgctctttcagcttacccttgatgttatgcttaattatcttatttactccttctgtttaaccattgctttgtggataggagactgcggaaaatgcttttttaatgcccaactcatcacacaactggcgcatctccttaccgtcaaactgttttccattatctgagatcaatttataaggtatgtcgaatctgtagatgatggaattgtacacaaactctcgcaatttaacagacgtaatagtcgcaagggcttttgcttcggctcacttggtgaagtaatcgactgcgactacggtgtattttactccgcccttcccttttggtaactcatcaattaggtctatgccccaaatcgcaaaaggccagggacttgttatggagtttagctgacttggtggttggttgacatacacgactatccgctgacatttgtcgcacttcttagcaaagtttgaggcgtctacttgtaatgtcggcccatagtaccctggctgcattatttttaaagcaagggaattacccccggtttggttgccgcagatgccaccatgcacttcgcggagtatgtaatcacactcagtccaatctatgcatttgagcaacggttggctgaagcttctgcgatagagcttatcgtcataaatgacatatcgagcagctcgataccgcaattttctagcctctatcttatctttagggaggattccttttttcaagtaatcctttattggggtcgtccaggtgacctctttgaaggtatctacctccattacctcgttccggctgactgttggatgagttagcacatcaacaggaattacatcgagtaatttggcttctcttgtcgaggccaaacaggccaaagcgtctacatgagagttatgagctcgaggtactttagagacaattactttcttaaatctttgtagcaactcgcaagttaggacgaggtatctagccaaacgacttcctctggccaagtattctccgtttacctgactgacaactatctgggaatcgctaaaggcttgtaaatactcgatcctcatctcaagagcgagtttcaatcatgcgattaactccttaaactcggcttcattgttagatgtgaaaaaattcaaatctaagtgtagcatgtactttaaaattactgaggcttatgcgtattataccacctcctgagccttcgctgttggatgctccatcaacatacaaagtccatccttcattgtttggtacgtcaggatcaattcgctcttctataattgccacctcactgcttggaaattcaagtatgaaatttgcaagggcttgtcccttaatcgcggatttaggtttgtatttgatatcgaactggctcaactccactgaccatttcaacaatctacctgaggcctctggtttcactaaaacttgcctcaaaggatagtttattaaaacttcaatgctatgggcctggaaataaggtcgcaattttctcgacgctattataccagggcaaaagccaatttctccatctgtggataacgagtctcaacgtctaagaggcgcttgctgacatagtacactgggtactgcttcccttggtcttcacggattagtaccgaactaatcacatattgggacactgcgaggtagatggatacgacttctccaagcattggcttggaaagaattgggggctgccccaaatgcaatttgagggcctgaaaagcttcttcacagttcttagtccattgaaacttcttatttccttttaaaatttgaaaaaactctacgcttatcagaggaacgcgatataaagcgattcaaagctgcgacttcacccgtgaggctttggacctcttttggtatggtcggagatcgcatttccaccaaatctttgattttagaaggcttagcctcgattcctcgctggttcaccataaacccaaggaattttcctgatccgaatccaaagacacatttgagatggttgagtcgcattttaaatcatcgtagtatctcgaacattggttgtagatgggtgacatggtccttcgcatgttgagatattatgagcatatcgtcaacatatacttccatagtctcaccaatcaggtctgcgaacatcatgttcactagcctctggtacgttgctccttcgtttatcaaaccaaaaggcattaccttgtaataatacaaacctcagtttgtaataaaataggtatattcctggtctggttcatacatcagaatttggttatatcccgagtatgcatccatgaaactgagaatttcatgacctgcagtagcatcaacgagttggtcaatgctaggtaagggaaaactttccttcggacaagctttattcaaatcaatgaaaacaacgcatgtacgccatgagccattaggcttaggcaccagtacgggattcgctaaccaatttgggtagaatgactcccttacgaagccacatgccaaaaggcgatctacttcctccttcagcgcttagtacctcgccgggtccattttccagcacttttgtcagacacctcgcactttggggtcaatgttcaactggtgacacatgacctgtggagatattccaaccatgtccgagtgtttaaaggcgaaaacatctatgttttgtttgagaaaggtaacgagcttttctcgatgttgaaaagttagtttagaaccaatttaaaaaactttattattatctaaagggtcaataggtacctcaatagtatattccgcaacttgggcggtagtcgtataatcgaggatcctcggatctaaatctggcttttcttcctgtggtatctcctcaattctgaatacttcttgtcgaagaggtggtgcttccaacatgtatatcatgttgattgatttcttttttgcgagttttaatgcagcattgtaacattctcccgagtccgactggacacatcgcacagattctactccagcgggagtagggaacttcatggtatgatggtagatggatgtcacgatcttcatttcctttaggatagggcggtcaattactgcattatatgctgagtactggtcgataacagcaaagtcagccatcgactttgccacgacaggtgcggttcctaaagtgatcgggagcttgatcattccttttaacgcaatggtgtctccggtaaaaatgtaaatactcaaaaccactggtcgcagatccttctcctgcagccccatctacctaaaagcttgaaagttaaggagattcacagaacttccattgtccactaatacgcggtggacgttatctccccaatattagcaacgatgaccaaagcgtcggcagtgggtgatgaacccacctggcgtcactttccacgaatgtgatgtcatcgcactctttcttgaatagtttttctggccgctcacttaaattatttacattagtgagtgcctctcccttgcctccttggcataccgtccccgtgatattttggaatcccctgcgatgtgaggtcctccaatgattgttaagatgttgcgaggagttctcgaattgctcgcgttgttatttctttctttatcatttgcttggggatgaccttcctcgcttttttgtacttgccaaacttccctcgtctgatcagttcctcgatttcatcctgcaaaaaccaacattctagagtggtatggccaatatccttgtgatacttacataatttctttgggtctctcttattgtgatttcctttgattgggggaagttttaatagaagactccattcttctcctcaaccgtatagatgtggtcctacgggactgctaattctatatagttcacaaaacgtggacctccttttatctttggagatgactctttctttggaggggatttggccaactttggacttcgctgtctttggggactgcatcttcttgagcttctccctcttgaatttttccctctgggactgtgggatcgtgattgtgatactggaaactcgcgtttatcctttcctttctctagctcggctagagaattttcaatccttttatgcggctttgccatagcgaagaactcgaccaacgattcgggccttcgagcctgcaactctttacagaaatcagttcttggcaggacacttgttatcaacatgcaaactaacaaagactcgggggccttctctacttttgttacttcagcattaaaacatttgaaataatcttgtagtgactcactgacctcttgcttaatattagccagagtagtatagggtggcctatacgtcattgtggcttcgcaatgtgtgagaaaaaggtcgacaaaggtttctcatgtcgatatagatgcttcaagcaattggctgaaccaattgggagcattatcctccagggttgccgcaagaatgcgacatttcacaagttggagtacctggtccacttccataata

SEQ ID NO: 226167 - DNA, 2275 bp, Cannabis indica
aaggagctcaatataaatctttttatgttcaaaaaggtattcaagtgtataattcatgtgttgaaaggcctcaacaaaactcagttgttgagcgaaaacatcaacacattttaaatagaacacctactacattattgcagcatctaactccttttcaattgctgcataataagcctcctacatatgaccaccttagaaattttgggtgccttgcctatgcttcatctctggccagttcaagacacaaattttctcctcgtgcacatgcctgcatattcattgggtatccaaatagaatgaaagcctatacacttctcgatattgccacaaagaaaattttccactctcgagatgttgtcttttatgagaaaatttttccactcaagggatctcttaatcttaatcacttggatactttactctcttcaaagtcatccaatcccccaacattggcccctattgacattaataaaccagcaactgtggttcctgcttccactactgctgatattcaaaaccctacaattgaccctgctgttactcaaaaatcagcaacagctcctgatgctattcccacatcagcagttcctactgctgagattcaaacacatgcaactgctcctgctgttactcaaaaatcagcaatagctactgatgtaattcccacatcagcaccagctccttccattaaagcatcttctaaggtcagttcgcctattcacactacaaaggcaggtcgccaaaacaaccacaccatgtcatcttaaggactatatttgccacagttctactgcccatcccttggtcaaatatctcaagtatgacaaactcagcattccatttcgaaatgccattctacatgcttatactgagatcgaacccaccactttcaaacaggcatcaaaatttgttcagtggttaaaagccatggattctgaattctttgcactcaagaaaaataatacttggactgttgtatctttaccacctagttacaaacccattggtaacaaatgggtctataaaattaaatacaactcccaaggtgaagtcgagaggtacaaggcatgccttgttgcccaaggttactcacaaactcatggcatagattatgttgaaaattttcctccagttgctaaattcaatactctaaaactctttttagcactggctgcactcaataattggtccttacatcaaatggacattgataatgcttttttgcatggtgaccttgatgaaaaagtttacatgacactccttaaagagtatgttcatgacggggagctcccgcctaaccctgtgtgcctcttacataagaccctttatggtcttaaataggcttctcgtcaatggtttgctaaactaagcgcaactttactcaaccatggcttcaaacaatctgcctttgacattctctattcatcaaaaaatcttcaacaagctttcttgctttactcgtatatattgatgatatagtcattgctagtaccaatgattccgatgttgctgccttcaaaatctttctaaagtccaagttcaaattaaaaaatcttggccctctaagattctttttaggactcgagataggacgatcaaaagctagtatatttgtgtcccaaagaccattcaccatccaactactcaatgaaataggtctacttggatccaagacagtgtccacacctatggatgcaaatacctcccttagcaaagatgttggtcccttagtaaatgatgctacttcttatcgcagcctcattggaaaactccttttcctagccatcactcggccagacattccttatgctattaattaactaagtcagtttgttagtgctcctcgagaacctcatctcaaagctgcacatcgcattgttcaatacatcaaaagcacccctggccaaggacttatttttcactccaacaactctccttctctctctgcagcttgacctttccaactccaagcgtatgccgatgctgactggggttcttgcattgataccagacgttccataacaggcttctgcatcttcttaggccaatcacttatctcttggaaatcaaagaaacagtccactgtctcgaaatcctttgcagatctactactacaaaatggactattcccaacggttaataagaggataaattatgaaaactgttggcaaaggtaagaggttatttttcccatcggtttagcaacgttgtaaaaaaacgttgggatagctattgccaacggtggagaaccgtggataatactaaatggtatttt

SEQ ID NO: 226168 - DNA, 2244 bp, Cannabis indica
aatacattccgtaaaaatacaattacaagataaaatcacgtctccataaaattttacctgtaaaaaataccactatctaataacaatgctatcatgtgtgtggtgaaaaaatagcaatgaatttccttttctggaaaatccaggcttaattgtcccgtagtacttttgtgtggtactgatatttttgattatttaaattaaaagtatataatgtgtgagaataatatattattacatcactgaatatgtaagcactaaaattttgaagttgtcccaccaataatagtggattgcaaacaatgcaaggttcatattcagagacacataataaaaagtagctttattattttacgtacactttcaattatatgtccccacatgcaattagcttacgtcactgaatacgcacccatgcaggagttcccattcccatggaagtagtttaatatgtcccttttgtttaatttttgtttgaaagagataattatcattaattaattagccgttaaaagcattggtagtattttctaaaaggataattacactatatatatatattgaaaattttaatttttttacttttatattgtggagtagatttttttaaaaaaataatgtgtaagtcttaatcttatactgtgtacagtattaagttttcactgttattctacggttggtttttagttatatttcactgttgtttttagctattctatttgtgttctactattattttataaaaatacaatatttttgaaaatatttttgtgtgacagtatttttgtaaaaattaacctaaattccagtatttttgtaagttttcattttctaaatatgttatatatctctatattattcaaaaatataatattttattttatattttttctacattatttttggcacatttatttttaaaaacactctaatggtatactacattttaaaaatattataattatgatgtgacacattattatatatagatataatttttttattaaactattatatatattgcacctttaatttttgttgtaaaaaaaaatatagcatcaatatcattgtatatatcaataaaaatttcaagaataacattcttttattttcaatggtataacatccttatattttgtcacctaaactttctacctcatcaagtattctccaaaatattaccattggagatgctctaacaaaaaattaaactaaagtctcacaaaaactcaagtaactccagttggtggagcattctctctaacgctttgtctatttgctcaattcttgctaaaagattgcatattgaggaagttttctgttctatctgtagagagggagagaaaacgattgtacacatttttttttatattgtaactttgccttccacttttggagatcttctccgtgggttatttttccaattttagaatttggtgcccgtgtgtgggattgagttaaattcttgtgagatctaaagactagaggtgtggatgtacatgggtttgttcttttatgcttccattgtatagtagatacgatatggaaagctcataacgacaaggtacacaatcatttgatgtgtaatattaaataatatattgactctatctatatgtgttacggagattatggttcttgtttattttcttctccgatgacaactgagtctcctatttggtcccctcctccaaaagactaggtcaaaattaattgtgatgttaaagttggttgagattcgatgtgcatggtggctttgactagggaacacatggagacagctttgtgagtggctaccgaagtgctcaacttctctgatcctctaattggagaagttgtggtatgtctgttagctttggaatcagcggttcgaagaagcttaattttgtgttgattgagagtgactctgagacggttatcaatgcacttaaagaaaattgctcatagggtattggtaactatgtgattcaatgtaaacatctctcgaatcttttgttaagttgtagttttatttttatttctagatagtataattttacagctcataatgtgactagtggactttcgccaagaaaataattggtatgttcgatcttgtcaatataccagataacattttatataattaccataaagtctaatttatagtattaatctaaaatgtttttattcaaaacaaaaactactcttgcttcactaagggacaatcaagagactgatcatttacagagcaattacaaaataaaa

SEQ ID NO: 226169 - DNA, 1955 bp, Cannabis indica
aaatcacttatatatatatatatcaactttgtattaatagtgtaacaaataataaaacaaacacaaaaaaataacaagacatcaaaacctaaattatatcaattcaaaataaactacaaaataacaaaataataacacaaaggaacaagacatcaatctcaaatacgattaagagaaacaactacaaatcatttatattccaactcattaaattaacaaaaatatatatatatatatatatttgattagaaataaactagtcattaactaaaaattatatatatacttatttttcttttatttagacaactaattcaatacgaataattaaacaactcaattttaatagacaaatcaaccaagcatcaaatacattgtataaacccaaaagaaacttaaaaacaacacctaaccatcctctataaaactaaagaaactggaaaacaactacaaatcaactattctttgaagaagaaaaaaacacttgagtgatcctcactgatataatttataatcctctctaatatatatcacatatatatatacatactgtaacactaattaaaagaacgccacgtgttgcgattatactgtactaatcccgttaattagggtctactaaatcaagtggatttaaataaaacaaatgataaattaaaacaaacttgtaataacttaaacattaatacaaaataatatttacatgaccaggatcccataattttctttttaaaaatattaaaagttgtttacacaaaagttagcctaagcgataaaatgagatttctaaagcaatcttccatgggacccaatccgcttggtctagcttgatggaaacatatacaacccactgtcgaaggcttcaaactcatggttagtttgatgctgccttatccttgcctgcacattagagcactcatgagccaagacccaacaagaaagcataatcaaatccataatataattaccatatttaatacgccactgtatttatgatgataccactgcatcttaagtctattttgtataaacaccatgtgttacgttcacacatctatttaatttataaggccttattaaggtttatctcaattctaattacctagtccaacctagttgtgtcttatacacataactcatatatgcataatccataatataattaccatatttaatacgccactgtatttatgatgataccactgcatcttaagtctattttgtataaacaccatgtgttacgttcacacatctatttaatttataaggccttattaaggtttatctcaattctaattacctagtccaacctagttgtgtcttatacacataactcatatatgcataatccatatattatgctctcacaagggtttatcctaatgctgtttatcaggcctaatctagttatatcttatacacaaagttttatatatctacacaactcatttaaaatattctcatatatagaaactttagactattaatcctaacacatgtttctaaatagctaactacacacgattagcatataaaagggccaaagcgttaaacttaaatgtagggctcacttgaattccaacaaagtggagaatccaaacactcaggcgatctcgatcaagtgaccgtagtcctagtcacaaacccaggtacaaaaataataagattaatcctcaatctcataaaatatttataaataatggctccaaaatttgggccaaatgatatagcttttcaagagtttctgaacggtataaagaacatgcaaaacggagtttagagtaaaaaattctagccaaaacaagtttcataaaattctagctttgctgatcgtatagggccgtgactcccaagtacaggtctgaggctcttggattaaaaacccaaaaaaaaaaaaaaaccatattttgagctccataaaagtaccaaattcaacacccaaaaagtaatacttt

SEQ ID NO: 226170 - DNA, 3524 bp, Cannabis indica
ttttctctttagagaagtatatagtatatttttagtagatcttacatcttgttcaatatttaagacggtcttttattctaattttttcgtaatggtagatattgtaattatttaaagtcacttataattttttttataaaattttaaattatttacagtaactaaaagggatattggcggccataaaaaattgattttttgatggtaaaactatttaaacggtactctattttggtcattaatattctatctaaaagtctcagttaactgttatagtggactgtccacgtgcacacaagtgtacatgtggcgtgtgtacacaaatatacatgtgtccaaaaacagaagtgcaatagttttacggtcaaaaaaatcagttttatagttaagtgttagaaaatataaaattcaattagttttgttgccaatatctctacttaaaataaaattcaatttttattaatttttttctaatatacttaataagtaattgtttgaatattttttaacactgtaaattattttgaaaatttataaattattataaataattacaatatatataatcatgaaaaaaataaattaaaatattttttaaatgtcaaagaagataaagaatcaactaaaacaccattttagattatgaagtacaaattttttctcactttttattatatataagttagagccaaaataattagaaattcagataaacgtgcaacttttgtgtgacccaactaatcacactctttatttgagaagaaaaaaaaaactaatcacactctcctctttctaaaaaagctaatcacactctccaatttaaccaaatatttctttatttactttatagtgtacaaaataatgtaaaattggtgttatactttttctaaatataataccaattactagaaaagtttatatgagtttgtaaataaaggtgtatgctcattattatgttatgtgataatcagtgtttgtatatgttttttttttctcattttctaccccataattaattgtctcctttatcattcttctttatacatcttacagcatcactaataaaagttgtcacaaaaaagtgattgttattagtgagtccaagtgatatggagtgaaagggagaaaataattttgtatttttatgattgacattgataccaaaattaagcatagataccaacctaattaacatcatcttttagaaaaaaaaaatgattttaaagtattcactttgtatgctctttagcaccctctctaagttatgatcatattcattgtcttcttagtctttcatcaactctgaatatgataaaatactttatgacatgttacgaatatataatgagaattaaaggtaagagagtcattcttttatatttgtttgttttaatttattgaaattaagaatgaaagaacttaattaaataaggataaaaaaaaagggaatgcttctcccacctatttagaggctgggattttagatttgcttaatgcttgtctaaatcacacatccacccctaaagtaataatcatcctatagtagactttatgtgatcgacacaagtttggatatcctagtcggtgtagcctaaaagggtttagaacgtccctcttatagtctggcatatggtttatagtcttcttcaagtatttcagaatatgtttaattgttatctaatgtttcaatcccgatttagattgatatctactcacaactcccattgcataacaaatgtcaaatttagtgcgatgcataacatacacaagacattctaatgtcaatgcttaggaattcttcttatggttttatctcttgtggagagttaaggattgctcctagataaacgaactttgtatcataaggcaaacgatctctctttactactacaaaactagacattccaacgatcctcaaaatactattttttgtagaaaaatcatcgttaataaaattaaatgagtgttttaacttgttgagaaaaattaaatattcctaacagattagaataatcgtgagggtaatttgcgacgatttttaagagtttagcttgattttttaaatagggaatacgcaacggtttaaaactgcgggctaaactatagccgacagtttaaacataattgcccaccttattaaggataaattcacaactgacagcttgaatcatttggctttcgatataagaaaagatatgcataaagatttcaggatccaaatgaaattatgaaaaagcttggaggtgcagatagaaggcactacacctagttaggtgtacacctgaagcttcatactcgaaattatctagttatttgcacatgctaaagttgagaaattcaagtaccatcacggttgtggtagaggatggtcacttcaagtattgtttcttctcgttgggtccttgtaggcgtgagtttatgtttttaccgacctgttgtatgcattgataagtcttttttgaagactatttatggtgggaaaatgttgtatgcagtggcactggattcaggcagtcacatttttttgatagctttcgtagtagttgacaacaaaaaccataactcttggacctattttatgagaaactttaaagaagtaattagtgatgttgagaacttagcattcgtgttagataggcatcaaaacattgctcatgttttagagctcgtgatctctaatgcacaccacggtgcgtgcctacagtatttgaaaacaaagtttcataaagaatttaagaagtttggggcaatgaatattgcggttgcattataccttgagaaaattgaatttgagaaatgggttcggccatactttctaggggtaccgttataatgtaatgacgagtaattgggctaagagctttaacaacacaactaaggacttaaaaggacttttcgatcaatgcttctgtagaattcgtgaggttcaaagtccaacagtggtttgctacgcgaaaagaaaaaaccagacaagtggatgaagaccctaacaccagaaatggaagaggacttggcattgcagtttgagaaatctcgatatttgaacgttgaaacatgtggaccttacacgttgaatgtccaccctggaggatccgttgagaattggtgtcgtagtggacttgcaggaacaagcttgcacttgtggcttgttccaaattatgaaatttcattatcctcatgcatgtgctgcaacttagcaacgaagtattagcatgtacgcactatgctcaccatattacaccacataatataggaggagcacatataaaggcacaattatgccagtttgtgacaagaataaatacgaattgtctgatgacataaagaacatgatagttgtagtgcatgttgagaagcgactagtagggcaacctaagaagcaaaatatctgaagaataaagtcaaaccgaaccgcttgtaatggtgaaagaattgtgataaaatgaacctatagcaagtgtggtggcaaggggcacaacagaaagtcttgcacctacaaatgttaaaaattactgttgaatttt

SEQ ID NO: 226171 - DNA, 3658 bp, Cannabis indica
aaaacaataatataacaactaaaaataacgtaattgtaaaacttaattgttagagatacacatgattaattcccttaagtcactgttagttagtctgttattattgttgacactgtttgttcacagctgtcccattctgttattttcagctcctttgtaatctgttgtaaccgacttagtctttcatatataaaaggtttccaagcctgcatttcaaggcagagcttcattcattcacttcaattctcttcattccatagttttctctcttgcttcatatcacaacatggtatcagatgcttaggctttaatggcgtccaaaggaaccgagcaatctactcgaagcaacacactagaagctccatcagctactgcaactgaaattccacatttcctccccaacaacaatcttcttccactaactctgcgcctggatcgatcgaattacacgttctggcgatcgttagttcttgctgccactcgagcctacaatctcgatggttacattcttggaaccaacccacctccagctcaaactactgcaggtaacaaccctaacccagactatgctcaatggattcgtcttgatcaattcttgatgcattggctcatgaattctatcactgaacatatgttgggttatgtgatcaactgtcgtacctcgtccgagatctggactgtctttgcacaactcttcgccacaacatctcgtgctagactcctccaaattcgtggccttctccaatccaccaagaaaggatcctcaaccattgatgaatacattttaaaaatgaaaggatatgctgactcccttgcagctgctggtcaagccatttcagatgaggatcttgctctctatgttcttggtggccttggccaagaatatgaatctgttgtggtaaatttaacctccagatctgaaccgttaactcttcaagaaattcaattcatgttgcacagtcaagaagttcgactacaacaactctctgcttctgccttaaacacagtccaagcaaatcttgctaatctctctgttaatggaaccactcgtggtcgtggataccgtggtgcttacagaggcggtcgtggttatcaagctaatcgtggtggcagaggaaatcggcctgtgtgtcaactctgtggccgtgttggtcatacagctcaaaagtgctatcataggttcgatatcacttacaatggacccccagcacaaggtgcttctacctcaaattcttcttcagataatccacaggcaaatatatctgaatcctcaattcttgaagagtccccaggaacttggtatcttgacaccggagcaacaaatcacctgacttcagacaatcaacaactcaacaattccacagactataaaggaaaggcaaaagttgttgtaggtaatggtgattctatcccaatcttacatgttggttctaatagtatacccacccatctcccaactaaatctctcttactcaaagacatattgcatgtccctagtataaccaaaaatttgttaagtatttctcagtttactcatgataataatgttgtgcttgaatttgattctttgtgttgtcttatcaaggacaagacaacgaggcaagttcttctaaggggttcccttcataatggactctactccctgaaagtgcctcacaaacacaacatcacagcttcaaatactcagtctttccctgccgattcaagtttcaaagctactgctttcaattgtaacacgtctagtaatcctgttagggataaatctcagtttgcttctatttggcattgtcgccttggccattctgcaaagcaggtgttgcaaaaggttctaaactatgtatgtcctgaaataaaatgtaaagatcacagcttttgtgacgcttgtcaattaggcaagatgcaccagtttacattcaaacccactaccaataaaactgtttctccatttgaaattgtgcatacggatgtttggggtccatccttttattcctcaagagatggctataaatattaccttagttgtgtggatgattacactcgctttgtttggatataccctatgcaatcaaaatctgaagtcactatcttgtttactcactttcaaaacttagttgaaagaaggttcaataccaaaatcaaaagtgttcaaactgatcttggtaaagaatatttgcctctttacacacattttcaaaatcttggcatcacccttaggcaatcttgtgcccatacgcaccagcagcagggacgtgtcgaaagaaaacacagacacgtcgtagatatggggctaacattgttggctcaggccaaaatgcctctcaccttttggtgggaagcatatgctgttgctgcttatctcattaacaggctgcctacccaaattttacaacatatgacaccatttgaaaaactatataaccataagcctgactataatctcctaaaggtcttcgggtgttcttgttttcccctcctcactccatacaatcaacacaaagttgcctttagatctagtaaatgccttttcttaggttacaataacactcaaaaaggttataggtgtctccaccctagtggtaaaatatatgttgctagaagtgttacattcaatgaagctgagtttccttaccttgagttgttttcctctaatattacctctgttccaactcccagtattactctcgtacaaggcttccccatacctcaacatactcccaataacaataactacagagtcaacacccccacaaattcatcacatgattctaatgcctctgttcaaacacctcactctcattaccccagtaccccaaacactgccaccagctctagccaatacacatcaacagattcctccttgccatatcctttacctcctcagtcaccctctctcacacaacctgtttcagatcaaccaccaatttctacccgtgacaacactcatcccatggtcactagatctaaggctggggtgtttaagccaaagacatacatcactcaaatcaacaatattttagaaccaacctctgtaaaacaagctctaagcgatcccaaatggaataatgccatgaaccaagaatttcatgctctcaagaaaaagaaaacttggattcttgtgccccccactacagatatgaaaataattactaataagtggctgtttagaatcaaatataatgcagatggatcggtgaataaattaaaggctagacttgtggcacgaggttttcaacaaacaccggggttggactttcttgaaacttttagtcctgtcatcaagccatgcaccattcgaattatcttctcacttgctgcaacaaatggttgggatattcaacaagtggatgttaataatgcgttttttaatggtgaactaaaagaggatgtctacatgcaccagccgaaaggattcattgatcaagaattccctcaacatgtttgcaagttaaataaagctatctatggcttaaaacaggcccctcgcgcctggcttgacacactaaaatcaacattactgctatgggggttcaccaattccactgctgacacaagtttgttcttctctcggaaaacaataaacttctgcttcttcttgtgtatgtcgatgacatactcatcacaggagaatgtcctcaacagatacaaagcacgattcagg

SEQ ID NO: 226172 - DNA, 1226 bp, Cannabis indica
tcatattaggatgctaatgaatcatacatggtagtaaatctagatcctggtaaaatatttccaacagtcagaccccatggtcatcatggctgaacaacttcaaatggtaaaaagtaggttaatttgacgggatcaattcaacaaggtagtggtcacaaagatgaccaaaatggaggccataatggtccttctaactaagatagttcctaacatacaagcttctccaacaattgacgcctctaagaaagtagatccaaaagatcttggaactttaggtgttcgtaaagacaaaggcaaaggaatatccatcgaagaatcgaaaaagaatccttccaccaagcaacataaaatgtctaaagctgctgaccattctcaaatagaggaggaaaggaaaccatgctccggggcatggtgaccagaccaactctagaggcagagtcaggtagaaaaataagactgatgccggagtttagaagccagagtgttagatggataagcatcctctcactgattccagtaatctcaatgaggatgttgacggagtacatccagtatcggatgacagtggtagaatccttcccagaaatgatcttcgaagaagattgaattctaagaaaggaagagccaaagtagaaaaaagctaaacctcgtgggaacgatatgagaaatcacatcaatgatcgtgttcacgaaagacaatctttaagtgacaagactcaacacctggaatgtaaagtcggggagttgatgaagatcacggagaagatttctaaaaaccaaagtggcgctgtcctagattctgaggaagaagatacgaagccctatgaaagagaatcattgaaatgccaatgttgaaatgcttcaaaatgccatagatggagctgtatgaaggatggatggaccccagggaccacctgtccaaatacaaccaaattatgcaagtcaccaaggctagtggcaaaacacttaaggcatacttaagtcgttttagtacggttgctgcaaaggttagaaatctcactactacaaaattggcttttcccaacggttaataaaagggtcaattatgaaaactgttggaaaaagtaaggagaggtttttcctaacagtttagaactgaagcaaaaaaactgttgggaaaaccaatgccaacagtggagaaccgtgggcaatactaaataatttaacaatgattgccaacagttaataactgttgggaatactaa

SEQ ID NO: 226173 - DNA, 1382 bp, Cannabis indica
cctttgaggaagttcaggccctcttgctatcacatgaaacaaggttagaacatcacagtaatgtgatagacttgtctctcaagatgcaagccaacttgagtgttaacccatcaagaaatggaagatataatggatatgctggtggacaaaataacggtgtgggtcgtgattctggtcaattttttgggcgtggtgctggatcaatattattgtgtcaagtgtgccttcggtttggacacacaaccattatttgccactaccgattctacaaaaactttgtcactcccaagtatggtagttcttcttcctttcaagcctttttaactgaaattgattctcctttttaccactaccatgctccctgacattggtgatgatctctggtatgtggacaccggagctacgaaccatgtcagttgtggcacaactaatttggaatctactacaccctaccacggtactgaaacactggttgttggtaatggtaagcaattactaattttgtatattggtcaatctactatttcctccttaatagattcctctcctttacgattaaaaaacatttaacatgtgccttccattaagaaaaatcttgttattgttttccaactcaccactgataatgatgtctatcttgaattctatatatactgttgttttgtaaaggacaagataacagggacctcttaaaggtaaagtaaaagatgatttataccagcttggggatgtgtccagtccagctttacaatgtcatcttaccaccacttctagggaatacaattcttgttgtaattgttcttgctattgttattctagtgtaatattagaatcttgtaatcttcaagaaataaataaaagaacttttgatttgtctgatgtttctccacaagttttttctgtctctaatttaatgacattgatttttagaactctaaaattgccatcctactaaaaatacattggtcaaattgttaccacatattcctggctcaataaatgcattacagttttgtaatgctagtcaccaaggaaaaagtcacaagctcccaatttctatgtcacacaatagggccactcaacctttagcactcattcatactgatctaaatactatttccatgttgtgtctaaatatggattaaaatactatgtccatttccttaatgactatagaaggtactgctggattttcccctttacacaaaaaaaccaagcctttgaagtgttcataaaatttaagtcttgttgaaaaataatttaattttccaatcaaaagtgttcatgccgattggggaagtgaatatagaccttttgcacgcttcttagcagatcaaggaattcatttttagcatccttgcccaagaacaagtgaacaaaat

SEQ ID NO: 226174 - DNA, 1822 bp, Cannabis indica
aatagtttatggggtatttttaaccacctcttaaaagtttaggggcataatttggtacatgtcaaaatttaaggggaaaaattcttattagcctatatttaatatttaaggtaaaatagaaaaaataacattttagtgaactattttacagaataaagtagagaagttgttgggagtgctattattactcatgtataaattgcaacttcttttttatcattgtattaatgagcagccacttttattttcttgttcttttttgaattgaaatttgaagttgaatagaaatatacaaagagaaatgctaaaatgaacccgtggtgtctagtactctctaatgtgtaatattattattaatacaattaagtatcaaatttcatataatttaatgtaataatttttatggaatatcactaaataattacaaagtactacttctaaaatagtatgaggtactactatatctaataacaaatactcatatacaaagtattatagaattattaatttattaaaagattgatcactattttttttatgataataaataaaaatatggaattttcgggttgtagagtgaggattaagtgggtaacgtgggtggcatggtatgtagctacgaatacgacgggaaaactcacatgaagcagacattaattcacgaggctccttattaagacctctctcttcctcttgttcttctactactccctcaagcacatgcccaaaaacgacgtccaagtgggcccaactcacttttctctcattttcacacttcattccaaatattcttgttttattccactattcatttatttgtattgttttttgaaagaatatagatcatcgtcattgaaatattagaggaaagcctcgttacattaaaaaaaatattgagaattaattctataagtattagaagtaattgaagagccaaatgaattaaaagattttgttgttactttggggtcctgaagtataaaatttttttactcgttggtgttaattaagcggtctgtggacttttgtttctcttcacagggcttttgcattaataaatttcatattacgttagtttgaatttgctaaatctgttcaattgcaatcatataatgcaatcgtattctccgatccaactgttgtttttatactatatccttgatttattcaccagaaattttcttgtagctcagctacttttacttttcataatcataccttacataatgaatatagtagctttttatactatataatcataccttatataatgaatatagtagcggtcttaattgggttatatatatgatactggttgttaatacgaataatagaaactctgttatagctatttttgtacattcaatgtactctatggatttggtactgatgccaaatagttaagatgaaagaggtaaccaaagggttcattactgaacaacagtttgttgcaagcaaatatgctttcgcaaaggatatgggttgcttagaaatttatttaaaaataaaatatttatgatcatgtatgagatgtggaataaattgaacacagatgcattatgaacaaagaatcaaaatgccttcagccattgattctttgaacttcaatctcacataagctttgatctgcgaaagaaaagaaaactgattagtgtgggtaatcgggcttccaatctctctctactctctttagatagatttattgtgtttttacagaagtagtgagctcggggactaagaccttatatttatataggtgagacattccatcaaggtctctgccacaatttattgtaataacattttgacaattaattctgaa

SEQ ID NO: 226175 - DNA, 2598 bp, Cannabis indica
agcttaaaaaaaacacaacaaagcaaggctatggcacctcagattggggcatgtaagtcagagggtacttgaggaaatgaataggcaaggactattcaaagagaagctaatagaagacttgaattctatgatgaatgtgttttggggaaggctttctgattgaagttcaacaaggcagaacacaccaccatagagaggttagcttatgtccattctgacctttaggggtcatctaggattccaacaaaaggtagagcacgctatttcatgtgtataattaatgattatatcaagaaagtctgggtttatttgttgaaaagcaaagatgaggctcgaggaacctttgatacatggaaggggcttctagaaaaccagactggaaaaaaacttaaggtcctaagaactgataatggtcttgagtactggtcaaaagagttcaagcgattgtgtgccaaaatgggaatccagaaacatagaactgtgatcgaaacccctcagaaaaatggtgttgctgagaggatgaatagaacattgattgagagagttgggtgcatgttacttggagctggtttagacagaaccttttagggagaagctcttaaaacatcctcctacataatcaacagatcaccatttgtgccaaataacttcaaaacgccagaagagttatggataggtaaagccccgaacttagatcacttaaaagtgtttggatatattgcctttgtgcatgttagacaagattattacaacctagagctttgagatgcatgtttcttggctaccctaaagggattaaggggtatagaatgtggtgcttataacctagattcaagaagtgcttgattagtagagatggtttttccaaggaagatgaaatggccatgaataccaagagcacttccaaagacaatgaagttgtattagatgagaatgtccatattgaggtggagcaggttgctcttacagcaccaactaatgtttttcaagattgaactgaggtaatagaaggagaagacattgaagatcagtaggaactcaacaactatcaattagctagagatacagggaaaagtcagagaaagacccctgatcgttctagttatgctgaattcattgcatatgcacttatgattgcagaacccactagctttcaagaagctatgagaagtatagatgttaaagcatggctgcaggccatccaggaagagatgtagtctcttaagaagaataaaacctggatcgttgtgaagaaactagagttttacaggctggtaggatgtaaatggcttttcaagaataaaaaaggtttagggaatgaacctaccatattccaggaaaggttagttgccaaagggttcactcaaaaggaaagcatcgatttcaatgagattttccctccaattgttaagcaagcttcaatcagagacatgaccgtaaaggcaacaaacatggatctagagattgaacagatggatgtaaggacagctttcttagattgggaatcagaagaggagatctatatgcaacagcctgagggctctaaaaatgggaacccagatgaggtatgcctactaaaaaaatatctttttggcctcaagcaggcacctaggcaatggaacttaaggtttgaaacctacatgcagaatatctgatacactaaaagcatgtatgactcatgtgtgtatttccataatcaaacatacttactactctttgttgattatatactgatctttagcaaagcaaagtcagtgattgacaagttgaaaaggaaactcagtgatgagttagagatgaaagatctaggaaaagcaacgagaattatttggatagacataaggagacctacgcctggcatgataatactttctcaagctgcctacctacagaaagtattaaacaagcttggcatggtcaagtgcaaactagttgcaacaccacttgctcaacactttaagttgtctgcatctcattcaacaaaaaaagatgtagaaagagccaagatgagcaaagttccctattcaagttgttttgggagtctcatgtactccatggtgtgttcaagatttaactcatgctatgagtgtggtcaataggtacatttcagaccttggccttgaacattgggaagcactgaatggagaatgaggtacctgaaaggtactttggacactggtattgtgttcagcaaagagatcaagtacaaggaagaaatcacttgttttgtggacttagattttgtagcaaacctagacactagaaggagcataaccgggtttctattcactgctcttaggggttgcattggctggaaatctaacccacaaaaagtagtagccttgtcattaatagaagttgaatacatggctgctgtagaagccatcaaagaggatatatggcttaaggggttaacagagaagttaggtttcaaatatgaggatatcacaatttactatgaaaattaaagtgctttgcatctcatgaaaaatccaatgtttatgagaggtcaaagcaaattgatatcaagttacacttcgtaagaaatattatgccatccaagcaagtgcaagtgaagaaaataagcacacatgataa

SEQ ID NO: 226176 - DNA, 1484 bp, Cannabis indica
gatttatcctacaatttatgctttagtactttgtttactacaacttgacaatctgattccaacttctgcaattggaaagtcagccaaagaacaccagtgtaaagcatattacaatgctaaagcttcgacaaaaatagaagacaccttactcgaaattcgaaataaattcgaaattagagttgagcagctagcaactacctctctttttttgttccttacaattgcccaaaatcctatatctttctcttcttggcatctaatgcggcatcaatatttacctttagcgtgcttgatggtggtgctttgaagactcgatcaaactgagtaaagaaaagaaggaaaaaagaataaaataataaataaataaaggatgtgggacccacaatttttttatttattcaaataccccccccccccccctcctctctatactaaaagaaaaacttataaccatcactatcgacaaactccgacgaccactttcaggccaccttctgaccccaccatccacaccatcagaacctccagtcaccgacgatctcagcccccaagcagcgccgcctctttcgctgccgttagcttgggatcgcgagtcaaagttctgaggttcaaacattggacgcatttttcgatcacatcaggtgtctgtttgacgatccatcttcaccattagactcagctcgtcgaggagaaaaatctacacttataattcattctgtcgagctcgctacttttttcggtgacttttcgatgatcgcatgttgttttgacaaatcgttggcatgagtgtgatctactcgttgaggtgatcattttgatatatactactcctatttttagcagcatttttggtactccgatttctactgccaccaatagttaatgtgtaccacttaggtgaggtttcagaactccaaactttaaatatagtcatgttatatgtcattcaactcagttttgaatgtagaatgcaataatgataattatttagtcatttgatgatcataggtgaaagtgatatctaagattggactaaacatttagagctcgggacttgaaagcttatgattgccttttaggacaaagtttaacgacttgggagaggtagggaatcaacttgattattggagttaattttgatgaatagcatttgacatattccaattttattgatttatataatatttaaaaaattaaaaacttaatgtgtatattttttttggactgttctagaggcactgtttttgtacaattatctatgcaggttatgatttttgagttttatcaaattatagtcgttatgctgtcaaattttttaatataaagggaatatgtacttttgttatttttaatgtatgtattttattttactcatgaaagtcatctttatcatgtcttgtgcatattgttatttcatgatctagtctctatgtcatcataggtggattatgttagaaatattttactaggatctaaatttatta

SEQ ID NO: 226177 - DNA, 1189 bp, Cannabis indica
aaggttgagcatctaaaggagtcatttgctaacttgcaaaggaatttgcaagagtcattggataagcaacgagaagagttacaatgctagttctaagaggaatggactagtgttgaggcttagcaagctgcccagagaaagaggagagccaatttggctcaatcgatacgtgaagcatatcaagctgataacaggatggtgctaaggagagtgtcgtccactagagaaagggtgcctcatcagccaactatcctcgtaggcaccaatgctcagggttttactataacatattatctcataggattgccacatgtgtacttttaaattagtttatgataataaaccaacattttataagaaaattagatttgattaaaattttgttcattaattataaaataagattttaaaatataatacaacttttgggttcggggatccccttaattacaaaatagttctataattgttttacatcaaaagtgccattaaactactcatgacagctttggcaaagctagccggaagagctaataggtacacttgttggagaagacttcaaactcacagttgtccaattttgcctttccccttacctgcaccatataacacccgtgagtcacaaagacccaacaagaaaatcaatatcaagtaatcacatattttaaacattccataataaaaattatattcctaataagacaaactatgctgttacttaataaagtaaccattattcttcgttatttaataaaaaaccttcggttcgttgtgtaatgtggcaaccattaatcttatttcccaagaagacaacctttataccctacagtgggttttagagagtgcaactcttccatattaaaaaccctacaatggcttttaaagagtaataactcttccatacacattaccctacaatgagtttttgaggagtaataactcctccatatacatatggcaataatcgtatcacattcaacatgctaaatggtatagttatatttttcttacctcaagtcaaaattcaagtgtactagccaactcgagtgggaaatgcagggcgatctggcccatgtcgtacaacgataaactgctaaataactcactcaaacccaatttaggacttaacataaaagctggctacaacccatctaaaaaatcccatgcagaagttctacataaaagtcct

SEQ ID NO: 226178 - DNA, 1593 bp, Cannabis indica
gcagaagctcgtggtgtctaccctcaaaatgggggaccacccttggcctccttattcccaactgaggtaaggccagccaagagctctccctttggctttgttaagaacgccttcgggttcgccttccccaggagggcggttccttttgatcctctcgagacgcagagagaaaaggaagtgagtagggccttgaaagggcgtctagaggtgaaaaggctctaagtttgtcggtgggtcactgtgatgtcagcggtttgcaaggcggagatcgtggacgacctgcacgtggtgcctccgacagatcaaatcgtggagattgaagccttggaaaatcggctgacttataggttggggcgagaggccactccttatgttgcagatttcttggaccaagtggctgggagtgcctaggaattgcccacagagacttgggcgtcttctaacagcgcggacgcttttgcgctggcccattctacaaaatggcaggccatcggggtaagacttcgagatgtttgctttttattattctctctgtttgcatctatctgctctatcccctgttctggtacttcagccttctaacttggccttatttttttgacaggcggtcttgctggtagaaagggccaccgtggaagtgggggcgatggtgatagagttagagcgggacagggcgacaaaccatgacatgtgcagtgccaacgagaccctccgagctaagcttaccgacgccaagtttcaaatggagggtctgctacaggccaaccaatagctagaggaggaaagtgcccgcttagcctgcttcattcggaatatgaaggctattcacgaccattatatggagactatgagcggatgttcggcacaggtccgtcctctctgtcaggcgacgtccaaccgtgaacctctggcccttttttaaatctgtctgttttgttgttttttgtgtatcccttgttttaattacacttttttctccgcagagacagttaatacttaaccctggctgtcggggtttttagtagtggaataggattctttctttttaatgttcctttcttggagacttgttgtgatagactatctagggactagttacattgctgaagcacctggttccaacggccagtctttcaaccctttttcttttagtcttgattatctccaagttgatccacaaactgcctttagtataaccctcactttcctaggggcgcgatgcttttttggttcgccacccaaaaggttatttgcttggccaaaagatggcccttctccgcgaaacaaggtccttcgcaatttcttgtatcctcttcgggttttagttccttcacaaggtcaagtcccgagggtgatgtctgcaactgccttagacttatactttttttttcacttggtccttgccagcctttcatttcagcttgccatgcaacttgataggctactcttttgtgaagtttttggagacgtgtaagaagggatttagacgcgtctttctttttcaataagattttggccgaacgtgcttcttatttccgggttcacatcttaagcttagtttttgagggaagaactcaagcgtatttctctcag

SEQ ID NO: 226179 - DNA, 1402 bp, Cannabis indica
ataagtaaattgtacttgtaaattgtaatcacacttagttcaccttaaaattaataattagattaattagaatttaacaaaggtattcatttctttttttagaaaaataaatctacaatacaccacatacacataagatcattgcaataaaagtattttatagatagggatagcttcattgtatacatatttaagtacatacatacctcgtaaagcaacacaacaacatagaaatgatttggtcatgatactatttactaatccccactaactatttagaccccaattcatacacttttgtgatctaatcaagagccaaataaagccaaactaaagataaagtaagaaagagagtaagagctctattattagatatattggaaattttttgaatagggacattattttgttcaatttgtagcatttaaacaaattacaacctaaattttgttatataattgtgtatattgtagttataatatatattttaatttataatattaaaaataagatttaaatattcagcaatatgcactattattaaactctattttcaatcgtaaattattaaaaaaaaaacacttgaaatacttactctaactaatagttataatatcatcaaattctaaaaatataaatatatccttatcaatagagacaagaatgatattcccactatagtcatatctataaatatatagataatataaggtgtttttacaatacattcctttactgaaccctctatctattttagtacttaagagaattttttaatctaattttataatcatgatcatatacgtaataattatttaagacaacttacaaaatttttgagaaattcataataatttataatatagaattgactcatgttttcagcatgttaaatttttcttcgaatttctcaaaattttacagtttatcttaaataattaccatagacattagacacaaccataaaaaaatgaactccaaaacaaattggtttgcatgtagactggagcattgctatgagacaccaccaaagtatctagcacttctaggatatgacatcttgcggttctttataatttttattaaattaaaataaataggacctgacattaaattacacctcataaaaatgataattacctttctagcatttctctatatattgagaatgaaaaatattaaagggcactaatggtgcttagcatcctcctatgtgtcaatattgctattggtccaactaaatatcgggtcatatatagtttaatataataccttttagagaatatcgctaaccaataacaacacgacatgttaagaaggtactaggcaccttaagtgcctaatagtaatgctcattgagaatgagggtgcatatatacactaaccccaccattctttcccc

SEQ ID NO: 226180 - DNA, 2306 bp, Cannabis indica
gtcatggactgcgaatcttaactatgtctaatgaaggtactaccacaggtgaaagaatagcactttttttaggagtactgatacactactaaaggacaaacaatgcagaaaaaccttgtatagaacaaaaagtagacagctatttaaactgaaaaaaataatactaaatgtcacaattaacatccagataaaagggttaaaatggtacataaagttcatcatccattaaaaggaagtataatagttgatatattctctaataaattaatcaaccaacattaagatgtttttggttaaggataaaatgataaaaacaaagaattggtactggatttcatacttcaatgctaattttgttatgaaactgaggtcggaactctaaaacgacacatcaacagagagagtagaaaggtcctaaatcattcacatatgaaatgtatatgtacaacagcaaaagtgaaaagtttttttgtttctccaaagaataaagagaaaagcaatcattgagtccaatgaccctaaatctggaaagaccgccaacaaatagaataataataatgacaatgtgtcatctccatcaactgtcatttgcagattcttcaggttgttttttaaactaaaatgatagtaaacagtagttgatatatatgtatatatattaaatgcttgtgtgtttacgtttggttttaagatgtcatcttaccagttcgccagtaaatatggttgcaaatccatcagcaatctgaccagaaagcataacaatagctgcatcactacaaagataaaatatatcgaaacaagtgtcaacaatattattggatgtatggtataaagatcacagaacaactaagtgttagtaataatattaaagcttctaatatttattgaatttccttgtcatgctgtcgaacttggcgagttaaaagaattaaactcagctagatggttgaaattcctttctgtttcactgtgcattactacttatcttctaatttctataccaggtagactagctgtttctgtttgttcctaatttcctaattcagtcatttatactctcccttattttcctcacaaaacttcatattcattgatttaaaaacaaacatttaaacatgaaatcgacacaatcctaaccacatttacttgctcgaaaatcaagaatgtcaaacacaatcccatgtgaattgtaaacagatatttgaaaatgaggttttcagatcagtatcatagtataggtaccgcggggagagcccaatgtctgtcaagaagattaaaagataagtaaaccaacaggaagcagtaatgtcattgagcatgtgccccacaccataataaacgacagaacatcttgtaagaggcctagtgaacgaatcatcatcttcgagattacaattacccatgaatgtgtgagcaagctgcatagaggagttgaggcttttgagcatattaatacttactccagctaattagagcacgtagaaatgagctaagagtattgaaatataacttttgcagcctcatttgagctaaagtccatttaagacaaacaaattagttttaaattacagccaaaaaggaaaaactggtgacatatattctagcagacaattatgaaaattgaatgaatggaaaaggctacattgactaagcaattaatcatacaacacaaatttaattttatctttataccaatttctgtctaatcaaatttaacaaaaacttcaacaagaagaggtattgaacagttgaaccaagtaagtagtatctttggaaatcagactttctaagttccaaaatggaaaaaatcttaaaataaagcttagcccaatgaatacattgaatagtaacacacatacacagtaaaggaaaaaataaaacagaggaccccaaatagaagaattatattttgtcgtcatggatgaatggttctggtgcaactaaatctagagaaaatgaaatgaatgggagagtaattgtcttacaagatccttagttcaatcccaaattaacaaaagaaaaagaaaaatggtaatttaaatcatttgcgacgaacagaatcaaattaagttccatatacttgtttttcattaatcactaattctgtggcttgatctagtttttcgctaaaaacaccaaatttattcccaaacataacctaacaataaattttacaatgtttcattacagaatttcataaatcataaactaataatttttagcgtataaaccatgcattagaaatgacggtaaaagcaaatccaccaaaaaaaaaaaaaaaagaaaaacaagagaaagaaacaaag

SEQ ID NO: 226181 - DNA, 2876 bp, Cannabis indica
gagagggccctactctacttttttactagcttatttagagctcctattttctcctctaatctattcatgtcgctttcaggaagatcacatcctcgcattttgtcactcaagtggtttctaaggccaccttcatgtggcctcaatttttcacttttataccttttgtacttggcgtccaattgccaaataaggtctatggtggaccaactgtcctcaaaatatccatcaatcgtccttccattctggttgatagaatcactgtggtggtttttccgccccttgggattttcccttttggcacaattttacatctgggagtagaagggcatccaagctcgaaatcaccggtggccttctgtgtcttagagggctagctggctgatttgtgtctttccgaggaagtttagaagtagacttttatgtgggttcatctacgttgcctttacctttatccttgatgggatttgaggttttggcttccgtttccccaatagcacgctcttcagccataacttttactataggttatcatcaaactctaccaggtcctcaaacttattttggaaacgctccatcattccttcattttcttagtgagtttttactactctgctaatttcgtcttcgtgcttctaattccttagtcactcgctgtaagtttgggtcatggtcataataataaccatatttgttatacccgtccttcacgtaaccatttccattgtcttcttcttccctgtcttcaggattttggtaatcattgataccatcatttaacttttcaacgtcttgtcctcgtttctcagcattggcagcaccctcttctcttacatggccttgttggagattaggggcaagagagtctgcctcctccataacagtatccaaaggaactttcttgcctacatttttttgagtgaacaccatggttgaggtggtgcagccgctagcaaactttctttagctctcaatgaaagcaccaaaatatttatcaagatttttggaaactaataaaataaagcttaagaaagaaatataatagcaaataatagacaaatgatttttatgtggttcgagcattattgatctctagtctatgagtcagttgtattggccctgtgggaaagtatttggataatgcaatgtgtgctttctgcataaaacttagctcgacactccttttgtttctctcgatgaagaagaaagcatgtagaaatttttgtagagattcggctagtgtaaaattgttcaccctttgtacataaacaatgagggtatttatttgcttatatgtgaataagggcattccctttacccacctagggtttcgtactaaacacggagcaagggcaggcactacaacatgaagatctgaccattagttggtaggaaactttcccatcgtgtggtgtatgtctgtagttaaagatcccatgtggacaaggatatgcatcactcaaaggtttcacctttaaaagttgttgcctagatatgttgttgggcaaaaagggggttttagaggcacgtacgcacactaccattttctgttgtaggggataagatctgatttagtgtgagagagtggataaccgtcactttaggttttggataggatactgtagaatgagctccgggatcaatgagccaaagccttctcggatcatactgacctactacctttctggaacacttgatgcaccagataactctaattctcaccaaacgcaaatggatagtgagagtcatggatccctatccttacccgctaatattggagacctttgattagctttcgaaatataatagtctccttagtgtcatctagaaaaaagtatatactgctcacagatcgtcaagagtggcacccttccatgattgctacgtattaggcatccgagaatacagataacaatgctgatttactttgagacataaagtatttataatatattgtagtgccactactaattgcttaatgatgtataattttggtaggaatgctattgttacattgcttcactccatatattatcgatcggcgttgctttctttcaccctgtagtaatattataaagttgtacttatcgtattttaaaatagtgaatgattagaaaactttataaaactaacagaaagcactattatcattaataaatagattgtagtgccactactaattgcttgattatgtataatttttgtaggaatgctattgttacattgctttactccatatattatcagttggcgttgcttcctttcatcttgtagtaatattataaagctgtacttatcttattctaaaatagtgaatgattacaaaacttcataaacctaatagaaaacactattataattaataaatatattggaagcatagtggataagagatattaaacataagataacctaaacaaattacaatattattgttccctagtcctcaatggtgcttttgttggaatatgttttaccaggatctagatttactaccatgtatattgtttaacatcctaaatatgaatttctaagacaatgaaattaaacacatataaaatttcagaaaaccttacattgggtgcagcggaatattaatgtctccttccgctgagatctctaacccttgtatcctgtctgtcgcagagtatcaccaagatcagagcccgaatgtccttctcttcaatctggattcttcacagccttacacactatgattgagataccacttcatgtgtgtgggcactcactctatcactcaaggtatgaaaatatgaagagaaaaagagaggaagtggttcggctatgggtatagaatagatggctcaattttcctgaagccaagaaatttcatcatctcttaagtgtgagccatcact

SEQ ID NO: 226182 - DNA, 1277 bp, Cannabis indica
aaaaaagttcgcaagttggaggcatgaaggaacaaaaggcaaagtaaatgtgcttaatttgagatggtgacaagtaaaatgacaatcaatctcaatatgtttggtgcgttcatgaaaaattgaactgtgagcaatttgaatggcacttttattgttacaatacataggagtatgacaagagtgagtaacacgcatatctacatgcaaccatctcaaccaaacaatctctttagtagtggacgccatggcacgatactcagcttctgtagaagattgagaaacaaaagaccacttcttgctcttccaagaaattagagaatctcccaaaaggatatagaaaccagtgacagatttttcggtctatgggatcacgaccataatctgcatcacagtaagctcgtaactccagagagggggtggaaagtagaagtaagctctaaaagatgataccccgaagatattatagaatacgaagaacaatagcctagtgaactatagtaagagaagcaacaagctgactaataatatgaacaacatatgcaatgtctggacgagtaatagcgagataaactagactgacaacaatggtgtgatacaaagtaggatcttctaaaggagagccattagaaggagaatactgaatgttcaactcagagagagtgtcaacaactctagtatcagtatggcgagcatgctcaataatattagtagtgtactttgactgagaaagaagataaccttttagagaaaatgcaactttaatacctacaaataacgaagagaacccaaatccttcatctcaaactgataacctaattctgactttaacattttaattctctgtaaatcatcccctgtaataatcatatcatcaacatacaaggaaagaaaaatacgacatgaagatgtgcacttgacaaataaagttaaatcatgatcacttgaaacacaattaagagacacaataacaatagagaacttctgaaaccatgcgcggggagcttgtttaagaccatataaggcattttttagcttgcaaatcttgccttgcttatgaagaacactagaaagaggaaccatgtagacttcctcatgtaagtcaccattcaggatagacattcttaacatctatttgagatatagtccattgacgaactggtgccactgctatcaaagtacgaacagtagtcatttttgcaacaggagcaaaagtctcctcaatttcataccatactattgtgaaaaacccttagtcactaattgagacttatactgtt

SEQ ID NO: 226183 - DNA, 1194 bp, Cannabis indica
tttggtgagggcatgcgtttcaaaaattgtagggaggagggagggggaggggtgaatcgcaggggagaggtagtggtccggtttggtgagagggggtgctgagcagcgatgagccttttaggttttgctgagggtctgcatttggttttcacgtggagagggggggaggggttagggtttttattttataggtttaagtgtaaaaaaatagttatataattcaactgggtcaacaggagggtacaggttagacccggacttgaccatatgtaaaaatatcacccctacttgcttggtaacagtgaacgggttcaatcggacatgtccgatactgatgggtagggatgagtagaatatatgcttaaccatgaaacctacattatctgcattgcaccgtacagtgtggtgtggttaatttcattcgtgatgtgattatggttaaattttttactatcatcgcgatgtgctgcggtgaagcaaaacaaatataaaaaattgtagtatccgcgctgcatcatatacataatattaatattttatgtattatcattgattaaaaaaattatttagtgtaagataaatacatgtttcatgttaatgacattgcctctcttttaatccttatttctttatatattattagtagcagcacaaagtatgtttatgagtatttattaaaaagaaaatttgtttttctttaatgtacgtataaaattagtaatttaaccatggttaactgcaatattttgcaccgcatataggtacaatgtagtttaaaattaaggaatatgaaattaaccgtgcgattaagattttcacttaatcgcactttgtgggttggttaagtttttttatcaattcattgccaaccccacacaacactcacccctaccgacgtgtttcttccaatttctaagttgcacggattgggctcgagcgggttggtttgtggcttgcttttggattgggaaaaagttggttcacctgttagtttttacattttgatggaatttgactaaagatgcttaaataagttcctatattcgaggaatatgctctatgcttgaacctccatttcattcgctcacgagttctctctcagccaaaatatatcactttcttatctatttaaattatctcgttatttttattgccaaaatagtgcaaacagtcaatattttttcttataagtaa

SEQ ID NO: 226184 - DNA, 3710 bp, Cannabis indica
acacttttagtataattacatcttatataattattggtattttaaataaagtgcacacacgtggcgtccctgttggacagggcgttacattcagacttcagtagttgtccttggccttggccaattcttaactgacttaatttttctcgaatcaataaaaattttgtccttttcgacaatgccctaggaaggacacttgtgataatcagaactcgcactttttgaactttacaaacaatttatgatacccaagccactgtaaaaccattttgagatgttgttcatgctctgctttagtctgagagtatacaaggatttcattgataaataatataacacaattatcaaggaaatccttaaacaacttgttcatgagatccataaaagccgctggagcatttgtcaatccaaatgacatcaccaagaacccataatggtcgtatcttatttggatgcaatcttcggtatattttactcctaaaattttaactgatgataaaccgaacataaattgatctcggagaaaatagccttaccttgaagctgatcgaacatgtcgtcaattctggacaatggatatttatttttaatcgtcaattggttctattttcagtaatcaatacacatccaaagggattcatctttatttttcacaaacaaaacccaagctcctagggcgacacactgggtcaagtaaaccctagatccaacatcccctgaagttgtatttttagttccttgagttctgctagggccattcgatacggtgcctttggaacaggctcatccctaggtgccaagtcaatgatgaaatctatttctcattgtggcagtaatcctaataactatttgggaaatacatccaagaactcttttaaaagtctgacatactcaggcccaaatattttaggtctactggagtcaatcacaactgctaaaaatcctacacatccaatgtgcagtaaatctttagctttcaaaactgaaatgattggaatccgagaaccctaaacagtctcgacataaataaatggttcctcaccctttggctaaaaagttaccatctttcgtttgcaatcaatgctagttgaatacttggatagaaagttcatcctaagtataatatcgaactcaggtgattccaactccactaagtcaacacttaactccctattctcaattataattggcatagatctaatccaccttatgcagataaccaattctccgctaggtagtagggttccaaaccctatctcaataacatcattaggcctacccaattcattaactactgttaacgctacaaatgattgtgtagctccagagtcaaacagtaaaatataataggattcattgacaggaagttaacctattaccatagaaggattggctgcaacatcttcttgtgcaatggaaaacatccgagctgtgatgggttttgccttttgtttcggttcttctttctttatttgaggagagtctttcttgaagtgtccaaccaagccacattggaaacatgtcttctgattacatttcctgggatgatgtttcttacaatagggacactcaaaataagaataaggttggtgaccacctctaccttggttcccacagaaccttttgctttatctcgaaccacctaatgtcaagaaagtattcctctttcaatcaatgttggtatcaccaccatctctaccatagccagaagtaggaagggtggtggtctcgtaaactcttagagtcccttagggctcttgaagaaattccactacaccctcggctcgaagagccttctcaaccatcacaacataggttgttgtatcatttgtagtaatcactagatcatgcctaatcttggcattcaaacctgccaagtatttttccttcttgtcaaagtctataggcactattctcaaagccaacttggctaatcgatcgaagtttgttgtatatttcattactaacatattctcaccttggaccgaatcagtaaattctttcctcttagtactgtggactgcctcattgtaatatttaacattaaacagatctcgaaacttttcccaagtcattgtagtgatgtttcgggtgagggacaccaattcccaccacacgagagcatcctcctagagctgaaacgtggcatatgtcacccaatcagtcccagtgacacccataaagttaagaattctctcaattactgtcagccactgctcgaccttccaaacatttagacctcccagaaaagctagaggtgcttgtttatgaaacctcttatacaaaagctccatacattttctatcagtaggttgttctactcgcaccaccggaaccaaagtggtctgcaattactatggaggcactgcaggaggaccctgctgtctcagcctctgaattattcatcatgctggttaattcaggcttgtattttaacaaacctttgctctcaatccctcggagcttgtggaggattttctggaccatcctttgaaaccttctacgacctctaccatgtccatggggatttagaggattttgacctccccgatcgcctccaatctcgaccatattaccttgactcgttgtgttttgttgggcgtccatattataggacttagcctggaaacccataagtaggtaggtaagacaacgattaaataaaattttattactacattcatggattttaggcaacacatttaaacatattactaacgtgcttcctatgatacttttctaatcagagaatttactaaacaagtaaaggcttactgaaccatgagtcaagcttatctctgacgatgattgtacatgtcttgacaatctttggtgaacaatctggcggctctgataccataattgtaacgccctaatgcttaggcatgctacattgactttccaattatagtgcacacctttgctaatcaaagggttttatcgaatattgtgacaaatttaaacttttataaatatatatccataaaaaagttagaattttgcttttaaaacttatattcattttcaaaataaactttacaaacatgccgcaaaactattacaaaatgaagtccaaattgtctcgtgaccaaactctccaagtcgcaccatcttgacatgtataatcatccctgagctctggactcactgttattcatccttagcctttcttttacctacacatgaaaataatatttgtgagtcaacaaactcagtaagaaaagcatataacatataatatattaccgacttgtatttaggcgcccatacacctatccacaaggctaagcagatgatcaagaacgttcttaataaaaagtacgatctctgtaccacatgctttaagtactcgtctcgtactagtgctggtagggttgaaccgtaccctgagtacaattgagtattgtatcatatgcactacgtacttaatcatactagtgttggtaacaatggatcgtaccctttgaacatgatatgttgtactaatgcactcattaccactattgtactactcttagtagcatacaaatcatataacacaacatgaaatttagatacatacatatacatattctatgctagtcttacctcatttctaaattcaagtgtgttagtcaacttgaatggaaaatcatgcgttgaatggagactgtatgtcacaatcacataaacgggtaaacaacttacaaaaaccttttcgagcagtaaat

SEQ ID NO: 226185 - DNA, 2895 bp, Cannabis indica
cacttagagctactttgtagggcagtctacttacaatcacttactatttataaattataaaacagaaaaaaattgtttgttatacccgtattatattgtatagtattatattaaattgtattttatgcaatacttttatgtaaaactatatgtggtattaatttttatgaacaccttaaaatatataatattttagtataaattaaagtttaacataatattatataaaaatatgatatataatctaattcaatataatattttagatgccgtgatctcgaacatctcctcctgttcacaaaagctcagctcatggcatcttaaaaattaccatacattaccttgatatccgtagaacaaaacgaaagctctctgacgtctcaaaaagtgtggactttagtgtttataatcaggcaaaagtgtactcaattagaagacccaataggtctaaagttattggtaaaaaaaagaactgttttagaaacaacgttcacgcgtttaatggttaaaagatggggatcaaaatactaaagttttttcatcgatatgctggcactagatttcataataatattattaaggtattttttccacttttaagcctatctctatttgatttaatttcattctttttttgctatgattcaaagtttcttaatgatggcttgttctatatttgagagagaaaataaaaattaaatgcatcaaattaaaacccttgcccataagaaggccttttaattatttcttttaaacctctttttgatataaattatttttcttattcttttttctatttatgctcttattctgagttgtttattgatgacttgttctatatttttaacgatctatatttaagcttaaccagaattgattgttgccaccataatctgatactatggttaaataagaactaattttagttttgtcattataatctgatactatagctaatattagctatgagctaatatcttattttatcattattttctgatattaggttcatgattttagtatattaccttgtaatttgaattttctgggtttgctgaaattttttgaagtattagtaactctatcaaattgtgattgctttgatattttattatttttggaaaataatttgtttacttactatcttactctaagtgattgaatttaactaatttaattataatctttccctaactttgcttttataggtcttcttaatgattacggagtttggtgtactgattccttagaggtactaagtatcgttgagagttactatacaactttgttcatgacctcgtatccaacggaagcagaaatgggggctgtagtttcagctatatatacctaatcgagttactgatgatatgaatagatcgttattacttccattttctgttgatgaagtttgggaggctgtcttttctatgacggcgagtaaatctctgggagaggatggtatgaatgctatgttttatgagacccactggagtgaagtaggaggcttagtcacccaagctgtgttagattgtttaaatggtacgtcagatttatcaactataaattccactatggtgactcttattcctaaaattaaatctgcagaaaaagtgagtgatttcaggccaataagtttatgtaatgttctttataagattttatcaacaattttagttcaacgattgaagccgtggttaaattttcaaagtacttttattggaggaagatgtataacagataatgcaatggttgcatatgagttattacataacttaagggctatgaatagagggaagagatgttatatgctgtaatgaaattggatatgagcaaagcctatgatagagttgagtgagagtatttagaatcagtgatgaccttagggttttctcatcaatgggtgagcttactcatgaaatgtgttcgtactgttcattattcctttaacttaaatggcgaagttaaaggaatggttacaccaactagaggattacgtcaaggcgatccactttcaccatatctttttcttttttgtgtcgaaaggcttttcggccctattatgccaggcagaaaggaatagagagataattggctacaaaatagctcggtcagccccgtcgatcactcatctttttttcgctgatgatagtatcctcttttgtcgtgcttcttcctggtcttgttcttgactgcttgagatttttaattcatattctaaagcttctggtcaggtaatttattctatttaattgttcaaataataaagattatttaggtgttaaaaagaatatgtccttaagataaaaattattgggggaacttatattgttgtataggctgattttatgtttagtgtattagttttaaccatgtgttttatgtttttataattaatattgttcttttctttgttcacaattgtttgaataatctactaggttatttaaatgatatattcttagtaaaataaaggagggagggactcttattataacttagttaatgtataattgaaactatattatttacattgtttctacactctcaataattattttctatcattttctatgagttcttatgtaactttatttctggtttttgcagctaataaattttaataaatctactatgtatttcttaccaaatacattagatgatattaaatctttgtatactgcaattttttatatgcaagttacggaagccattgagaaatatttgggattgccaatgctaagtggtcaaaataaacgaaaattatttaatgatgttatagagaaagtttggactcgtctaaattcttggaacaataagcttttctcttatggcaggaaagaggttttattaaaagtagttatttaatctattcctacctatgtgatgtcctgtttt

SEQ ID NO: 226186 - DNA, 1309 bp, Cannabis indica
cttggtctagcctcacatgatctttttagaatattattgaagcaagatatctcctttccctttccagtctcctctgaaaagtgaaaaatgaaatattactttaatattcttttagcaatttctttagtttgtttgttggctccgactttgtagtttcttagccatttccattattgaataatcaaccttatcttctgtatattttatcttatctagatccaaaacagaacttttgctccctggcaactggtacaccagaagagaggaggatctggaattatgagtcaaggaaactgatttctctttgcctatttattctttctgagtttgataaatgctgtgtacgggatcaagaaattgttgcagttactgctttagcaatgcgtcttgtcattcatttaactgatttgaaagggtggaagaacattaccagcgacaactgccaggaagcagatacagctgttaaagatctaggtcaatttatgggagctggtgaatgtggtctatacatatctgttagaagatacatcaccgcattagatactcctttttcttctcaaatagagaatgtagtgcagaaagatgataaattccttattacagcaagtgcaataactttagctcttcggccattacgtgtgacaaactctaaagtagacggccctggcctgtcagctgtggattcttttgctgagaagtactgtgttttcttacttacaattccttggctggtgcagcgattgccggctgttcttgttcgtgctatgaagcacatatctgttctatcaccttgcttacggattttactggtaaaagactcataaaatttgaacatatctatctgaacttcatcttgaagtttttcttattgttttttttccctgatgagaatttaatacttagaaactttctatgcgttctttctgagacgttcaatctttgggaggcagaaaatccagcaaattgttaggcagttccacataacgataccttatgggaggaaaccccagatctaactgcacaacctaaccctcatgggtgattatttagaattttttaaccaagttattgtcctaggcgtgatcaatcactggagtcattttcttgtccttttttttaaggaaaaaaaactcaatttagatttccttacatctgatttaacagaaacattttttttaaagatactggcacaatgaatggtatgttatgctttaataaacatatttgatgtagaggatttttttttattgctttaagcttttgtcaataatttcgttcattgattactttgagaagatattatttctcc

SEQ ID NO: 226187 - DNA, 2492 bp, Cannabis indica
aatccttggggaaaaggagtattcatgatatatggatggtatggctcgagttcctcgtctgagtcatatccagattgttttcctagctcccccagttgataccttttgaacttatcctccaactcatctattcgcaattggattggatcatcttgctttagactgagttgttggcgaagatcaggttttttctggttcaagtgctctcgcaaatctggttggtcataattactagcggacctcgttctactcatggactatgtcctacttatagacatcatcctactcatggacctcttcctactcttggacctcgtccttgagtgacttacagtcttacttgtacctgtgctttctcgatgaatgttgcaacgagtactttctccacctcgcgttgaccgactgtgggttcttgtgcagcctgaggttacactcgcttctttaagccctgatcttccccttaggcatggttcgtcgtgttcccctactgggatttgtatgagccccttccctatgggtctgggaagaacgctggtggttccttactggtgacctacgtcccccaggttgtgtcccaagattttcctcgtttccacgtggaattttttgttccctggttttgggtcgcctcctattctcatttctatgagatggttctggctgatcatttgggttttcagggggaacctcagtttcccaaggttgctcgttttcagggggtcccttagcttccccaggtcattcttcttgagcgttttgagggttctcctaagcagtttcttacctcctagttcgtgagctgtgaggcttgcctcgtggtcttctcactccagggtcaggttgattttgagtattattcccctgtgctgccctggctgcggctggctcacgctccaatttaacattctgctagtttgcctcctctaggcggcacctgagatggtgattttctaattcaacgatgggcatgtatcttgtaggatcataagcactgttatccatgggctgagcacctccaagattgggttccttgtcccttactctagggttttggccatttccatgtaaagtcctccttgaacgtgtggaccgtgtatttgggccaccttcaagttgagtcctcatggagcgagcggttcgtgtactagggccaccttcaagtttggtcctcctggaacgagtggtacgagtgcttggaccaccctcaggttgggtcctcctggaacgagtggttcatttagattgtgagttggaaggcctcctagagcccattggctcttttccaggacggtgaggggtttcttcatgtggtgtgtcaatattttctccgttgtcagccatgaagaagattatttttttgtatgtaaggagggtttttctgagcttttttcacgaatgctctcaatgaaagcaccaaactattaacgcagattttcgttaactatatttgaccctaagtagtaataaacttgcacagaaattaaaagccggtaaagaaaagataagaacacaaaggtttttacgtggttttgcagttaaaattctacatagtccacgagtcaatcttattagatttttgatacaattctcaagcctttttcctctaatgatttttcatccctttttcagtataacttgtatctatttataattacatcatagggtagttaattacattgttgactgatatcttacaacaattatccctcgaaatcgtggggtttgatttcataccacgtaaaataaatgtgatcaatattcaaaaatcacacagctatgatgggtctgcttttaccaggtcaatataaacgtgtattaaatacgttgtaaatcataatgttctgggatgtctcgatgggaacacaacatcaataaccttggtagcgagctggagcttttcccgtgtttcttcaaggttgatgatgtaagcctcgtcgttcctgtgcttgaagacataatgctccgtctgaaaaatcgcagttcttggttacaaagtggacctcagcagtcaacatcatttgtatgttagcttctatctgagagagctgactagacagagctatgaaccccattgaaaggtgtttgaagctgattaacaaaagtaccatgagtgtgccttcctatagcgagacatgcacctcgctattagttgtttggattttcccgactgttatacttagtctgtacaaggtgtattatacactaagtgccttaccaattactatgtctcttctcctaatgcgtagcgaggttgatgcctcgccttatacatctaaagttgtatggtttctcgttaatgtacgaggcaacagtttgtatatctttatctcatataagaccttatagttagcaagttgtaaatatactctgtcacttccacattaatgagttactccattttcaaatataattaccattacatttgtttattcatattcttccaagtttgacacgtgttctcctctgaagtggtagccgaattttgggtataa

SEQ ID NO: 226188 - DNA, 3161 bp, Cannabis indica
tgtctaaaacaggtgttggaagcatgtttatgacaaacgttgcatgctgagacgagtaccaccaataggacagatctaacccagcttgtgcaagcaatgtcatgcctgtctcatatatatgacgatgcttgcgttctgccctgccattttgctcatgatcgtggggacatgagtgctgaaattgaacaccattggctgctagaaaagaggcaaaactcctatactctccccccagtcagattgaacctttttgattggaagagagaactgtttttcaacaagagttttgaattgtagaaaggtggaataagcctgagactttaatgtaatggaaagatccagataaactggctaaagtcatctaaaaaatgaatataatatctataaccttctttggctgggatgtgggagggtccctagagatctgtatggaccaattctaagggaatcgaggctctactagttgaaacagggtatggtaatttgtggcttttccctattttgcaggcatcacaaaatttaagttgtttgaaggtgcctttgtagttaattttagacattattttggctaatgtgttggcacccggatgacacaacttggaatgacatatattaatatcccgagaactagtagcagtaaaggcagtaagggaaacatcaagattatgaaaactagaatctttattgatgtttgaatcagtacacaacttggagactacaggagtagtctcagtattacagaattattacattgagaatttgaaagacatttgggtcccttagtagctaactggcaaaggatctggattggtgttcttgtggtaggttgagtgagcaggtcaaaccattttgactcttcctttaagtagaccctccctgtttcttgccttcacaaaacagcaagttgagtgaaattcaagaaaatacactattatctttggttagtttccagacactgactaggttcttagtaatttgaggaacttttaaaactgaatttaattgtaaagaagacctagtagtggggagggaaatgttacctaggtgggagattgggagttgtttgccatttccaaatgctaaagaatcagaccccaagtatggagtttcattgtcaaggtgttccattccagtcgcaacatgcatgttagcccttgtatcagcataccactcttgatcttgagcaaactctggaaaagaattggtgaagtaggcgtgaggatcatcatcctcaaattctgtaagaaaggcctgatggtcactggttttgggaggttgaaagttcttatcgaatcgatagtggcaaactgaggcagtgtgaccaagtttgtgacaaagttggcacactaacctgtttgaggaatatccacgaccataaggttggggttgctacgattgaaagaacttggagtagtgcctctgctattgtaattactggttcttgtaccagtattgaatcttgaattactgacagaaagattggtagagggcttcgatgaatgatctccaatagtgtaatgtctttccaaccgaatttcgtgagtaaaaagaagagactgaatagattcaaacgatagatcgtcaatgaggcttgtgacatgaacgacaacgggatcatattcaggacctaatccattgagaagatgcatgatgaggtcactgtcatcaattggatggccagccgtggacagtgtatctccaagaaccttaaccttgtcgaagtaatctgcaatggataaatttcctttctgaatcaacgagagttgagatttgatttgtagaagccgtgctttggactgagaagcaaactgttgttccaaggttctccagagtgtatgaaaagtaagatgattagccagagatccaagaatggattctgccattgatgatcgaagccagctgagaagtagctgatcctttcttttccaggcaatgaattcttgattgagagcaccagtgaccaatctttcaggaggagcaacgccggtgaataacagatcgtcaaggccatggccaattacagtgggaaccacctgagatttccaggcgaggaagttggtgcgatcgagtttgactgtgagagaggagtttagagaattctggaaaggattccagtgttgttgggggaggacattgccggagctttgtccctgagtttgagtagcagaacgtggtgggttttcatgaattgaaggatccatatgagacttgcatcaatggcttcctgataccatgtatgaacctatcaatactaagcacacaacagaaaacaatgaatacaaagtctctaaggcttgtaaaggttaaaaccaaagagaggaaccatttcactatttatagagagtatgatacagagggaatgaaataacaaactaaagaaaacagaacaagagtgtaacagaattagttacagttgagaacaaacagtaaaaactgaattaactaattaattggagaaggtagttggttaacatcccccctcaagtgaaatggtgtggtgcacacttgaagcttggttttgaggtagctgaatctttctttagtgaggggcttcgtgagaatatcagctgtttgctctattgaaggaacaaaccgaactttaagctgcttggccaatatctgatctcgcacaaagtgcagatcgatttcaatgtgcttcgaccttgcgtgaaacactggattagcaaccagagatgttgcaccttgattatcgacctagattataggtgcagcaggtagggtgaagtgtaactcagagagaacatagcacatccatttcacttcagctgcagtgttggccaatgctctaacatctcactctctgtactgctgcgggcaacgacattttgtttcttggcggaccacgaaattaagttgcctcctaaaaacactgcatagccaccagttgaacgcctgtcatctggagagcttgcccaatcggcatccgaataggggtggagagacaagtataaggctgtattgatatgaattccttcatgaacagtacctttaaggtatcgaaacaaccttttgcatgcttcccagtgcacaatagttggtgcatgaatgaactgactaagtttgttcacaatgaacgtgatgtcaggtcgagttaaggtcaaatactgcagtgcacctactgtgcttcgaaacagagtgtg

SEQ ID NO: 226189 - DNA, 2250 bp, Cannabis indica
gattgtccaagtttcattaatcgtaaatatatgatttaataactgctacttttaacctataaataagtgaaatcaatgtaaaaagggacgacgaaaattccttactgaaaagacattgccaatcttgtatcttaattctaaaatttcctcaatattttcataaataaaataaactcatgaagtatgtaaaattaactacaaaattacattaaaaatttgctatctttaatttattgtttattattgaatatattatttatattaatttgatattcaaagtattaattatctaagcctcatttaatgttaacaaaatttggagttaacagtttgatattttcactaacaatttttgataattagactctaagaaaacacatctcctctaatcacatattttatatattaaaaagttttttccatgaaaaatactacccttaatgttcatatcgaacaaacagacacgtggcatcaccctggaaaggagccacatgaaactcatctcaatgaggatcaaaatacaggaagaggtttttgtgtatgaggttttgagagaaatggcaataaagagggtattccataaaaaaagaaccaaggggcgtatgatcccaacaattacattccaattgtaaaagtgaaaaaccgtcaacttcggcaaaggcttattgagtcaaaccaaagaaatgcaaagctggaatgcgtggctgctgcaataagagcggggcagaatgatacacctccaacacatactaaatctctcgtgaggcgtccgtgaggaaggcctcgcagataaagaacaaggagggctatcaactctttggccatgtggatgagtcatccaccagtagctttctcgtgcaagaatcaccctaattactcttgggggataaaaactacacggagttgtaaattttgggttttcagccttgaataatgaagtagagtatgaattactcattgttggactcaaacttgctcgaaaaatacacgttgaatacttagatatctgtagtaattcgcagttgatcgccaatcatgttctaggcaagtatatggcacgagaaaaaaaatggcagcctacctcatcaaaatcaaagatctcttggcacaattcaaagggtacacgataagataaatcccaagggaagaaaatgcaactacatacgctttagcttggttagcaagcagtacggtggtcaacaaggaaaacttagttcttgtccaataccttgaagagacaagtatcacctgctcaaaggagattggcattttagacgacactcctaccaagatgatcccaatcgcaacttacctcgaatcaagaacactcccaagtgacaaaaacaaagctcaaaaaataatgaggaaagttgcatggtacttgattatggacggagtaatgtacaaacgtgaattttacttcccctcttaagaagtgtcaccgaggacgaagtaacacaaattcgtgttgaggtccatgaatgtttttatgaaaattacgctaggggacaaaacctgtctaaaaatactcaagcaagggtatttttggctaaccgtgataaaagatttaatggcccatgtcaaaaggtgtaacatgtcgtttattataaaagacctaattcatgtcataaagatgatcaatagtagatcgacataaatcctgagtaatcgtgaactgaattcgtgttattagttttttttattgtgagaagttgattcttccaacttctattttaagaatctaataatatggatggctgggaacatgatctataattatggaatcctgactttcttaatggatcgaatgttggttcactttaagtattaattctagaattgaaaagttgtgcacaaattttatatctaaattatacgttcactagtgaattaatggtactaaaggataaagaagtaattcgaaagataaaatggtaatttgaccaaactaattacgaatagacataaggagggctaatcattagaattgattatatcaatgtgaactgcaataaaattcagtaaatataattctataattactaagagtttaattccatatctatagtggagtaatcatgtaattaataaacaagattatttagttgatgagattcaataaataatttagtttattggagcttaaaattataggtccatggtccccgaatcgccaccttgaaatactgtcaagggtaaggatacaagttgtatatagaagtttgaaaaaatctattttgatttgtcaaa

SEQ ID NO: 226190 - DNA, 1800 bp, Cannabis indica
ttgatgcttatcacatgtacataataagaaaagcaaagtaaaagagatacaatattttttatagagatttggcccctttaattagcggttaatgaccttttcctcttttagttgtattaataccagagaaaatacaactcagatctacaaggattgtgaaatacgaagtggctctctgaagattacaatatgagaatcaagttagcaaatctcaagtgagaatgaagcttgggcgtgtgagagagaagggaagagtgagttaggctttcaaacttggagcttgagagctttagtgagccttagagacatagaacttagaagaattaggattaggctaatgctctttatacaagagattatcaaccaatatctctaaaaaataggaactgtaaagcattatttacataattaataataaatgataaaatgattaattatcccccaagaatatggaagtagctgatatttctcccatattttgtgggttattgaagcccaaatcgcaacatagcttgctatctcagatgaaggctgcgcaccaagtgcctaccaggtgcaggctggctggccatgtacccaccaggtgcaaactggccagccttacaatagctagaggctgatcgacctatgctggccatagggtcgaccagggtggcttggcagactcctcagggtagtcagttaatcgtcttttcatccctcttaggtactcagacttcctatcagctgaagtgttgtgtagatgacttggccttcttgttgacaagttgtattctgtgtggcatggatattggccacgtggatatgccacgtcatgtgagcaaaaatatggataaaatttaccccataagtccctatgcagattcatttactgatagagactttccaactaagttttgactgatgtagcctttaccaggcagatcttgtagtatatttagctttcgaaatatttgctcttgcttgtctgatcacattccttggcagaaaattgatattacatttttgcatgttatttgttgcatgttgcaaggccagtgagagagggtcccacagaagctatataaacttatgggagtaactcacttcttatttctcacttttcattatctctcttcaaaaagcaagtaaagaaatcgcttcacttccccttgaggttgatgccccattatcctccaacactcatgattttttcattattttgatgatcaaagctttccaccatctttctcgaaggtttttactagtgggtaagctttcaaatcccgttctcttcttgtttacttggatttaccattactgctttgaagcttttctatgctttgaaaattctttgattctcacgtttgattgtagtctttttggtacgtgatagttttagaatgcataatgtgtcatttcttgacgaaaaagattcaattttggccttcattgtgattcttaactctttgagtcacgaagagcaggtttgagttttgaaaaacacacattttgattcaacatcaaccctggccaaccataagggtcttgtttaagacctagtcagccctagcactttttcatgggagctggccgaccataggggttcgccctagaaggttggcccgtctatgcctaggtcttgaggccttggctagttcttggctgggtcatgggaccctggccggccgaggcctaggttctaagcgagtggccaactttctatcctcttttgaccacgacaagaatctcgttaaggccttgtatgcatgtacaatcttagtctcacacgtggtggccttagaaactctatatgaaact

SEQ ID NO: 226191 - DNA, 2119 bp, Cannabis indica
cactattggatacggaatcatcattgcttatgtccaataaaataaaaatataaataatttttggcaacttagacaaatacaaatacataatataatataaaaataaattagatacccatttattttggacggcacgcaagttgaagagtgacacgatgtaactaacgatatttttccaattgctaaagtaactaatgtttaacataacactcaactgtaattggtgtaatatgtattgagctcattttatataaaaacaaatatgacaccaatagtaattgagaattgctaaaggaaccaccgttatatagaattgttaaaagataatattagtgcctaataatatttttttttatgtcattttactattaatataattaaatactaaattttatatataaaattgttaaaaaatattattagttctaataacaatgttctaataatattataccttataatagtgagtattactattgggtacacaattagcacccttaaaatagttagctatatattaactatattctctaaaagaaatttattcttaaattatttgagatctaatacttaattacactaataataatataattatttaacactattggatatataagagaatgctctcataatattataccttataatagtgagcattgctattgggtactacgattgacacccttaaaatagttagcgatatgttaactatattccctaaaagatattttttcttaaattatttgagacctaatacttaattatactaataacagtatcttttactaataatatcttttagtaattctatataagagcattgctattggacaccaatagtatccatcactttctataagtgacgcttcacgattagttagcaatattctctaaaagttattttcttaaattatattagacctaatatttaattacatcaataacagtataacaccgaaaaaaaaaatactagacactaatagtagctttcaacaattctcatattattattccaattacatatcaaatcccatatattttactaattagcagtaatcatacgaataccaatgcttatagcaataggctgtttataattgaagagctaaatacgatacgtaatagtttgcttatggctatggaaatattattgctcactctctcctctcctccaacttaccaaccttaaaccaattttttttcttaaaaaaaaaagaaaaaagaggagcatcacatattcatcgtcgtacagttgtgcaatgatgggtaaccaccgcctgggatctcctctcttggcctatgcctctcaagaaaacaagaaatggaggaaacctctctcctgtctcattactctcactctccttaccctcataagttagttagctaattttcttttctctcttaattctctcttcttctttttaaataccaattacgaaacaatatcatgttttgtgttatgggtttggattaaggtgaaaaaaaaaagtcaactcagtttagttttcttcagttagagaccaggtgaagaagtttcagtgctttttgatacaattacatagttcttttgaccaattttgtggtgaattagtaaaagactgttccaaagcaaatccacaccacaaatggtgtctgtttatctccaaaatttgtttttataataataaaatcttaaatactgggttgttattttgtggctctgctgctcttttgcctacttcattttgatcttattccatattttgtttttcctcagttgtgattcttctagtgcctggaaacaacataaatctttggaaacagaaagatggaaacaagcatagtaattggattcaagtaaatgatggtgacataatcgagtcacagaagggtgttgttgcagctgatgatggccgttgttctgaagttggagcttcattccttaggcagaatggtcaccgttgatgctgcagtggccaccgcattgtgcctcggtgtcgttaatccggcgtcaagtgggatcggaggaggtggtttcatgatcctccgatcttcatcaaccatgcaaacacaagcttttgacttcagggaaactgctcctttggctgcctcagaggtttaaaatctctctctctct

SEQ ID NO: 226192 - DNA, 1653 bp, Cannabis indica
taggttttttttacatttataaattataaatttattaaagaaaaagaaaacaaataaaatggacaggtcattgtaatatatgtaataacaaccactcactactcatatcataagaatatattcattttacctttgtgaacaagtttaaattattcatatcagacatactcataaaaagacaactaccaatacaaaattacacaaacacaagttatttatttatttatttatgggatttctatatacaatagattaaaatgaaatgattaccatagatttttaaattgcacctcgaactaaatatggacagctactaaaatgttcagttcccaaagaaaacgaccatacaaatattgggtcagcctcaaaattttggaaacaatacacataatacttacactttaaaatacaaaaggtttttacaagatcagtcatcagtgcaaaatgtggacaagaaaaggataaaattgtctttttgcatttgttgggtgcccttcaaaagggaaaaagaagtgtattcgtcttgttataatattacaaaattgaaaagaaaaaaagaaaagtgttaaagcatatgcccttatacgtgtgcatgttccccacaaaagagagatgtagataggtcggtggatcaatctatacaagtaaacgttacaacctttttatcccttatttttattaaattacataattaacctcacctcccaaatcccaaaactaaaatttcaaatttccattataatactatataaaaaatcctaaattacgatttaatgcttgtctgtcccatcaatctctaccgtccatgccggccactatatgaaaaagaaagaaaaaggacgaagatcctaaagacatatcacatctaagtacacgtggaagcttaacaaatggaccacactggatggttctttggtctggtttgtaggagattttagcttatataattaacaaatagaccaaaagagacatcaacgtagcgagttgtgattcagtgttacatggtcattatcgtacatttaatggggaaagtgaatctttttgtgccacgtgtcattctcactataaaaagaaagaaaaaaaaaattatttaattaactaaatcgtttatttatatattttttttcatttaaaaaaataaataaataaaaaagcggctgtgtgtgacgtgagcttgggggttggggtaagcatcccagatcttgcagccaaaagaagcttcgcctaatacaccacaccagagagagagagagagagagtcagtctcagtcttcttcttctctcattcgatatttcgatttcgttttctctaaaatttttcactattgccaaagaaattaagataaagagatgaattgggtgaaaaaagttgaagaagaaaagaagaaaataagagaaacccagaaaaattcactatgaaatttcgtcgttgttgttgtagtttcttcttttctattcttccgtttcttttaacctttgcccacgttgattcttcttcttcttcttcgaaaaggatcgtcattgatcgtgattctagttattttgttgataaatctaatagaaggattctgcatcagccattgtttccggcgagttcagctccaccgcctggaaccgacgacactgccactcctccaccacctccaccttctc

SEQ ID NO: 226193 - DNA, 1726 bp, Cannabis indica
gtggacacctccaacacctggatcactcaagatgaacgtcgatgctactgtcgactaacaggaaaatcactggtgttggtgctctaattcgagactcaaatggtcatgtagcagctaccttctccaaaccagtgattggatgtttcgaatctcatgaaatggaggcacttgctctgtttcatagcttaacttgggcactacaactccaactgccgatctctcaaatagaaacggatgctcttcgggtagctaatgctttatgcaaaccttcatctgcaatctcttcttttcaagacttgattgttgatatttctagtcttttgtcctttttccctaatgtgagtgtttctcatgtcaaacgttcagcaaatatgacagctgatagtttggctaagtttgcgttaggggtggatgagacttgtttttggttggattgtttacctccgcctataaactctattattgtaaatgactttcatatttaatttataataagtttattttctcaaaaaaaaaaaaacagaatatttcattatttaacaaaatattcttattaaatttttaaataaattacttcttatttatttagtaaaaaaataactcatgtttaatttgctaatcataattatcattcgctccctccctatcaattctctaccaactcttttgatgaaatcacattcatcatgagactcatgggtgcaatatatacatacacaaatattttatcgcagttataattgtaaacattagtttttttttttttgtttttttttttacaattagagttcgaccactactcattttttgcatggtgatgtgatctcaaaggccattctcaagacacgcttcaaatattgagttataattggttaggtatttcggttagaagttagttagttggataagtctgagctgtcattgttagttgttaatattggttgttggttaggtctgtaactacttacagtagctataaaaggctactcatgtactgtattcaattcaatgaataagattttcattcacttcagatattttctcctcttcttcttcttttctctgttttcatccttccatggattctaaactgatatggtatcagagccacaattgatgtgtgcttcttctccgttttctttcattgattgctgatcttctagcgtttcatggctcgaggaggaaaaattcaaactcggagttctcgcgatgaaggagactcgaatcagttctctgttcttggtgaaaattcgaagtcgacgaatgcgaacgatctatccaatccttacttcctttccactggtgataatccaggagctattttagttcctaagattctcacaggaagtgagaactacaatacttggagaagatcgatgatgatcgcattagtcgcacggaacaagatcaagtttgtaaatggaaagcttctgcaacctgatgaggatcaagaggaatatgatgcctggtgtagatgtaacagtactgttatatcttggattctccatgctatatctggtgagattgctgatagtattatgtatcacgataatgcagctgaaatttgggaggaattacatgatagatttaatgaaagaaatgctccaaggatttttgaggctaagaagattatgcagaatctaacacaaggatccaatactgtcacaacatactttacaaggctcaaatctctttgggatcaaattcgtgaatatagaccacaacc

SEQ ID NO: 226194 - DNA, 2380 bp, Cannabis indica
cttcatcagaaattatcccttccacatttcattcattatcatccctttggtgaatcctgttcctccttggcctccattgtgttcctttttctaccctatctaacatcacaagtatttgttcagactcctcaaagcttgaagttgtagatttggaaccatacgtagtgtagtttcattaccagtattttcttctagaattttggacatgattgaattctacaaaaataaagttagaacagataaagaaagacctcaccaaactccctcacgtgtttcactcatagaaataatttgtcactgaatttcactcgtgttttaacccaaattcgatgggctttaccctcaattaagctcacacctttgcctttttccactcgtattcttctttaagttctttaaaaacttatcaaacggtagaagagaggattcaagcagcaattctaaccaaacaaactaaatgaacaccgatgaaaactgaaaaaaatgatgagttttagaaacacttgtgtaggattttgggaaacaagcctctagaatatggagagaaaataacaaaaaaaaaaataaaattgaagagaggtttctaagacacaaagaaaatagaaaaccaattagacaagctttatgaaacaattttgggaaaccaatgagaaacaaaaataaggaaacaagtttgtgacacaattagggaaactagttaaacaaggaatcaaataattcaacaatatcaaattgggctctggacaatgaattttcgaatttcaagataaataagggaaactaatgtatttcaaattatggctctaggctttgattcttgatttttttattttggattttggaaaagaaaaaaataagggaaactgatgatagcaaagacacgattttgacacaagaaaataatcagaatgtggttctaacagtttcagatttcacaaagaaaaaatataggatatgaaacacgaattgacaagaataaagaacacaagttaaagaagattatagaacatgtattgaatagaaaaacacaaaagatagatagtccaaatttgatgatcctaagatctaataccaagtaatacgaaccacaccaacagttgtgatgaaacctgataccaattatggcagcctctaagaatactcaaaatttggatttttattagatttttatacaaagatgatatatatattaattatatttttattggatttttttgttgataaatttataacagttggttattttgtgtatatattttcatgatattttgttatattttattatttagaaatcttattgttttaattatttgaaaattgcattacattgtaatgatggtatgttttattcatcaaaaaattatggtatgtttatagagtattaaacttaaataaatggtgatatttaatttttacgtatttatcttcatattttcatgttaatattaaaatttaggtgtgtaattggatattcaattaaaaaaccgatccaatctaattaatgattgaattggattttgaggtctaattggattggattggatgacaatttttcaaatccaattactaattggattagatcggatgaggagaaaaatgttggattggatcggatgcccacccctatatggggattagctaccctcaccagtccaagagaagagagtctagagtaaacccacaaataagggcatacaaaaaatatatgtgctcctttgagtactcaaaccccaaaaacattcttagggaaataaacaataaacacatgcaagaggtcgagtcggttcacggaaccatcacctcccttaaaaatagcaagagactgagaacaaaaagtacatcacggagtgcttaaatgctcccttatcaaatatcaaacaacagaagaatcatagctagcagagctcaataataaacaagcaatggatgtggtaggagcaactgacaaaaaggtagattgagtctaggggctaacactcccttaaaggtgataagctgctaaagccccttaatgtctaaaaagagagggagaaatcatgcttagtaaatctgatacagctatccaacaacataaaataaagatacccaccctaacatacctaaggggcgccaaacaaataaaaccaattgagaaaatcactagcaacctccgccagattgatcacaataagccttccattcggccgcatgttgaacggcttcaggaccaaagatgcaaaagataggattggggttagcatgccacataagataaagggcttgatccacaatctcactgtcatgagcagctgacccttggagggtcttcccaagttctctctccaactctcagacacgagataaaagcctgccaacttggctctctagcttcctcttacct

SEQ ID NO: 226195 - DNA, 2013 bp, Cannabis indica
accatgcaacattaaatgttatttctgatctatattaataaataaatctgattatattgaaatgagtttatttagggcataaaacccaacaaccttctacgacactgcctgggagtaaaaaccattataagtcttttcgctacttacatgaacataaatgaagaaggcctttcagcaagtctcttctgagtctagaaggaacatctttccttctccacctgggaggaagaggtggcatgcgcaagtgagcttccacatgcctttacattgtgacggatgtaccttctggggaggccctttatagaagccttggcagaaggctctaatcaactaaggattaatttgactttctatattggattccacgtgtaatgtcttgcagaaatccaaacaacatttgcaattgtgcattgaaacacataatgctgaaaattgatgcaaatatatcacaaaattatttttcggtcaaatattatataatgttaacatcttaaattagaaatgttcttaatcttatgtttaattaaaaaaaattagagatatgtacatattaataataaaaatattaatggacagtttaaggtgtcaaggaccacaaaaggtagcatacttttattggtgaatttcaatatcagctcttacatttttttaatttaataaatgatttggaaagttgtttaccaattattgattgccacatctttaaggtatgagaaccttcagatgtcacataactataatagtataaaaatctatttactaaaaaatagtacaaatatcttttataaaaaaaatgctaaccaattattaaaaaacacatcgctatagtattgagcaccttcaaaaaatgctaacgaattattacatataacattagtaaaataatttagtcagattaatgtaccacataacaatagtatataaaaatacaaaaaaaaatacttgcataaaaaacacacacaaaaaagataaaaagaaaattgaaaagacaagacaagaacacttgtcaaggatgcattcttattatatagtaaatatatatatatatatatatatatatatacccacaagtataatttatctaacatgcacattcaaaaagcatccatattaatggtcaagaaagtgttttatggtataagataaaataagtgtacctaacataaaaaatttctatatatgtacttgaacgcactcttaatgaatattacttatagatggtactattaaaaaaattaatgtttctaattattaaaaaaaaagtttctatacttaagtttgttatctaaattaaaaaaaatgtctcatttttacattatataggctaaagttgttctttcagtggagagataaaacgattaaatttgagttacatatttttgatacagtgtaaaagtatatatattttttaattaagtagctaaattaagcatataaactgaaaattttctttcattattgtatcaaaatctagtaatttaatatttttaaaattgatatttagagttatttttgtagtaaccaccaagggataatacccattgacaagtatttcatatatagaattaaaagtgttccatatataacacttttcaatgggtattaaattttggtggttattaaaaaaaataactatgaatatcaactttagaatattaaactattaaattttgatcaaacaacaatgagaaatttgagtttttatacttagttacttaattaagaaaggcatcaaaaaatatatttttttacactatattaaaaatatctaactcaaatttaattttgattctctttcaactgatgtatctgtctctgtaaaaataacagatttttttaataataaaaaaaattcagcatataaatttatgtttttatagtatccatttttcgtaatatctattcatataaaataaatcatattataaaaaaatacttttgtaatatataatatatggtgcagtttgatgggttattatgttaagatagctagttaatgttggaatttatttt

SEQ ID NO: 226196 - DNA, 2561 bp, Cannabis indica
actattgtttatctcataaatcaaactccatctatgttactaagaaaaagacttcctttgaagttctctatcagaaagctcctgcctatgaacaccttaaagtttttaagcgtcttgcttttgcttccaccgtagaaaccaaacgacataaactatctccaagatctcgtcctttatgtctttattagttatccacctagtatgaaaacttatactctcttgaacatcgaaactcaagagattattcactctagagatgtttattttcatgaagatatatttccactttcggacactaactctcatacttcatgaataaatgaattattctcatattctttactgccctctacaggaccatctcaaaatccatctgaggagcatgaatctattcctgaccatgatgctaattcatctcataaaaaagggcattcctcgaagtgtgattgacatcaacacacaagtcccacctcctaatgaagtaccatccacacccagggattcaacaactaactctactgttacttcaaaaacaggaagaatattatccaaatcgaaacgtcttttagattacaattacaataccactgctactccggatattgcttaccgtattaataaatatttatcttataataggttaacacagcactttcgtacaacgatccttgctgcccattccattgttgaacccaccagctacaaaatggcaaccaaagaccccaaatggcaaaaagccatggacacagaaactgatgctcttgaagccaacgacacttggattgttgtcacacttcctggcgggcatcataccattggttgtaagtgggtatacaaaatcaaatacaatgctgatggcactgttgaaagactcaaagcttgattagtagccaattgttacaatcaaaaagaaggtattgattacttccacacctttgctcttgttacaatgttcaataccttaaaattactgcttgctattgcagccattaacaattggtctttataccaacttgatatcaataacgacttttttcatgacaatttacatgaaattgtctacatgacactccccaaacggatataaacctaaaggagatattcctccaaatgttgtatgtaaactaaacaaaagtctctatggcttgaaacaagcctctaaacaatggtttgccaaacttagcaactaccttttatccactagatttgctcaatctctttcagatcccatgttgttcattaaaaatcacaaaggcaatttttcttgcctttttaatatatgttgatgacatagtggttacttcgaatgatgatgatgttgttatttcctttaaacaacaacttaattttgtatttcaacttaagaatcttggtcttttacgttttttcttgggcttggaaattggtcgatattctcctaaaatttttgtatcacaaagaccattcaccctacaacttttaactgacacatgtgatttaggagcttctcaccaatggaacctaatgcggctctcatctgatattggggaaccttagaaaaccccaaaaatatatcgcagcattataggtaaactcatttacttaaccatcactcgccctgatatttcctttgttgtaaaataaactaagtcagtttttatctaacctaagagctgcccatcttgatgcatagaattttacaatatcttaaaggcacttctggccaagggcttttttctcaatctgcatattctatcaatttatctacttatgctgaaactaacatgcactacaacaataatggtttataccaacgccactattaccaacgccaaaaagtccttattaaaaatgatagtatcaataacgacacttacctgtcgttgggacaattattattattttttttaaaaaaaattatcatcaataacgacaatgtcgttattgaaaatacttcaataacgacattgtcgttgggaaaagttttgattttttttgaaaaaaggtcaatggaaaagcggtaaaattccctccactttcagctaccaacgacattgtcgttggtgacagattgacacgttgcagtgatcagtctgccaccaacgacaatgtcgttggtagctgtcgttggggactgttggatataaaaaaaaaaaacacagcgagcttcttcatttctcagccaaaacaaaccctaacccttcaaccattcctcacctcctctgatcagccattatcagcccctttaaaactcaaaaaaccttcctccgcttgaagctacgtcccaccaccttcctccgcctgaagcttcgcgcgtcagctcagcccagcaccgggtctctcctccgcttgaagctccgtcagcccaccaccggcggcgatttttgaggtataccctcatttttaatatgtatatattgttttatatttatatatgtatttatatgtttagataaattttgttgtttaaatgtttgtatttattttagatatatgtttaaatatatatgtatttgagatatatatgtgtttttaacaatgtatgtattgttttaagtgattgtaattttttttctttttaa

SEQ ID NO: 226197 - DNA, 2772 bp, Cannabis indica
gcaacgagctgcacagcatgtttgaaaagcacgtaatacgcctatgttagttagggtgttacagctggtctcttgcactttatgtgtcaacatggcaatgagcttctggcattgagaagagaaatcatgttctccaggatctccttcttgactgtcaatgagcccagaaaaaatggcagtgggtcgatcatgttgttgagaagatcgatcacgctgctggttttgttaattgcttggtttattagggagatctttaggcactttaccatgtaaacgatgccacgggggatatccatgtaatctatagcattttgcagcagtatgcccaacaataccacagtgtgagcatgtaggtttcccattggtctgattgttgccccctcggtttccctacatattcccagcaaattgacctacactttcattagacgatttaggaatttcaggttgatgattagtgatacctctttgcctttcttttttaatgacagaggtaaaagccttgttgacattgggaagaggatttgggatcttgtattggagtatgactcatttagaccaattaggaactcaaggaccttgtcttcatcgtgataagcctggatggtgttcataacaccacaagagcagaccagttgtggtctatattcctgcaaaagatcccagagacttttgaggcgagtttagtatgaggtaacatcattggaaccttgagtcagcagctgcagcaatcttttaacctcatagattcttggggcatttctttgttgaaacctttcctgtagctcagaccagatgcaagaggcattatccatgtacattatgctttcggcaatggagtttgagacggattgtaagatccacaaaattaccatgctgttacatcttgtccaagcctcataatcttcatcttcttcatctggtgtaggaagtttcccattgataaacttcatcttgttcctggcaagtaaagcaaccatcatcgaacgacgacaagaactataattctctgctccagtaagaactttagggacaagattaacaaaaggattatcaccatgattcaagaaatacagactgtgaggatcagcggcagagctgcgaatactctgataaagaacagaaacacaattcgaatcaccattgttggtggtactgcgggtctgagttccacctcctctggccatgatcgaagaacgagtacaaagcagaagagacgaagagcacactcagtcgagtggctctaataccattttagcaataagaagatgaagaagaaagaattgtatttcattgaactgggaaagaattaaaagagaggatatatatatacagactctaaacaaaacaaataatagaacagagtcggttaggacactctaactaactcgaacagaaataacagctctctaactaacatgacatttgtacactacaccgtacactctaagcgtataaaagttttgcaggtatgtaacttataatattatgatttgtcaaaacatagtaaaacaatatggtaggaagaataaaatgccacattgtactatcatgctagatttgagaaaagcttataatatagttgaatgagattttattgaagagatcgatgttgagggctcttaacatttttgaagctctgattagacttgtaattatttctattaagacaccttagtatttattaatgttcaatgactttatgcatggattttttaaagcgaaaaatgatttgcatttgggagatcaattgtcaccattgttttttttcttcttggaatggaatatccatggttgacctcaaatttggccaaccgacagcggagtcgtatttatgatcgagatcaccacatgtacacaattagaacaagtaaataaaatggacatagtacttttatgtttcccccttagttagcaggtaatgatctactcctctcttagttgtattgatatatgagataataccactttgatcacaagtgatgtgagttatagagtggctctccatgtattacaatagcaagaatgtgaggcagttctcaagtggatgagatgagggagacttagtctctactacaccactaatggcgtgtagaagagagggtgaactagggttttgagtgcttgaactcaagagcttaggaatgagaacttaagaggtttagggtttagcctagtgccctgtatataggagagattgtacataagatactaggacgatatcccttaaaatgaggagatatcaccaatttgttacacattaaataaataagaaaataactcataaattagccctaaagaatatgtgaataattaaagttaaacccctctttttatatgggtcgtttgaggccgattcacagctgaaaatgttgtcgaagttaaaatatacagaggcacaaaaagtgcctgccaaaggagaagctagccgacatacactttgttggaggctagctgacctatgctggcactagggccgaccaggggtggtccgcgtgaacccctctcgttggccattttcttgtctctttgtcctgcttaagtatttagactcttcgtgaactggtacgttgtgcatggttacttggtcttcttattaacaagctatatactccatgtggcatcaatctatctatatgacatgttgttgggttttgtgccctaaagaaaatccatttcaatataatcagatttactaattaataaagatcagaattgcattttatgttgcctggttcacataatttatttcatgattatgtttaatgtata

SEQ ID NO: 226198 - DNA, 1072 bp, Cannabis indica
tttatttatttatttttttatacagcctaactaaattttagtgccaatgggaataaatcatattattatgattaatttttttaggcatagttgtatgtatgcacatgttttttggaagagctagtgaaatacaaagacaaagaaagacatttatatgtgtctcgcgagtatccattattaatagtcactatttcatacatacatacatgtgagtcagtcacagtactcaaacaaaagcatcttaaaaccatgtcttttatgatgagcatgaatccttctccctcctcgccaccgccaccgttatcgtcgccgtcggaatcttcctcaacgccgtcaacactgccagtccgtacgatcccgggaagctacggatggccgttactggggcccatctcggaccggttagactacttctggttccaaggcccagatacgtttttcagaaaaagagtggagaaatacaagagcaccgtgttccgtaccaacatacccccgacctttcctttcttcagcgttaatccgaacattgtggccgtgctggactgtaaatcattttctcatcttttcgacatggaaattgtcgagaaaaagaatgttcttgttggagatttcatgcccagtgtcaattacactggggatattagggttggagcttatctcgacacttctgaaccacaacacgctaaggtaattaatttcctctcaaaagttatatttaacaaattaattaaaatctttgattgcttattctttattgtgttaattttggattatttgaactgggtttttatatattattaagatagtctttaataatttcttgcaacatataattttaagaagacagaaagagagagtgagatgtatataataatgtctagaaaaaaaaaaggactaggattatataataagatatttagatatttaaaaaacaaatctgagattgatttttatttattattttgaaaggagcaaatctgagattgattgaataattgggatcagagccaatggagtttcttaacactaagttatgattcacatttttttttattatattattatttttttg

SEQ ID NO: 226199 - DNA, 1496 bp, Cannabis indica
gcttttcaattccttaaggagatcgtatctcaaaagaaacctaatttcattttcctttgtgaaactaaaagtgataaaaacaagatgcaaagagtgggtcgtgctttgggctttgaaggtttgtttattgtagaggcccaacggagtgctaggggcctagccttattgtggagaaaccaacatgatggacgaattctgggttatacacataaccatattgattttcttgtgaactcgactgaaagagaagaatggaggctaatgggcgtgtatggggaaccaatgcgtaatcgtcgacaactcacatgggatttactccggtacctagctcgagattccaacctaccgtggtgcgtaattagtgatctgaacaacgtgatgcggtaggaagacaagaagggcggccggtgatacccacaacaactaattaatggcttccttcaggcattgaacgactgccacttacatgacctcgaattgacgagctacccattcacctgggagaagggccgtggtaccaacgattgggtcgaagtaagacttgatagagcactcataaatcagcaattcactcaggtttttcctcttgctgcactttttaatttggaaattacctcctctgatcactgtccaatttttttggaacctgaaatcactcaagccttcacacttgcttttaaatttgagaatgcttggttcaaagaaccaatttgttgtgaaattatcaaggatcgttggagtagatcgggagatagtaatctgtccaaaaaactgaagctgtgtgcagagaagcttgggccatggggaaaagagatagctggaaattttaagcaaagaattcggaagtgcaaaactgaattatcaaaccttaagaataggagggatgcacattcggttcagcggtatagtgaagtcaaaaaacagttgtttaaagtgattgatcaacgagaagctttttggaaacaacgatcaaagctgttatggttgaaagaaggcgatcaaaacagcaattattttcacaagactgctacaactcggaaaagacataatcaaattgatcggttgcaaaacagtcaaggagattgggtagattgggataatggattatcaatggtcattaccaattattttaatggcctttttgaatcgacggggggatcaaagcaagctgttattgactgtgttgatacttccattcctgaactagctcatgatgaatttaggcagccaattactgaaaaagaggtcaagaaagctgtgttccaaatgcatcttgacaaaagtccggggccagacggaatgacaccagccttttatcagaaatgctggtcaattgtgggtaaagatgtggttcaaatggtccataattttggtttgtttgaagagggttgtgctgatacaaatattttcttaattccgaagataaaaaagcctgtgaacatgacacaattacgcccaattgctttgtgtaatgtctcatacaaaatcataactaa

SEQ ID NO: 226200 - DNA, 2406 bp, Cannabis indica
ttcagatcttggtgatgctctgatacagaaaggaatcaagggctagagatctgaacggaaggagtgattatatcatgctgcacccaatgtaaggtttcctaaactttatatgtgtttaatttcattgttttagaattcatattaagattttaatgaaacatagatggtagtaaatctatatcctcgtaaaatatttccaacacactcctcctttcttaggcactcattgaacagaactaacccatgaactatccgagtttgggtacacaatacaataatctagccacttgatcacttcttttcgcaccacttccttcatgacaggattaaaccttcactgatgctcaacataattactacaaccagcttctaagagtatattgtgcgtgtaaatcgttgggctaatacctcttatgtcagccatagtccacctgattgctttcttatgctttttaacacctctagcaaggcaccttcatcttcaacttccaagcctgctgctataataactgacagcatttcattctcccccaaataagcatactttagatgaattggcaagggtttcaactccaactttggtggttcttggatggagggttttggaggcttaaaattactttccttcaactctaaagattcaaagggcctcttgaatttagggacaggttgtactagctccacccaagaaacttgggtttcttcatcttcactcaagtcttcaagctcataaagagaacttatcaacttctcatcttcccaaacttccttgtaaattctttcagtcacaatagagtcgatcacacttagacggaaacattcttctatctcattcagaaatctcatattattgaacacattaaaggtgactttttggtcattcaccttcatagtgagctccccattttgcacatcaatcagagttctcccggtagcaaggaatggccgaccaattataataggcacttctctatcagcttcatagtctaggatgatgaagtcgactagaaaaatgaacttgtcaacctgtactagtacatcttctatatttccttcgggatgggccattgacctatcagcaagctgcaatgtaacagttgtaggtcgtgtttcaccaatacccaacttcttaaagatcgacataggcatgaggctgatgcttgaacccaaatcacataaggttcttccaacatcccatcccccaatagaacaaggaatttcaaaactaccaggatctttcaacttcggtggaatctcgctttttaacatggcattgcatccatcggtgagagctacagtttcaaagtctcctaacctccttttcttcgtcaaaatatcttttaagaacttgacataattaggcatttgctccaacgcttttaccaaggaaatattgatatggagctgcttcaacacatctaaaaagttcatgaattgcccatcttgctgctattttcgaaatctctggagaaatggaaggggtggttttggacctgaatttactggtgcagattactgacttgcaggttgctggccctttcctgtatcaactgggctagtttcagcaacttcctgggcagttttgttactcaatttttcgtcgatttggattgaagtgggctccccactaccctttatttcctccttataatttttcagatgcttgccacttcttagataaatggctttgcattgttccttcccatccctccttggattttccctgtcactaggcaaggaaccttgcggcctagcttttaattcattggccaaatgtcccagctgcaactcaaggtttcgaagagaggctgcctggctttgtatcactgcatcatttttggccatataatctggcattaaactctcaaaagaactcagttgggagttttgagcatgttgtgaatgtcgcgactgttgttaaaaacctagtggatatgcttgtcttccttgggctggtgtggtacttgagcttactccttgacccccctaagaaaaattaggatgattcttccatgcttgattataagaatttgataatgccccattgtttctgttaaaattctaatttcccatgtaacaaacagactccaaattagaaggacacttctcaaacacatgtccttctccacaaaacacacataagacatcctcactttcaatggcagccgctggctgattattcttagagtttccaatgctcaaattcttcaaaacattcgtcatggaagccatttgagctgtcaaagccgttagtgcatctacttcaaggaccccctccacttttctacttgttggagctcttgtgttgaaccattggtagttgttacttgcaatggtctccaaaatctcaaatgcttcgtagtaagacttggacaaaattgcaccattggctgatgcatctaacac

SEQ ID NO: 226201 - DNA, 1799 bp, Cannabis indica
atcatggaagcacgactcctgtcgataattcttgtgccacaaaatgcatagtgggtcgtgaatctggtctacttctagtacatgacaatgccaacctcaccactaacaccacaacagctgataacctcccagtaggaggtaacaaccgttgatctaacacatcttttaatagcatattctccaaatctttcgactgagctgatgttaaagattccaacatctctcctgggtgctttcccatcataatttctaaagctaccactccaaagctatacacatcacacttttcagttacacgcatagtcaaagccaattctacacaacaaaacaaattttagaaaacaagaacacttacaaaaatttcatgtaaccactaattaaattaataatgagaacaatagtaattaccaggggccatgtagccataggatccagctacatttgtccaaatggacgagtcaggcatcaacaatcgagctgtgccaaagtctgacaatattggaacaaaatcagagccaagtagtacattgtttaaggacacgtcgcgatgaactattggtggagaacagtcgtggtgcaagtatgagattgcatgggccaatccttgaacgatcttcactcttgaatcccaatcaagatcggttgagtcatataatacttttgcaagactgcctttgtttgcatacttatacactaagtacaaaccattgtttcttgaacaaaacccatatagctttacaatgttccgatgtcggacttcggtcagagttcgaatctcagtttcaaaactgatgcgactaacttctgaaatatcacttgaatctgacatgtgcaaccgcttaaccgcaagaactaactcatgtggtctcaatatggccttgtaaacagtaccaaaacctcctttcccaatgcagtatttgtcatcaaagtcttcagttgcctctacaatttctccaaatgtgaattttgcttccttttcccatattaatgactggtgtgtgtcatttttcttggaatcttttttgtgcttatccaacactttgaatttatgacacaatatgagagtgataacaaggacagtaacaaacagtattaagccacaaacaagagaaatgactaatataagaccattgctaattctgtttctttgcctcttacagggattaagtccagtagcttttccacacaatccgagatttccatcataaaaactttttgaagcattttggaaaatggctccagttggtatcggacccgtcaagttgttgtaagaaaaatcgatgtaacgtatgcttattagattggaaaatgattgaggaatactacctaacaggtggttacgagagatgttgagaatttccagcattgtaagcttggacaagcttgcgggtatttttccaacaagtaaattgctgctaagatccaatacataacgtatagacaccaaatttccaagctcttgtggtatttcactagataacatattgtgactgaggtttaagcttgacaatcctacacaattacctaacgaatttggtatttcacctgctaaattatttctcgaaaaatcaagattcactagcttgctcaagtatgatagacttggagggattgcaccggttagttgattattgctcagattaagttggtacaaaagtttaagatttcccaattgagtgggaatttcaccacttaactcgttggactctaggctcaaaacttttagctttgtcaaactccctagttctggagggatcttaccagagattttattttgacccatctgcaatctggtgaga

SEQ ID NO: 226202 - DNA, 2708 bp, Cannabis indica
acaaaactgtttacattttttgtatctgtttgtattaagcattgtcttcaagttggttgtattaaaaaaaagttatcaaaattaagttcagggtcctatttttactattttagaaaatacagggtccattttgtcatttaacaaaatacagagtccaatctgtaacttttgcaaaacacaggtccaaaatggtatttaccctattaactattacagttataattgtaaaattaatttgttgatcttttatttctttttatttattttttttgagttgtttgttttatttttggagagaagctaatacagtcacttatgattttagtaaaacatattttagaattaaataatgatttaatttggttggaagatattctctattctatattatctgttattgtaaataaatatgtttgatttataataggaggatgtattaaaaaaaaagtcggtacacagaatggaatgtgtttgtacaccatgttagcatattctccgggaccaaattatgatatagatatgtgaatttatatatatgtgaaagtcaagatatatgacataacatcaaagccaaagtcgttatcacattaatattcagacgttacactttattttttcttctgttcgtggaaaaatattaatgaaagattaaaacaaatgaaatttttgacaacggttcattacgaagagtaaatattgttaattaagatcatttcgaggagtactgggaatgaggtttcaatttaagttttctttggtatgggtgttcaatatagatggatgttcaaaatttggttatatttatatttaatgtcttctggtttgtaagtgatacaaccatttaatgaagaaaaaaccttagcaagagacaacaaacacaatagcgtaattatggacttcggttgtggtgtaaccaaaatttccatgaactgtaaaaattattgtaaacaagtcgctccagtattaattacgatcattttcgttaatgaaaattcatgtatatagtattatggtttgatgataatgttttagtttctttcttttgaccctttacatatgcaaaagtacaaagtaaactatgacatttatgtcaatcgcctcataagccacggacgagtacgagttcaaattaaggattaagatggttacatgacaaaatattagttttttttttctttaataatacaattttttagatatacataccacttggcaaaagaaaaataaaatgagtttcctaattatatagttaatacattttcaaacaaaaattatataattaataacccttgaaaacaatatatatacataatcaataacaacttgaggtacgtacggacatttatccagaaattttgactgagccgcggtacggaaaattaaatgtatactatgactagctacgtatactctgatcttggtattcctatattttattcaacacggaactttattttaattttttagtagaattaaataaataaaggatgaaactcaatgatgtgtggcatgattaaataaatggtccatttatgtatacatacaattcaaattttggaagatataagaaataagatgagaagaaaaaaaggattaattagacagcgtaaaattatgaggttctttatttttcttttcctttaaataaaacaaaacaaaaattaacttttagatatctatataaagtagcagggctgtcacattttggagacagtgttttaattttaaaatttggacataataaaaaataaaaaaaaaattaacacttactatgagatattaaaagttcttatgttaaatatgacacttctaaattaaaccaatttatatggtatttgttttttttattatttttagatctttttatggtatttaatatgccatatatatataaattaggtttacaaatcgcatatttaatgtttttatttatttaggtagtgccgaaaaagtcgtcggagtttgctgccggtgtcagaaaagtcaccggagtagttgtcggtgccggaaaagttgacagagttgctgccgatgccaaaacatttgtcggaattggcattgtacgtggaaaaatcactgaaaaaaataccaaggaactagtttcttggtgatttttctggtgacaatgctaattctgacgaattttttgacactggcaactactccagtaacttgtccggcaccgacagcaaacttcaaaaatgtcatcagaattggcatagtcgctggaaaaattaccaagaaacgactttctttcttggtgatttttctgatgacaatgctaattctgaagacttttatggtgtcagcaacaactccgacgaattttccgacaccagcaactactcaggcgacttttccagtaccgacagcaaactccaaaaaattcgttagaattagcattgtccccgaaaaattactagaaaaatcaccaaaaaactagtttcttggtgattttttcagcgataatgccaattctcatgacttttccagcaccggcagcaacttcgacgacttttccggcgctagctgcaactctggcgactttcccgacgccggcagcaactccagtgacttttccggtgccgacaacaaactctagtgccttttccaacactagtgacaactccgacgatcactgtagtttcatttgttttaatttttaaaaaaaaaaaactatgaagtgaattttaatatcttttatggta

SEQ ID NO: 226203 - DNA, 2290 bp, Cannabis indica
acttctgtttctttattgatgttgaataaaatggattacattgaaatggagttttatttagggcataaaacccaacagattccccctgttgttgcaaccattgtgactacttctgaggccactggatatactgtccctatctctcaagcttttgcaacaattatggccgatctcaactcaagccagccccttcaattttccattggtttgtcatcttcacctgctactgcttccacttctgttcgcaaagagcatccaaaaagcatcagtgaaattgaatttcagaaatactgaaacgaactcgtgaccttgctcgtgctcttgatgaaggacatattaacgaggcgggtgctgcccagcgcacccgccaagcaccatgatttttataagctagaatgctcgtggattagggagtaaacgagcattccgttccctctccctcttagctaggaaatatcggccaacacttttgtttattatggagactaaactctaagttggcgctttaagtataattaaaatgcatcttaaattaatggttgagaagttccccgagtcgggcttagtggtggtcttttgttgctctggactcatgatgttgatgtaaaattattctcctatagtataagtcactttttttgttatatcaagcctaataattttcctgcttttcattttactggtttttatggagcacctaattcaatcaaaaaaattcactcatggaatgttctcaaccgaattggatccaatatccataattctccctggttaatcttgggcgattttaatgactatttaaactcaaatgataaaattgggggagacatgtctcgtgcgccttcatcacactttcgaaattttcttgattcctttactcttcatgatctaaatttcactggcaatccgttcacctggactaataaacaaagccagcaatctcacactcaagagcatatcgactggggaatatccaattctgaatgggatgttttgtttccaaactatcaccttatccatgaagaatactttggatccgatcatcgtccactactattgaatctccaccacattcctgcccctcaacatcaccaaaaccgattcttctttgataaattgtggctggctgaacctagttttgaagactgtcttcaacaggcttggctaccaaattctcattgcaatactactgatgagattgtcaatttatctgagaagcttcaacgatgttcgaagcaccttgcaaattggaaaaaatctctgggtccccccataacttccaaaattcgctctatacagtccaaccttaagaaggtgcaaagttgctcttcccccacagaatatcagcttcaacttgggcgttaacttgagcttgagcttgatcaccttttatacaaggaggaagattattggaagcaaagatctcgagtaaattggcttaaactgggggacaaaaatacgaaatacttccatcactttgcttcctcaaggcaagctcaaaacaaaatcacctctttgttaaatcccgatggatcaatagccactgataataatgctcttgtgcacacgattgaacagtattttgatcagctttttaccagccagaatcctgacaaggaaaccataaaccgtgttctctctggcatcaaaaatgacctgcctgaacctgagattaactccctcagttgcccttacactgactccgaaatcaaaaaagcaacttttcaattagccagtgacaaagcccctggatctgatggttttaatggttcctttttccaaaaaaattggcatattgttggaaaggacgttacattggctgctaaaagctttctgaatggagatgcgaacattgagaacattaaccacactgtattgttcttatccccaagcattcccatccacaacaagtaaccgattatcgtcccatcagtctttgctcgacctcttataaaatcatttctagagtccttgtcaaccggcttaagcccatcctgagtcgcattatatctcctgctcaaagcgcctttcttcctgatcgcttgatttcagataacagtataattgggcaggaagtttaccatgctttatcccatcggaaatctggtcgatatggttggatggccattaaactagatatggcaaaagccttcgatcccgttgaatggagattcatcagacaagtcatgaccagattcaagttccctgatcgttttatcaatctggtgatgtcttgcatttcgactgtatccttctccttttctataaatcagcagatccttggcaaagt

SEQ ID NO: 226204 - DNA, 1050 bp, Cannabis indica
ataatattaattcttatttttgttatttttatgaaatttattgtatttaccataccaccaagcttaaaataaacaattcatatgtaattcaatacatcgtttatataacacatcttactaattcaataaaataataattaagaagtagtttctttaaaattggttatgataaacattaaatatagtttattgtttaataaattttaaattatatatatgaaataaattataattttattttaaagatattaagtaaaaatagtatcaaaaaaaatagtttacaacacgtcaacacgacctgtacaacaatatattaggtttgacctctattttaaagttcgtgaccaacaaagctgataaacaagaattatttgtgtctaaataaaatgtacgtaaatgtaaaaattatgcgggtaagttattgttatcaatgatatttttgtttttaattatttatttattttttaattaattaatcaattaatatttataaacttaataaaaaatttaaaaatgagagaattaaaaaaaaaaaatgtatttaaagcaattttatgttgttatgtcgtcgttttatacctaagctttatatatagatcttttgctaaactataattaataataggataagcaatgtcataagtaattaaagttttaagtttgtaaaacagtaaaaactcaatattatttttagtggcataagtattcaatgtttataaaactataattttccttaattttcgttagtacagatttcgttttgaatttattaaaagaacatttagaaatgtttttgtctagactcaatgatctaaaatctgagcgttatatgtgtcttgtataatataataatagagtatgtgaaaagaagaatattatatgtatatattaattgtcatttacctttataagcttaaaattttaagtacgccattatttatccttaataatatatgttctctagtataatatgtgaaaaggagaaatattacatgtatatgtatatttattgatatatgttatattattaaaaaaaaaaattatattaaa

SEQ ID NO: 226205 - DNA, 1862 bp, Cannabis indica
acacatgttcagatcagtacaagtcctggctggctaaggaggtcttgtttaagacttggttgatcaaggatggaaaccatggggtgtggccggccaagggggtataccccataggttggccagcctatgcctagaaattgtgttcctggccagccctaagctgggtcatggggtctgaccagcctctaaggcttgggaacctggctggccaaggctagggctccaagtgcgcagcgagttttttaccctctgttgacctcggctagggtctcatgacgaccttggaggcatatagaactgtagtgttatgcgtggtttccctttggaactctgtataagactcgatagtgagtctattatagttaagtgtatgacttaggactcattatatgtctaagtgagtatacttaagacggtacttggtcgataatcgaccttgtacactgtgatttaccttgaaggtaccgttgaatactgttgactagaatgcattttgtagctttgtcaggttgctcacctccccttatcttttctctgcaggtggttctgagtgttggatagggaaggtgacagctgtataggtcccctagtcatcttgtgatcatggcctggatgaaatagacatgtcgtaaagcaccaccatgcaatcaacatgttgccagggtggcaacaagaggccgagtcagagttgtagaggctactcaacctcgtgttgatgttgatctagaggttgaccacgcagaggtgcatgaggtcgaccaattggctgagagtcttaatactgagtctaaacttgaaaaggccgcaccagtcaagagaaggagatatgtttgggtcattacgatgccaatggggagcctctaaacaggctgggtgagccttcagtggtaggcttggatcatgtcttgattcaatcttctgagcctgggattctggatgcgagatcacagggagacagctaggtctctcctacttctacccttttgttgatgattttagcaaggtactcgctagtggtttagtgaggggtgtctattgtaagatacctcctacagatcaaaggttgcaccgacttcccttatgttggatggctttattagagcgtcatgttgagcaaagggtaatgttgctgctccatattttcatggtttctaggttttagctatattaaaaagttagttattattatcaatctctttccttttatagtttctaggtttagctatattgaaaagtttgttattaagcgcaattggtatatccggtcttaaaacacaaagtccttgttccatgtgagcaacacataattgaaatccattacgagaaatagtgcaaataaaactcaaaaaattcaattgataaaattgtgtttgtaaatatgaaacactaatcaaagtttctactaaaattctgaataaacaaaacattgtctaaaactaaatatttgttctgaaacttgaggcgagcttttaccttagcttggaccgatactaattcactatttccaactttgagcttcaactcccctggatttagataatcccaagttacaagcagctgcaatgaagaacaaacatggttagtagatctagaatcaacaatccaaatagatttgtcattctctaaaacacatgattcaaaaacaaaagcgttaccttcattccaattgtctgggacatctttcttctggatgtcccttctcatcacaatacgaacataaaagagtacgacagtccattatttcagtccttgaacttgaagaagcatcattcttaattaccttttcctcctttgcatgtctacaaaactggagggaggtctccttgcaggcaaagtcccctcgtaagcacgcaattctgcgt

SEQ ID NO: 226206 - DNA, 3363 bp, Cannabis indica
aagaattattgatatataaggattaataatatctctattagtatgagattttttgaaaaagtgctcaaaaataaatttgaaaataaataatgtctgacgtattaatctatagtttgttgagaatctatcttacagttttgaatttgattcaggcaagatgtcgctagcaaacatcttttctttcttaggagatcatgtggttatacaattacttacaattatttaattaccctgttatttatattttcaaaatatttcgttctacttcatattttattattataacatattaatagttcatttcatttttgtgtactcggactatttcttacaaatatgttttaccaaaaaagtagaataagaattgtaatacactttaaattatatttactttttacaatcaatgatatgtaatatcatatgttttactagtgtctttttacaattaaaaaagatgtaaccttactcaaaattatatattattaaaattaaatactcattattgtttgaaaaattgtgtacaatttaagctccaacattatcctaataaatatgcctcaaaaaattaaaaaaaaaaaaaaaatgaaggttatataagtattgatttgggaaacggcaccgtttaacagccgaaaccagcccttatttctttcgtgttgtcgttttgtgctgaccagaagaaaaagtagtaaggaagatctctgcggaaaattcattccgaagcacaaaatacgcgcttacatcttaagcactaaaaatcctattcgtacctttcatcatctcggctaattcaattttcctttcctgtaattttctcgagaaaaaacttattgattgtttgtggactgatcaaagagactcaaaaaatggacaaaatcaagagcatcttaaaacccaaagccaaccctcaacagcaattgagggattggcagaggcgtctccgccaagaatgccgcaacatcgaacgccaaattagaggcaatgctctcttctatctcttagggtaaattcttctggttcttttttggtggttgagattgttgttttctgatatgggtttgtttgtttgattgattgattgtttccagatgttcagagagagcagaagggtgtagagaaagccattagagaagctgccaagagaaatgacatgggctcagccaaggtatttgcttatggaaacttctaattctatgctcttgtattatataaacgcacgcatgtgtatatatacaatatatttttgtatatttatggtgttgcagtagtgccacttgtggaatttttgttacagactgacatatagaagaggcagataagagtgggggaaaccatttagggaagacatgggagattttataacttgctaaaagctattacgtggttgatctttaggattaagatttggattatcatagttgattgggatcagtaattcagtatcacttttgtttactttagggtttggttattttgcttgttaaactattactagataaggtctgcacatacgctgttgagtactggaagagttgtagcattgttgggcgagttaattatatcagctaatatagttttgatgtttactttttgtagcatttggtttaagttatgattctgacttgagtttaatgttgaatgctattgtattcaggcccttgcaaaggaaattgtaatttcgaggaaaactgttaatcgactttacgaaaataaggcccagctaaattcaatatcaatgcatcttggagaaagtgttggtatgttgcttcaaattctctcttcattctcctagttctaattacagcatgtaaacaatccacaaaacaatatgaccttaactccatttttttcaagtatttgatgctcattggcattttgtcaactttattatcatggaggttcgtctattcatattttttaaattaaacagttagtcttttgttaatcccagaaagggttggagccccagacacttcaatcgcacacaaccacgttatctaatatttagtcttaggtggtgatgttttgcaaattggctggcagctatctggtaaatttaactggtgactgtacctgataaattttcagttttggtgccatatgtatagaaaattgatacacttatgttgtagttcagttttggtgccatatcaagagaaaattacaaagttccaaactttttgagacagtttagcatctccctgagtaatctcttactcactttgttacaaaatcattcccccctcttacaattgaccggccctctatttatactaagtcttccgtaactgttttaacaccttaggagttaggactataggatacctcacctagagccactaagaatttgacaacgcagcctctaaaattctaatcagttatactaatgagtatgagactcatattttaaggtgtaacataccggccgcccaaacttccaccttgtcctcaaggtgaatgatttgagaacccactctcaaatgtccaagtacaaagtcttgttgctgcaccagtatatttctttttctgctcttcctcattgtatgttctatttgtctcaacatcaaagaatgccatagatggttcgtgataatcagtaacaaaaatctcatgtcagcccaatgatgaaaatattagtagtttcaaaaaaaagtaacaaaatctcatgtggctcaatggtagtactacatcagtcaaaaagccatttgaataataaaaaaataataataaccatttcctgctccacactgccatttacagcagccattgtgtgccagtacaacccaaaccaacttctaatctgaaaaacccaactagatttaaggagtgcaatgtagaaattgatacttggacagtcctcgtgaagtgcctggttattcaccatcctcaactggtcttcctctatagaaaaaccaaccaagtagtgtagcatatttcatctaaattaatcgcctaactacctttgtcaactcatttgtctatatctttttgggtaagcttgacgacaccatcacagaaggaaaaatgaatgcaaatcccaacaagagttctaaccctaatactccaataagcccaaacgagtaagaaatagagagaaaaatcaatttgaatattgtactggcctgatttgaaatactttgtatattctaggttttccttgcaagagagtaaactggaaatccttcatttccctctatcaataataactccttttcgtcgtattgcctgtctcagtagaaccatcgttgccatgtagggtgaaacccaaaccactgtttgaaacactgtaaatcacacccgtcattgattaattgagagcaagcggtggaaatcgtgaatccctataaaaatgcgtatagattt

SEQ ID NO: 226207 - DNA, 2098 bp, Cannabis indica
caatagaattaggactttgaattcccttactcttgtgttgaccccaaaaattagtaaatgtaatttttagagttattagtgttatgctcgaaagttcaccaagtgtaaattccaaaatgcacccaaggggatgcattggtacgaggaggagcaaaggcacgggtcaagctccccgtgcccatacccgcgcacccagctccccttacaacacctagcctgcaatgcctagctccccctcagcgaccagcctccagcgcctaactccccctcggcgcctagctccctcaatacctagcctatagtgcctagctctccctcagccctcaacgctcagcttgcagcgcccagctcgcccagtgcctaacctccacacaccaacactcagtctcctcatacaaatagaaacgaggagaaaatatcgaggctaggatcatttaagcaaggaaattacaaacaagataacgactagaaaatgagtgtggataatgatgacaatgtttatctcatccaaggtacaagtggaagagggagtgtttgtgctactgaggatgtctgggacaacaggttgcccgaggtactaggttacctagtgtgaaagtgacctgacattctcaaactaaggaatctgatgaagttcaaaattgtagagaactcactataaatagaacttttgaggttattgtatgggggaccttttttttttggagaagtagtttttctgaggaaagtttaagagtctaaagtttttttttttttttaatgttcttctattaagatctttgaatatcacttttggttcttaatattttgttgacgagttcttacaacaaacaatttggcaccgttcgtgggaacgacaagctctagctacgttagttcctaaaccattcactataatcttcaggatgttaagaaattcctatcgtctttgagaaaatggggttcactcaaattaaaactagtcgaccaccatagtaagagaacgtcaacctccagttgccagaaagggccaaaagatgagtaaccaaaatgtggactaccacacaaatactcaaaaagagaagagaaaagattttcatctttttcttatcatttatcttttctttttaaactttaaatttaaaagactctcaattgcattaggattaaggtattaagctcaccaataaattaaatttaaattaaatcttacgaacttcattcatcaaataaaaccttctcctattgtatagaggtgactcggggaccatagacctatatttcaaagcttcaataaatccaatattactatcaattttatcaataaaataatctggtttattaatttcattattactccactataaatatagaattacactctttgacaatatagaactatatttacagaattctcacttgtagtccattgatataatcaatataagtagctcgcccttcaatgattatttcatgattagagttgatcaaaatatgttttacctttccattatctcttcattccttatgtgtcattaatttaatgtgagttaatatataacttattaaagatttggatccaactattagcactcccaaaattaacactataagaaaactaatattcgatccgttaagaaagcttagattccactattgtataacatgtttctagtcactcgtgttattaagctcccaaaaaaaaagttgcaagaatgatcatctcctctgagaaaacttaaaagtgtgaaccaaagaattcattgaatacaataggatttcatgtatactcaggattcaagttaatctactaataatcattattgtgatatgataaactcttttcatggtaaacggtaagttaatgaaagatgtttacatattggtccagtcatgcataatctaattatacacagtacctttactacatgtccatctacatatgtgatccgaatcaaaatcacacacactaaaagtatagtgtataataaatggcacttagcagttccatattaatgattcctaaaactttaatacactactgatttattttattcatatcgtatattcttaattcttttgtacatccttacaagattattcattctccatatgaata

SEQ ID NO: 226208 - DNA, 1892 bp, Cannabis indica
aaaatccgcacttagtgcagatcgaatacactgagtagggtgttcatcaaactactcatatcatacaaattgtctgcactgcaccatactacaagtagtttgaaatgaaggatttggatctggctaataaaatcttaggttgtgtgaaggttgctaaagttctgttataaactgctaggaaccacatgagctttggcaaccccttcggcagtgaccgctggtgatgcactgatggtgctgctagtgctactactccatttattattattattattattattattattattattattattattattattattattattattattattatcgagaattaaataaaaataactagagataattaatgtttttttttaaaatatagaattaagaataattagtatttttattatttgaatttttaacgatatgctttctacaatatatttattaaaaatttctcttaaagtataacagatacataattaaaaaattaattataataattttttacatcttaaattttgatcaatacaaaaaatttctcccttttattaaaaaaattaattttaaagattacaatgttttttaattctaaaaaacttattaaaaatctaataaaaatattaaacttaaaatattgttctcgtaaaatttagtttttataaaatattaaattttcatatatttttatatctaaataatttttttaataaaaataaataattttttaaatcaattagttagttttataattttattttttttaatattttaatcattcaaaatgatttttgttaagatttagtaaagaaaggttaaatcttttttaatttttattttgaggggtacgatttaatagttgttaaaatttaaggagtaatattgttaatttataaagatgcatcagtattttaacggaatactgagatggaacctaacagaaggactatatctctgtaaatgtaaaaaatttaggaggaatttataacaagttgtatattttaaaaaataaaattagtattgtcaaaaattaaaaatgaaaaattattaattataaaataattaattaatgtttgttgcgtgacaatttaggagatattggtcaaaagatgagttggaaattttgtttttgtattttaggaaagagaaaataatgaatagagaagattggaaattttggcacgcttgtttatgagttgtgacaacaacactataaaagatgaatataaaaagagagagggcggtggtatggtagtatggtgaggtggggtgggagtgggaggtgattgtgccactttaaataaggtctccgtagaccaggcccagcgcaggggccttcagccctgtttgcctttgaaaattttgacaaatttcccatttttggttgtgaaagtgaaatttggccaacaaggtgggactactgctgattactttgatcggaccaaaaagccactagttgtgctgtacttttctttatttgaaaaaaaatattgttttgagttagtaatatggtatcacacattattttttgattttcctttgattgattcaattgtagaatttattcaattattaaaacttgaaggcttggtatatattatagtaaaggaaattatagcagatgattcaaaattataacactatctaagtaaatattttcgtttcaaaatttgtaaatgaataacttttttggcgtctatttattatttatattatcttttatcacataaaaaattaatatttttttattaaaaaattagtaagcaaattacttaaagaatcatgctatatatctacattagttttagttaaaaaaaaataattttaaaattaatgttgatttctttttaagtttttattcagttattgtggattgttggtatataaatttt

SEQ ID NO: 226209 - DNA, 1506 bp, Cannabis indica
gggtataggcgacgatttataattgtgccctatactataggtgacagttttaaacatccacgtttcctaataccatctagaaagaaagctacaagcctccgcaactccaaaattttggaagcttgggagtaaatattatctgtgtttccagaagagggacattgtaattccaatatccaaagtcaattaacaaaggtccaatttacatgcccaatcaggatgatggactgaacttattaaagtcaggccatcagggttcttgtccaggagaaagataagtttagtgaagagagcatctaaatatcttcatgtgatgcttctagaaaggtaattaataggcctccgaatttcaagtttgattcaacactcatttaatactgaatcccatcacattaggactttgtttccaaagttaaattcagaaattaagcatgcttaagtgactcgcagctaatagtgaatcaagtctttggagaataccaagcgaagggcctaaaaatggccaaatacttagagaaagttcagaagaacatggaaaattttgattatttcaaaatagaacaaattccaagagaaaaaaactctaatgcggatgccctagcaaaactggcatctcaatttgatctcaacaagttgaatttggtctcagtggaagttttggacgagccaagtatatgtgaagaggaagatatcaacatgatagatgcgaggcctacatggatgacaccaataatcaaatatctattaaatggagaacttcccacagataaaattgaggcataaaaactcttatatttaattactcgctaatgatggtcgaaggaaaattgtacataagaggatattccatgcctccactgtgatgtgtgttaccaacagaagttaataaaataataaaagaaattcataaaggcttctgtggagatcatgcaagttggcaaaacttgcaaagcatgtctaaaaagataatccatcaaggatactactagctaacgattaataaagacacacacgagtttgtcaagaaatgcgacaagtgccaaatgttctcacatataccttgagtaccacacaccgagctaagaatgatgaccttgccatagccatttgcaatatagaaaattgacctaattgggtctttacccacaggtcaaggtggcgtaaaatatgttgttgtggcagttaactttttcacaaaatggacagaagttgaacctccagtatccatcacatgcaagaaggtccttgattttatcatcaagaacatcatatgtaggtttggtattctaattaagatagtatctgtaacgccctaaataaataggcacgccacccaaaatactcatggaaccctaatcctctaatcaggattactaatcaaaatagcacagaatttaaacttttaaattaaacagaataaaaataaaacttgtaatactttaaatttttaaacagttgggatcccaaaatatttacaaacgttgttacaagtcatttctttctagc

SEQ ID NO: 226210 - DNA, 1696 bp, Cannabis indica
ccaggggctttatccctatcaatagcaaaaatagcatcttctacttccttccttgtgtaatcagccaatagaatatccttgtgataacttgttaccttagtcccaaatccacaattgcttgaacaacttcccttttggctggaattttagtccctaatagcttttggtaatagtctaagaaggcatgctgaactttctctggagagtcgcaccaatttccatgctcatcctcaatcgagaaaattctgttttgaatccttctcaattttaaggaggcatggaaaatgtgtgaattctcatcaccatatttagcccaactgaccttagctttttgtgccatgaagctagcaaatgccttactaacttctgcaaatttgcttcttagttcctgctcttggttcataaattccacattctgtggctccttattcaatttaacttgcaactcagccaaagcttctcgtgtagtaagcattgtcttttgtatgtctgtaaaaccggtttggtttatgtgtttcagcaccatcttcactcttcttagtttctgcactatacaatacattttcgtccctttgatatcttcttgccaggccttggttaccaagttatcatactcaatagcttgtttccacatgttgaaatacctaaatggcttcctcccacagaacctatcttcataaatagtcaccaagataggaatatggtcgaagcttaattcaggtaagaaaacagcttcagaacaaggaaaagcattgatccaatgtgaattgaccatttctctatcaattttggaaaaaatcctctcttcaggcttttgcttattgttccatgtgtagaaagaccctgaatacttcaaatcagccatattacagttcccgatacaatcttgaagtctctgagatggattgcactgagcccttcttactattctttcatctccattcattatctcattgaagtcccccattagaatccatggttcacttagtttcttcgccaattcctctagatctgcccataattcttctctctttttctcatcattgaaagcataaatcagtgacacaaagaacttccctgtttgtttctatgattgcacataacaatgcattatttcgctagagcaatatttaaaatctatagagtagatatttggttgccaagctataactattcttcctttgtctaaccaaggattattatttgaaaaacaccaaccttggaagaggcttgtatataaagttcccatattcttattctgaacctttgtttctaagagactaacaaacccagcttgcttcgaatacatcaattgcttgatttcattgtgtttatgctggctgttaatccctctcacattctagcataagaacctatccatttgaggaagagggatctccctcccctcctgtgttttgctcatttgcttgttctgctacgccacaatcaatctcattcctgctacaatctcaaaatcatcattaagagaccaaacatattctttgttgatgtcccttctgcttccttccttggcaataccttttttcctttactgaccttctgaaaaccatcatcatcgagctacttctctacattaattgctggtttcttaggcatccaaacttgtttccctgtgtaatgcccgcttagtttaatttggaaattagcagttaatcatgattaattatgaaaatta

SEQ ID NO: 226211 - DNA, 3514 bp, Cannabis indica
ccttttggttttgtggcgtgggaaaagtattaaacttccccttttttccactatttctttcagaaatcttgttgttgcgcttgctcctagtgtttttgccgctggaggtttgggcagagttgctagtacctacctatgcgcgtggcaagtcatgggggtgtaggatgccttgtgatagccttttactaacttgccctatctgggcttgtcgaatggcttcctctaccttgatattaccatcaactctgtcgaggaacactatcgaggtactacttaatgttattagttgagatcctccgaatatctttccaaaagtcaatcaatgaaaggattcccctcagtatggtcacgtatcagccttcttctataaggcctttcaccttggttgccttgatcatgaccatctggatataatctttcaaagcttctccttgtcattgtctgattttgttgaccttacttttagtcaatgataatgaggcaattaataagcaattaagaatataactaaaatagagtaaaacccataaaatgataaagaacactagattttaaagaggtttagcctcgtgagtgtggtaatagcctactccccttgaactgtattcactcaagagaaagaacaaagtgttttcctctctaaaagctcttacaatgaatctttaagtaattcttttagatctctctctctgaagcaattctttcaatccctttcacattgaggcttagtcactatttgtagggtcttaatgcatgagggaagatttccttttgtttacaatgtataaaataggaaattacatttattacataattatgatacacgaaataggaaactagaacaggttgccatatttctatgattcaatcccacgattatagggattgccttcttgtcttggcgtcgtaggattactctgaagtgattaactctttgtaagtgattcgacaagccagacttatacttgcttggatgatctatctttcatcctgctcgggtactcaaggttatacgtgctgacgtacaatatagagtctgttcgggacattcacctctgcccaaatacaagaaatgcaggacacgtgctacctgattcttctgccacatcattgtgtaaaaaaaagattacatttgcgccccaagtctgcatgggaccttctttgtcgcacgtggacttcattcggtctaaattcttgtctacacgggtggcatgtggctgtggtgtcgattaatgacccaatgtgtctctaacaaagagtctttttcactttcggcttattaatgttgattgatagctttgcctcgaatcatgctctaagactcgcacgtgacgatggttattctacaagtaatcgagtagataacgtacatttttggggagaattcgagacatttaaaatttgaaatgactactcctcttctttgacctgcttataagtagggttgaaattccaaattaatcacttttagccattgttactcttgaataattagagcaaaaatattttttctcccaattccttcgaagaattctcagaaaacactgtccagcatcgtccgagtagatcaaaatcttcaaattactgagtaagttcttcatttcctcctttttatacatttgcacgtttaattttttcagttttcgcttatgaatcttgattgttcttgaaccatctctaggatatcaatagaaattctaggtttgagacttagagatcttgattatgcctaatcacgttgcttgaccgtaactgcattttaattttatcctcacgatactcattttcacttacccatttagattttagtgagaatcagaccttaatccaaaattttgaacttctgggttgtaaactccattattatgctaaattttttgttttttatccctttgttatcccaatttttgcactctgacgtggcagcacacgatggtgacacgtggaatcaactctaagtacctgctcccaaaacataggccgaacagggcacctcagacacttgctcagacgaagccgtgagcaattcgcgcaggacaacaacacttagcaaattcagcttttgcatcgtgagtcatcagagaaatccccctaacattgggatcaaattacagaaatatggattatgcaagctcattgccctataaatagtgactcatgttcactaggcaaagggtcgaaagatttggtctaagaattcatattcagagatactgttgtaagacctctaagaaaaggaattatcctccttgttcttaagtcaatacaaataacgaggattaagctattaccgaactcctcggggctgaacctctataaaattcttgtgtctttatttgctttattatagttcaatcgtattaaactatttatcgcttacaaaaattagactcattgtcattggctaaaagcgatgtcaatattttggtgctttcattgagagctgaactcaagaatcgctctttatttcaaatttaatcgcaagtacgatggtggtacagactcgtaggggcgtggcggatctagggaatccaaaggtggtggatcttgctctacagaacccaagaaacacaagggttttgccagtagtaaatccttgacaacctacaactgcgggtcacggtgtggcgactcttgtagatgaaatcacacctggtgtgcaagagactgggaatacaagttcagcagccgaccagggcaattatagcacagccgttccacccgctaccaatgatcaaacaatcattggagatgacactgagatctaaaacctctgtgctgcccttgggcttatgcagggtcataccaacaccttgcatcatgatcaggaggaactccgcgctgcggtgaacctcgcgtttgaagagcaaaggcgcaagtttactgaatggagagacaaagaaatggaaatcctaagggcttagcaagcaatcattgacaaccgcagaggcaagccactgtgctgattcggagagcatgtcagactgctaggcagcaggttgtgaatgtcaatcctctgggcgaaacggataaagatcaagcaatgaatacctctcatactataaatggacaactgccaaatccccggtcacaggttccatctgtgggccaagtggtaggcgggcaaaccttgtctagtaattcatcaggagaagtcatacccaataactccaaccgaattaatggtgccggtcagcaaattggccaaacaaaccaatcactgagacaaccaggcttttccgtatttgagaggttagggacgacccatgatctaaaaaatgatctaaacaggaggataggagtggacgatcatcttgacacgccaatcgtgtcacccggaacccgtgctcaaaatcatgctcagaaagatgctaatgtgactgagaccggccaagaggccgtacaggttagtacagccgtgcaagcacaattggacgaacttaaagtatgttccaaggcatggccggtcaaaggaacaatgatcccgagagtgaccgagcacgtggaacccctt

SEQ ID NO: 226212 - DNA, 1694 bp, Cannabis indica
aaagtatcaacattacccttctcgagggtagttataatactaagggaataacatttcaaggctaaagactcaaaacaaacaaggtaatgtttcacattctcattcccttgttagcattaacccattccaaacactccctaaattctttcttcgctcaagatatgtgctctcagcatttttattttattattttttaataatataaaaggctcaactaataatttaattaaaaatattcttatgtactatttagtagtccatacataataacatcaaatatttttagtaattctctttatttagttggcatatcatatagtgtgcgatttaatttacattttttttttctgaaacagatttatttacatttgaataattatttttgctagaagaatatagcctacgaatttaaaaagttaaaatattaaaaaaagtctattatcactactattataaccattacatgaataaataaattaaaatagaaaaatttaaaaataagaagaaacgaatgaccaaaaaaaaagtagaaacgaattggttagtatacactacaagacaacaagaaagaaaagatatgaatgaaaaattttcaaaaggttagacgaattttttgttgtaaaaggtatatacgctcttagtatattgtataatatatattaaatatattattccaaccatttcaaatatatatattattccacctatgctctacgtcaatatttatcaatacatacacgtttatatgtttatatgaaaagtatatcttcttatatttaaacaaacaatattggttcacggtttatatatctagattacatctatatttttctcttcatatataaaatgtaaaatgttactatttaacaatttttattagtttaataatatattttaaaaatattaaaatatttcgttaaatttaattgtgttaatagactaattaattttatatatatataaatataaatattatttattttaaactatattaatattatttattttaagttaattgaacttataccaatttcaatttcaaattaatttaaaatatatacaacttttattatattatttataatattattattttttattgttattttttaatattaggaatattttaattttaatatttttaaattttataatactttccttaaattttaaatattattattttaaaaaaaattaaaaaattaataaaaaaattcttttaatttataagatttttaaaatacatacaataaaaataaaaataaatatacattcaatacacgtaacatagtatttaaattgttttaggccgaccaatatgaaacattctctgtggagaatgtatatataaatatgtttgactgctattatatatacctattctcaacttatatataataataagccacggtattgtattcatttttgtatgctaatttaaaaccaattcaataatgaataattagagcgtgtaatcgtgtatgttaaggttggtgatgataatatagtataatatataggacgcatgcatatataatttttttacgggaaatttcattatttgccctaaataatataatctatatcaaaatttatacccttttataatttgtacaaattgattcctctaattttaaaagatttctaaaatacccctaaattaaactttccctctctctcagacgttccctctc

SEQ ID NO: 226213 - DNA, 972 bp, Cannabis indica
tgatgaggcaagttttagagtgttaaaatatttttctgcggcggccgtataatccggttcattttgatttatgggcgggccatccatgagggtcaagatgacaagatgttagaatttaaaatatggtgaatggggttctatcgcaaaactaattgtcaatgagaggaataatccatttatcttatgtataataatttattttcacacattaaaagactctgataatagatgttgataagcttatttataatattacaaatatgttctccttttgcattaagtattagcttttctcctaggagtactaattttgttgtacatgtattagcccaattagctttatctgaaaatgctcgtggcatttggaattaggagttttctcctgccgtgtattcagttatgctagcttatatacccattttgactttgtaatgtttgcaagttcaaaaattaaaaaaaaaaaaaaacatgtttaggatgtgaatttatttttattattatttaactttaaacctcaaagaatattgttgtcggtatgatcaatatcatccgaaaattgtgagtacgctaacgaacaacaaaattcatcaattctaacttcttgtaagatccatgtacttgataatttgttgcgacctttttttaattctttacttttttcaagaagaataaaattaaattagaaattcactaaagcatgatcagagaatcaccactaaaatatttaagatgccaaaaagagcaatgttagaaggtatgaaattctcttatttaaagatcggctaaaagactagtggccagttttgcccacaaagcagttgtagctgtgctatgagaaaaagcagatgtaacaaaactgtgtaaaaaagctgagttgaatgtttggtaaattataaattttaaaatactgtgagttgttaagatctattataataataatgttataattgttataaatattaataattatgt

SEQ ID NO: 226214 - DNA, 2700 bp, Cannabis indica
ttcataagtattttgggtagcgtgcctaattatttagggcgttacaatgatatactcatactttatggattgttggccatcaagagccgctctcagtctctcctcatgccctgcaagtttagactcaagcttagagataaaggaaacttgtgtggtgttctccttattcctggcaccaagcatggtctctaagccagaaatcatgctctgtttctccacaaggagagcctccatctcagacatgtccttgtccttcaccagaagggaagcctccatggtcttcacctaatcttgaagagcatctgaggacccctaggagctatcgcatacaaagctcaacttcatcaaggcctaaaagcaaaacaagacaaaattaatatcaaattacaacactggtcggccagcctccctttgagactactatggttagccagccctagacatatgcatccatggctggccagccccatgtaatagatcccttggccgaccagcttacacagtgccaaacagatgaacaaagctaaaaatacaacttaccaaagaaagatcttaaaggcaagtggagtagagcctgtctggcttgccatcaccaagctccttgagctcctcatcaatgaaaggaaaagctctttctctctctctctatgcgtctatgggaagcctccatatccctttgccctgtcgctgagcttgctcctcaaccaggcctttgggaaccctagcccgtaggccgtatcataggctaccttggtggaggaggaggcagagatgacccagcatcatctctaccatgagaggtccaggacaccatggccctcagctgacctataggctcatcaaaaggtcccccaacaatacctctcagcctagaagacatatctgcaaaaagaaaagttgcaaagtcagaaagtaatcataaacattcaatgcaagacaagaacataaaagatggcattattaactatcaaatactatcatcctcaaaagaggaactgtcaaaatcctctacagctaccttacacttgcctctagatgtaggcaaggggcgagcaggtcactcgaaagtttggcctctaggcccgatctggagagaagcatcactaactagacccttgctggccaagtatcagcggaaggcccttttatagtgagatttctctcacctagaaactcgagaccagactcctatttggaggacacgtgtactcagttttccaagaaaagctgagatatccatgagagactcctcgagtttaaacctcgcctgagctagaatcagtgagatgatgtgaatatgactaaagtctaatcgcatccgtgtgactcgcattatgtgggaccaaaagaacggatccaactcgcatgtactaggatatgtgcgggtatccttcccatactcttgccagaacatagagatcgactctttatattacgagttggtcccgatgatcaaacagcctcgataaaccaatatagactcgtgcgtctaggttttatcggctcgttgtacgatgtccgtaaatgcgactgtccaagaacgcaggcatcttagacttaactaagagttaggtatatcctaagccagcgagcttacactagaatatgaacagccaactcgagcaatagaagtcgcacacgttgatgtatttagtgaaaagaaattgttattcatttattaatgtttacgttttagtttaattattgtgaattaatgtacaaacggattgacaatgaatacaatccttgtgtaattaactagacacttgccttgtatataaaggagtgatccaccatgaaatgggggactacgaaactcttgcaacagtggactaagcagaccgtgatctgactgaaccactataattccttgtcttcttgttatttccagttttttactaagtacttacgttcccggttcgagtactcgccgttttaggttgaatactcgtaggttgttcttcatataatttcttcttattattaatattattattcatttttggtgttgcgaatttcgctcgacaacatttggcgccgtctgtgggaactgagaagtacattcttactaaatacaagaaggaaatcatcatggctggaaaccaagcaaacggaggtgttaacaacgaatccctcaacatcggaatgatgaacgttccactgtctgtggttagaacaccacttgtagatgtcatcaatggaagagtaggtcgagataatgtcagaccccttaatctattccctgaaactgctggcccacaagtcggagagacatccacgccagcagcaacaatggggcactttccacccatcactccagcggcagtgtccgagggtatcgtccagctgaccactgaccagtataccgcaatccaggaccagctgcgtgccctgcaggccgaggtggatggatagaacagggcccgacaccctcctcgagcccccactactcgcacagaaaaccctcaggtaacacactctagatgtcgtaataaccgtgttcccagggaacaaaggaccaaccccggtatcccaaccaggagacacagatcgacgaagaccccgaacaacataaccctcacagcagaccttcgcgagataatgacgtagaatctgcctcctcgtccacgcatggtcacacacctagcaagtacacgaggtccggttttgtggagatgcagcagggaggacgatatcagg

SEQ ID NO: 226215 - DNA, 2959 bp, Cannabis indica
tttgattctttaagaaaaaaaatttagctattgctatattagaatgtcatttggatatgattatatatacgtatttttaaaatttttaaaattttcttaattaggtaatgtatctgataatgcatatattgtaatttattatattcttaaccaaaacttacataatcaaatttgagtgcgtttatatatagattggattcgtaaatttgatataaaaattttatattcctaaactttacgaaaaacataaaactaattaaatgaaaagtaatcaattccttagtagaaccatttcaatttaaaatataaaataaataataataaagttaaaaatatggttaaatatatttataatattttgaatttaaatttctttatataaaatatttacatatatttttttttatttattttaattgaaagtcaaactaataaatttaaaaatatgattaaaaaatatctataacattttaagtattttaaattgaaattaaaacttctttatataaaatatctatacaatttttattttgaaatatatataataatattataaaattaaagaatattttgttaattaataggatatctagttaaagttaacatagaaatttacaaaaaaaatcgttaaacaagaattctcttacacgatgattgcacctaaggatcttggatttggtctaggatttctgcaggataagatgatgatcactgaagttttcttctcttataagacttcaacatgcaggtatttctcccattctagctatttaagggtgtgggttctttggcgttctttactcctctacttgattttattttctttgtctgagtattattaggaactttacttgtctttcttcttctgggaaatggagggtattactgaaaatatggctcatgtgttatctcttactgaaaaagaagttgtggttcatgaacacttggatgatgtgggaggggatatacaaattgggaaaactttctgtcttgtctttcgagtctttactacccgaaccattaaaatcgagtggtttgaagaggttatgagaaatgcctggatcactcgtgctcccattactttctctgaatatggtaatgggatgtttatggttgagtttgggtgtgaaggtgatatgaggagagtgattgaaggccaaccgtggcattttgaccattgtttggtcactagtgctaaccctgctggccgtgacactcttctccctaaccagctcaggtactctccattttggattcaagttcactccattccttttggtatgaagtcttataagcttgccaaaattgattgggaatgaagttggggatttccttgaggttgataaaatcactcctctcaaagtttttggtttgttccttcgtgtccgagtcttgcttgatgtttccaaaccaatccgtagaggtattctagttgattttaggaatatgcacaaggaaaaatggctaaacttcaagtatgaaaatctgcctaatatttgctttcactgtggtatgtttgatcacactcttactaaatgtgtctcttatcttaaaaagtgtgatgagtatgcttatccacctccactgcactattaaactcctctaaaagcccctgctaaatcaaattttaagcacaatccacttgatctttctaactctttctctctggtggagctgccactttctcgtggtcaagtagaccaaagtcctgctgctgctgtgagtcaattccttaccactcaggacgtgggtgctggatcatcctcttctggtgctgcttttagaagggatgaggctatttctcatggattcattgctaatagcctcatctcttctcctgagctctctacttttgagagaactatttctactcctgcctttaactctggctttagttatgacattcctgttggtgtctgctgtgatgccactcaagttgcttctccaactactgctactgttgtgcacacaactgctgacattagtcctgaaaatgttcagagcattgccaggactactgagaaatctaaaggtaaagccattgttggtgcgaagcgctgtgcctttattcctcactctgtcatggtgggggactctctcagaaacattctcaagagagctcgtgctggtccagttatcaatgatgcctcaactgctgctgattcctcctttgaacaggcgggtgttgcggagataacccgcccaaaaaaatgatacttatgagttggaatgcccgtggcttagggagttcccgggcattccgtaatctctcccttgttgtaaataatcataagcctagttttctttttgttatggagtctaagttgttagctggacattgtgatatttttagaactagactctcttttgataatgcttttgaagtacctaggaatggtcttggtggtgtcttttgttgttttggaaaaaagatgttaatgttactattttgaactattcctctaatcatattgattgtattgtcacctttgaggataatataactaatcgtatttcatgttactatggctcaccttatgttcgtgataaacttcatacttgggtacttttggataggctttttgataatgctcctcaacttccctggcttgttctaggggattttaatgattatctctccattaatgatagaagtagtagttcttccttacctcattatgctatggttaacttccaagcttttgttaataagtattctttagcaccggttcactttgttggtaataaatttacttggaagcatggttccacttatgaacgtttggattggggaattgctaatgataagtggtttcatcattatccccaggccattcttcatcacgtccatttttatggctcggatcatggggtgttaaaattagtcctttctgatgatagtatgcataaagtgaaaaatatgaggtttccttttaaaaatcattggcttactgaaccc

SEQ ID NO: 226216 - DNA, 1452 bp, Cannabis indica
taatacgcctaaattagttagggtgttacagaacatctctcccactgcaaaacaatcttaaacagaacaaaaagctttagcgaaattatgaataaccatattatgagaataaatataaaaacacagttcatgtaaccgtttttacattcctcaattattaagccaaaagaaaaaagtattgtaaaactacttaaaattgcttgaactgccacacaagacaatcaaattcaagaaccacctgtggccatgactgcatcttcgcatctttatccaacttgagtaccttacaaatgccaattgcttcagccaatcatcctggagcaacaacatcctctctgctacaagttcgagcttctaaaagatagaatttcatggtcctaaataactcaccaaaacccatacaatctttcaactttaaaaattacagcatccacatttatcttgacttcttgcatttgatgcttcacccataaatatgcaccattagtcaccaactcagtcgataatacattaccctccaccttaggactaatattactccaaaccaatgcattcctagctttccaaatagactatatctatctcacaaagcttaatcttagttaccctcccactcaactaaaatagccaattaaaaaaatcaatggctgtaatgacctcgtacttagaatacaggatatgtaagctaattaacattaattaattaaattatattactacatttgattatgttatattgtggattctattttcaagaagtaggctatagggttataatttcttaattccgaagattttattaaactctaggtgtattatatgtgattatgtagaaattaatatttttataatttttgctcggtaacgatagaaatgcgacagcttgaccataagagtcacacgggtatggtttagaatctctcatttagagagactagtattttctatatttggaatattaagattaggcggggttgtagtattttattattttacccctaaaccttaagattacttaagtgtgaagtaaaggtaaaatagtaaattggccttaagagttagttttgtcctttagtaaattagtagaggattcttagggctttctagctgattagctaaggataaaataaagaaaagattatatcaagttttattcattttatcaaaataaaaaaaaaaaaaaaaaaacaatacacacatgcacacttatctctatagaactctctccctctttcaaccctaaagagaaccaataagaatagagtaattcttcatcatttctccaagaactcagtttgaattcaaggagaattgaaagactagacttaaggtaagaaccctagctccatattccctatgttttatgagttttgagttggtttaagcatgtcagttgggagaaataggttctgtttgaaccctagatatttgtgggttatttttgagttagat

SEQ ID NO: 226217 - DNA, 1867 bp, Cannabis indica
gcaaccactttagaaacctaaactgtaaatttaaaaaacaagtaaaaaacagtatttagggtaattctccaatcattatctattagtaatgatatattaaatttaaaataaatatatacttgttaaatattcagcataatgacgtgtaaaatcatatttcttcttaaacaagtgtaaaatcataattttaatcaattataatttgatatggcaaaagcttatgacctggtagagtggtattttttgaaggccatgatgctttagttgggatatgctagtgactgggtagacaaaattatgccatgtattacttctgtgagttattcgtttcttgttaatggataagcggttggtaaagtggttccgggtcgaggcttgcgacaaggagatcctttatctctgttcttatttttattttgtgctgaggctttttcgtgtcttatatctcacgaggaacgaacaggggggctggatggtctgaactttggaagacacggcctttcagtttcacacctttttttttcgccgatgacagtttggtattttttgagaccaaggaaatagaggtcaaaagtttaaagagctacttgataagtacaccacagcttcggggcaactagtaaattttcacaagtttgagatgtgctttgggaagaaggttaatcaggaggtacgagggtgattgacgaagattatgggggtgaaagtggtggaaaattatggtagatatttggggttgccctcctttagaggtagaaccaaaaaagaacattttgaaatgattaaaaaccgtagtttggaataaagttaaacggatggaaggtcatctatgttttcggtcgcgggaaagaaagttttgatcaaagccatacttcaagtccatgctgacatatacgatgagttgtttcaaactgtctaagagtactatcaagaccctacacaagatggtagcacgattttggtggggattctactaaaaaaaagctcaaaaattcactggtgccggtggagctgtctatgtaagctaaaagaaaaaaaggggaattgggatttcaagatctccggttgtttaagaaagctttaattgctaagcaaattttgtggtgtcttcgatttctaaactctctttgtagtaaagttctaaaggagagtcactactcgaataaaggaattttggaggccaagtgtggatctaaagcttcctttgtttggagaagtctagtatggggaaaagagattattcttcagggctaccgctggaggataagagatgagaataaagtttgaattctagaagatccaaggctgcctagacccgtaagtttttgcatttatgatagactgtatcttcttgaaaatttgtatgtaaccgatcttaaaaaaaagaaatggcacgtggaatgaagagttcattagagctttgtttaatgatgaagatccaacaatgattttgcaaatttcgagcgaagattggggtattgaggatcaggttatgtggcattatggtaaaactagtgaatacacagtaagaagtggctataagctagctgtggcaatgctggaaaaagaagctccatcatatgcacaacatgttgaaaggtggtggaagtattgtttggaaaataaaaattccaccaaaagtgaaacacttagtatggaaagtttgtcattcatggctgcctacaagagttaccttgacacattgaggtatgaaaattgattcgacttgttttcgatgctcggatgggtatgaggaggatgttatacacgttcactacaaaaaattttgtttttagtcacattaaaatttgtgattaaagataaaaaaaagttgtgactaattataaattattattattgtgttgtg

SEQ ID NO: 226218 - DNA, 1959 bp, Cannabis indica
atgccaataagattattattgagttcatatgtttgagaggcttcagttttgtgggtttagaaacgtcttcgtctgtgagtgatgttcagaagaagaaaaagatatgaattacgctaaaagagaagaaaccatagtagtggtgcagctgtgagaaggaagaaaaagctaggcggctgaagtgctcattaggatttgacaagttattatagtatagattagagttatagcaaagtaattgatttggctgatctcatcacttcggctgaactaattgattaggctgatcgtatgttttgtgatggaactttacataaatatacttgtatgatataattataagaaacatattactaaaaaataataaatccattcataaaatttattattatatagctaaccaaccacaactttctctgtatataattttgataacaccattcatatcctataattaatataaccgttacattatcttaaaagaaggattgtaattagatatgtactatttggtagttataaactcaaatttagatactatttagtaagatttagatcaaataaatgagaaaaaaaaagaaataagagtatgcggtagataataatctatcttaagtctatatttttatacgacaaaaaaataagtcttattattcgaacatattattaactttgtacttctatactttgtctgtttatgttaatcaaactaaattaagttatatagatcacgaaaagattccaagtgttgactgatttcaattttataacaggatgtatacaaactttaatgctactaaatgagaatcaagattaatttcttactgtatagatagtaagtggttctttcattcacaaaatgaaacgaaaactagatttattcgaagacaatacaaaacatgaaattaataaaagacgaagagagctttatgcattacgaaaacaatctaataatatcactaccacaaaaattaatggttctaaaaaattggttgagatgaatgtcaaattaagaatggtgaacaacatgaggattataagagagctgcagttaataaagagaaaattatgctttgagaaaaagggaaaatgaaacaaatgtagataaaggtcctgggaaaatgagttctgtgaaaaaagcatgtatatctaaaaaaaaattcgaaaatgataaatcttcttccactgtgggtacaataactattcatgaaaatagtgctattctacgaaacaccaaacataaaaggaattataaaattataaatcgaggaataataatcaatgaaaatgttataggtatgatataaatctaaatttttccattataatattaacatcatcttatttgtatctttttgataaatgaatttttgtttataggtgttggaaatggtggtaatgaagctgtgttagaagtaaataataggagagggaaagagcatttatttatttttagcatatttgaagttggtaatacacattttattaatagtagttgtttctcactttatataaattgtttagattaaatttgtataacatcttacagggtcaacatctacacagcaaacgagtagaaaaaatttccaaggtatatttatgatatatttttttgacataaatttataatatcttaatataatattaccatgttttatataacatgtagataaggtaatggtgaagaattcaaagaacaaattggaaaaaagaaaaccagaaccttttaagttaggcatactacctgaagtgtctcatgttctgcaaacaccgaaagtatgtacttagtgtggagcaaaaaagtttcagtatgagagtgaaggattctgttgttgtgctggaaaaattattctaaaagtaaatgatgcacctactgagttgtttgagctatttacttcaacctctcttgaagcacaattgtttaaaaaaaaatattcgcatctacaatagtaatttttcttt

SEQ ID NO: 226219 - DNA, 1862 bp, Cannabis indica
ataggagtctggtctcgagtttctaggtgagagaaagctcactataacaggttccgctttggattaggttacccaaccttggactccaatattgggggaaaaatcattgagtgttattgttagcactttggggaagccgataatggtagataagcataccaaggatcgaacacgagtccaatttgctcgcgttcttgttgaaatggacatatttgataactcggattgcatttgttggtttgttaatgaatatgggcagctggttgaacaagaaattgaatatgaatggttaccagttaagtgtaatcattgtaaggggtatggtcatataatggctgattggaggaaaaaagataagccattggatgtgaaaactgggcagaaggttgaagttgtgacaataaaactagctgggaataaaagtattgagggtcaagaagaatggaaacatgatcaagctactggtgtggagattactgctgctattacagcagaaaatgttgctgctggtgtggttaattcagctgctattgcagtaggaaatggtggaaatactgctgccattgcagcagattttgttgctactgaaactgctgaaattgcaacgagtagtgctgaactgggagggaaaaaaagagctataaaggctcataatgatgcttggcaggcccctaaacacaaagggtcgggttcatctaaaaaagcaggagttgaacaacaacgagttctaaggaattcattcgaatttcttggggaaaatcagagagaggaggtaggtgaagaggggtcctttttagtttttgatggatagtatcaatattggaagttggaatgttaggggtttaaataaaaaagagaagcaggaagcggtgttggatattttgagattaaataatgttggagttggagctcttgtagagactaaaataaaaggtgataggtttgttgagatgatgcaaaagaggtttgttaattggaatcattatactagtagtgagattgaagggagaattttactagtttggaggaaaggctttgttcatgtggaagtagaagaggagtctaatcaacatgtccattgtcgtatcaagatgattggtcaacagaaagatttttttgctaccttcatatatggagccaattctatagatggaaggttggagctttggagatgtctctctgggattaatgtttctaaagcttggatcatcctaggtgatttcaatgcggttttccatcatgaagataggttgggaggtaacccgatttcagctgctgagcttgtggattctaataattggttaatgcaggctaaagttagtcccctcaagagaacgagttctaatttcacttggtcgaataagcaggacgctcggattttttctcgcatagacaatgtctttcataatgaggcttgggtgatttccctaatactatagccaacttcacttgggaaacttgttctgaccattgcttgtgtctaattcgtttgatcactacagagattataggatgtaaacctttcaaattctataatttctggattgatcataaggattacaaacagttggttatggatagttggagtaggcctattaggagtcatggattgaaaggagtcttctataaaactatgagactcaaacacaagttgaaggctttcaacaagtcttctattggtgatattggaaactcctatgatgaagcaaaggccgagtataaggatgctcaatctgatctccaagcagcccccctgggcagttctaaaattgaaaagagaagttagcagctagtcagtttcagcaccaggaaaagttgtatctgagttttttaagccagaggagcaagattaaatggataca

SEQ ID NO: 226220 - DNA, 1514 bp, Cannabis indica
actcaccccatcttgcctcaacatccataccaaagagctcaagcccgtttttgggctcgtttcattgatgataaggtaaaatgttaattctttgtaatctcttttttagctagaactttcgtcgactatgttatatgcaatctgtaacacaacaatttgatgttgaatattattttctcagatcgttccaactgtatggaaagcattatgggtaaaagaaaatcagaaagaaacattaaatgaagcaagtgagaatctagagtttctagagaaagagctgaaaggcaaatactttggaggagaaagcattggaatggtggacatagcagcaaatttcgtagcccaatggattccagctgtacaagagcttgtgggaatagaggtgttgatagagacaaagtttcctaagctctgtaaatggagccatgattttgctgctcatcctgtggtcaaggatgtattaccctctaaagaagaactcaatgcacacttcaggcctcgtttaaatatcacccattgaaaaatgattcagaatttgtaattaatatggataaagtttgtaagatcaaatatttgtcgatgttaatgctgcttaatattgggaattttggcaatgcaaacttttgttcaatatttatggatgttaatgctggttgatatttacgatttatctattttagttatgtccatagaatatagctacagtatagggcgctggtaagcacttgagccacactcaagtggccataagagataagagagtctgtatatgttagaggtcctaagtttgagtctatattgtaattttttttttttttagaaaacttgtacttcattagaataaatagtgagagtacagagcaatcaagttatatagaaggtaattatttcaaaccaattcattatttagtcttaattttaacttggcaattttatgagctaactcattagaatctctatacaataaaacgtcatctcgtggactaccattccaattacaagaattgagcttatctactatagttttacactcagtttttaacacatccacaggaaggtgaagcagttgaatccattgaacagcatgaaaaattgccttcgctttggctatgacagcagaaacactgccaatacaaggcttggatatcacagttttaactctatccaattcatccaaaactacaatgccgaagctatgtttcctattatgatgatcaatggcaacatcagtaaaaacctgaaaaatatcctctcagaagaagctaccaaagacctggtgtgcatatgagctgatttacttgagtagtgattgtgctgctgtgcatccaaatatttgaagaaataattaacacaccaatcaatgatattattagctggaataacactatgattataaagatcattattccttttatttcaaagagcctacaaaaatagtataaaatactaacataatccttatcctgaatatctatagtacaccttaaaaactcattgatcgatatcaaggtatt

SEQ ID NO: 226221 - DNA, 1436 bp, Cannabis indica
atatatatatatatatttgtatcctatatgatatattattttctcacatgcatattattattatcataaaatcatataaatataatattattgattaattttgaaagaaaatagaaaaagtaaagagaagaagaagaaagtgattattctctgaagtatgatcataataggagggaactacatgtgaacatatatatatgtaagtttggtatatagtatatactatatagtactattgggcaaaaacaaacatgggtgttctttattaatgggataatttgtagggctttttttcttttatgtaagcttttttattttttatttatttttaattgtttttgcttcatatttcgttttcttcagtgcctaaagtgagtgaattttgctttttgggtttgaacaggatatttgatgtatcaatgttcaacacaagaaaaaaaaaaataactgttggttgggaccattgaatataggatatatatatatatagacaattttttttatatgtatttggagcactaaaaaagatgagttaacacaaaatttatagatggattcagatcacataatataattttcttaaggctatcttaattgtaatcaaaatatgtgaccaaatattagtggaccaaagtttattttcaaataacaaataattttactattaaaaatagtgaaaagaaatcattactaatttattattttcttactttactaaaccaactcgatctcaacaagtaatgacagacatatcactcagaacattaaaacctaaaaaaatacaataaacatttaaatgaaaggctcatgcgatttgatgatgagcaactcaattagcgaatcatttaataaaatttaatgatacattaactaatgaattcaaaagatatttacaattttccactagcggcttgttcgaaatcataataacctaacaacctatttttattcaatcgtccacacctctaaacgtagatatcatcaccttaggactacgtacgaactgcttggactaacaccaagcaatcaatctcgacgctactgaccaggaaatcttgcttcagtcttgaaaacacctcctttagagctataacttcaacgacctcaggaagcacaacaccctcctttaaggcaccacaaaaccgtgatgatctctaatcactccattgaacctaaacatgtcttcctcttcacatataaattcatctttattcatcttgaaattgttaatttgatttaatccacagctcagcactatccgcaagacaccaagtatccatcgatggaaaagaacttctatcctgagcttttctccattgatcaagagttactcgagctaaattaacaataacctccaaaaaattcttcttccccttccacaaaagttgattatgcataccaaagcacataaatacaacataatcaccctaccacat

SEQ ID NO: 226222 - DNA, 2668 bp, Cannabis indica
ggttttcggatcaatagataagaatactgggcttgaccttagtgggcttaagacttttttcttagcattagtgggctttgacttataatataattaaaaattataaaataatgaggaaattagaacgtgtacccattgttatctttttatttggtaatatatcatttagtacattgtgttttcaattaaaaaaaaaacatatttagtaccttgtgttttcaataatacttaattgttatctcttatttttaaattatatatatttagtaccttaaattaaaattcaatgaatacaattttatcaatttaaccaaacaaatctaagttgtatgtaattaaataattaatttaaaattaaaatttataaaattttagaccatttgattgtattgataaaattctattaaaaaaattaaatttaaagtactaaatatatataattttaaaatacatggtaccaaataagtattattgaaaatacaaggtacctaacttagtaacttgtatttagataaaatattaggtactaaatgtgtagatacttttttatttttattttattactctttcatttataactaattttataagtcatatactttagagactttaattttaataaattatgtaaagttatatttaatattttaataaattattgttgggtaaataccattttagaccatgtgttttgtaaaagttactaattggatcctctattttgttaaataacaaaatagaccatgtattttccaaaattgtacaaacaggatcctgaactgattttttatcaaaataaaacttaataataatctgatttagagatgctatgacaaaactggttatattttctgtatttgttcgtataaattttttcttaaagttgattatattaaaaaaataaaattattgaaaattgagctcaaagtcctatttttactattttggaaaatatagggttcattttgtcatttaacaaaacaaaatgtctaattggtaattttttaaaaatacatggtccaaaatagtatttacccattattggtagaagaaaaaaaattaaaaaaattagtacaaccaaaaatataaattttatatgaaataaaaattaataaaataaaatatctttaaaaaaaattagagtataaatttctctttttttaatagtgtaaataaaactcccgattttaaattaaacattgttaaggacgataatatccctgaaacaccgtccgtttggtacgtatgatttgactggattagataagctaatttgtcaaatccaatgtttgacatgttagaacgtctagataagtaatccagctaatcccatttgtttggaattatttatcccatcgagcagcaaggtgggataaataatctcatacatgtgagaatttttttttttatcctttttttagtttttattttgattaaaaagatttaaatgaaataatttttacaaatctatttataaattttttttatcaaggaattattcattaaaatgattaaaaaatgtgtaattttgaattatcatgcataaactttaaaaaattaaaataataaagacagaaaaaaaaaattattaacagagaataaaaatattaaaggcaatagttcattagtacgaaagaaagatgaacggtttaaaataacgataaaaaaaatagtttgttgacagagaataaatattcaaaaggaattcctccattaacacgaaagaaggaagagttgttaatgataaatataacgaattcgactttgaactcgcatccttcatgggattcagactaactaccactggcatctaagactgctatccttggaattggcctccttcgtgcgactccgactaccacttgcctcaatggctgcgatccttgaaactcgaagtctttcaccgatgatgcttcctttcactcgaaatcccaaatcttagatttacaacctcgctttcaggttgattgcgattcctttcctattgctttctttgttatttaaaagttaaaacaattggtgttgttttgattgatatttttttagttgatgtatttaataataaatatttttctgtaattaaattttatgtattagctgagaaattttgtggatttgtaaatttttttattagatttctttttactgaatgtagaaatttccaaatacatttgcaattgtgcaatactcttcaaactatagtcttaagtttggattatatactggagataaaaaataaaactttccactccaagccaatgaaagcattcaattgctttcatcattattaggctagcaaaagcactcaattgctttaatcttatagtcattaagttattaaggtattagctgaagcttgtgaaaggactgaagcacaggttaaaaagaaacacaaggtaatgaaattactaaggaagaatttgataataattacggatcctttaaatgtagtgctattatctttgttcttattcaatatttcttcatgacaatgtattaaatgattcttcataaccataattgttatttgtgtttgtaggagctaagtgatttaggttttgctgccaaataaaattgttcttcctaatctttaattggtaagcctgatgcattgattattactaaggttttccatatatttagtctcattttgaaggtaatttttttt

SEQ ID NO: 226223 - DNA, 1349 bp, Cannabis indica
aaaacaaaaaacaaaaacaaaagattgtagcttctactttttttaaacgttgtaatttcattagagaaacaacaaagtacagagttacaatttatttacacaaaaatttgactcgatgactctgacaacacttttgacatgagataagaaggaaacaaccctagggccccagccaccgagactaatggtggtcaacttgggcattgtaaattctgtcagttccctagttgatagtagtgggcgcctaggtaggcactaagatccaacaaagaatttctaactaccatccttcgacaaagtttaagtgaacaagtccctgtgaccctaaaatgatgaaccatgaagttgatgatgtcacaggctcaacctgagtccaacatttgtgttgggtgcccaggttgacatcatgtgctccatctcgcattagttttggttcttattaacttcttatgggcaatttccttagccattgctctaagatacatgagagacatgccccagccaagttttagaatttggagacgagtctacatgaaatggcaccctggcacccaaaatccctaatgcgcgcacacgttgacatatagtcgatttgggtgcaccatggctagggtttaggtttttggctacatacttgaacctcgattcctcaaatccatcgaggaacaacataagggcatgatattttttcaacaagatcctaaaggagcccatatagttatcggtgcccgggttgacatttcgacctgggcacgatttcgttttaccaagttctgtctgtggaaatttgacaaaactgaaatctgtggagcacgtttaaccaaaaataagactgaacatcaatgaaacaatttttgaagatgtttaccattacttgggtgcctagtaggggcaagttcactaacacccatctgtactagtgatcaatcgggtgtaacctagccatctttagtgaaataccaggaatcacccctacatatcaagtaaaatttccaagaaaacttttccaatatcaaggaatgaactaaggatagctatcgcatcattcaagcatctcaaaatattcttaaagcccaagaaaccatgtcttgggctcctaggttgacgtttatgtcaacctaggtgcccaaaagtcaagttgtattgttgtaatcgcttttctacactgcacgctactttgtaaaatggtcataactctctcaattcgtatacaaatgatgtgatttcaatggaaaatcaaagctatttccaaggcgcatctaagtgtgtctcacccacttgtcgcaattctgaagttttgggcctcaaaattgactcgcaagctaatgtaggatttcccatcaaatttt

SEQ ID NO: 226224 - DNA, 2436 bp, Cannabis indica
gttttgctccactacctcttgggctctgacttccgtaacttcccggttgagcctttcttgttcgtatagagcatagtcagacaaacaatctttcctacgagagcccaaccgcatccatgggccgtacatcggaaccgtgttattaaaatcatcagtgatcatccgtctttggcgccggcaaaaggactcatcatgacccacaattccacatttatagcagacataagggagatgctcatatttgaaataacaccagagactaaccccttcttccattggaagaaataacccaacaaggagaggttttaaaagagaaatactaacccttagtcgaatgtattcgtttgtagggaatccatttcgccacatacgatcaatggagataaccgaaccaatcttgttagctatagccgtcgcattcttctgagtctagaaacgaggaggaatttcataaacccttatccatattggagaggagtccatatccaccgcactccatcttccatcttcaggcattggtttgaccaccaagaaaccgtcacacaccgcccaggggccattctttactatgagttcagcctccgctttttttgttaaacggataataaacgttttgttcccaacatcctgaagcttccatccaggggacaacttccattttttacccagcaccgatcagagcaggccattgaaaataggacgcttcgaaatgatttttgccaccaccgatttccatgccgcctcacttcccaaatcaagattagcttccaaagagatcgagagctcctccaccccactcaccatcgtgttctcggtgctcttttccccatcagtagaaaacgtcactaaatcttccatcttacagcactcacaaacaggaactcagaaaaaactgagaaaaccaggcaagactccaaccagaaaatctcacaaggaattttacagaaagctacgtaacgaagatacagaaagaagggataaaccctaggcccaaaggaaaaggcagagacccactacaggggctgaacgtacggatcagtacggaccaaaagtagtacggagagcatttttttaccgtttgcatatatgatagagatgaaattacaatattgtttattaaaaacgtaaatagcaagagcaataatatctcgactatagcgaaacacctcattgttttataatcaacaagaaagaagctcttgttcaaaaaaatattatataatgaaaataagataaaggattaattttttttttcacccaacaaatttataaagatactctaatagtatgattttttattttatataaaatatatatctatcatttataatagttgtttttttttcttttttttcatattattttaaaataatatacatattatataaaaataaattatattttaaatattataaaaaattatattttaaatattataaaaaattaatgttattagagaaaaaaatacatgatgttaggaaaaaaaattatgaatataaaattaaaataagtattgaaattaatacaaaataataattttaagagtgattttttaaaattaatttttttatatatatatatatggctgcacttaaaatttaatacttataatttaataggatgtaaataaaacttcccaagtacacattaataattaataggttaccattattaaatttcataaaactaataataatatatatgcagaaatattccaaagattactagtaccactagtaccaagaaaatctgtgagaagacaaccaagtaccaactacgcataggcggctcttatggggtgcaagatgtgctattgcacagggtcccaaaaaataaagggcccaaaaaataaagggcttaatatatattttttttaatgcccttcaatttttttcaatgaacacaactttttaaagggctaacaacttatgattgatcatttctatgtcaatttctaaaatctattttcaattctattattgcttttaagcaaaaaaaataaaattcattgtcgctatttatattttttcctatcatttttttgttgtattgcaatcaaaaacaatttttataaattaattggagttttttgatgttttgtaaaatatataccgtatataataatatttaaaaatattatttataaattgtatttttttttgtaagggcccaatttagagatggaaatttataccgcatggatgggtaaccgcggggacccgcctctaatggggtggggattccccgtcttggtggttaatggggcggtggtgggggacaatttcaatacccgaagcggggatggggcgggggcggggataatactatccgcaccatatccgaccccgatatagacatatataatttcctttttattcttaacatatatatagtatatatatgattgataatcaaaattattttgattatcatcca

SEQ ID NO: 226225 - DNA, 2659 bp, Cannabis indica
tttttaaacaattttttttcttaatcaatattttagactccgactacaccgggacccgaatctcctcccacggccttggcgctgaacccggcgtctgacccgaacccaaattcgaccccggatctagacgacttaaataaaatcaaaaaataaaaatgaaaagaaactttacagaacactacttttgttttttgtttttaaaattgaaaaacaaaagtggttacagaacacatctttgtttttcaaaaacaaaaattttaaaaacaaaaattttactttcattttgtgattaaaaaattaaaaaacaaaagtgttaccaaacggcacctaaataaatttgtttaataaaacaaaaagggtatatatagaaacttaagaaaccctagagtctttagggaaaaaaaaaccctagagttgaaaacagtttcagctttctttctctgttgttgttgttgttgttgttgttgttgttgttgttgccgctgcgtggccgaggccgttgtcgttgtcgttattgttgttgttatgttttataatcagtttcagaaaagtgtaatcttgatgttttgattatctattttgccagtgtgctgttcatttgaacatttttatgtaatttggtttgctcttacggataattgtcttgaatattatcacatatgattgggcatgaaattttttactttgaacattggttctctatagctcaaaaaaaaaaaaaaaaagtagaaaaataaaaagttaggaatcgataataaaagcatttcaattcttgatattgtggtagttttttatttaaagttcaaagcatttcattataaatctaatagagttttgtttgattgctgatatatgttgaattggagcctcatttggtatttggaactggttttttttttctttctttctggtgtggaattaagctttgattaaccctacttattaaactccatttatgtgtgtatattgtatatgtaagaggtctggaatttaatggggaaccaataattgtttcttacttaattaataaatgaacaaagggataattgctcttgtgggtttaggattgaatcgcactagttattctgcaattaatttgtaagatataattgtgttgaatatttcatgtgtgttactgtagtatttgggaaattatgttactaagaattatcaattcagaattattttatagttgcagcaatattttgatcagccttaactagatcagagttttttatatatttaaaattgggaaaaaaaatatgaaaatacaaaaaaggaaaaaaaaaaattattgaaatacactaggccggccatttaaactattatacagcccacaaataaatatttacaaaaataccacatcctctaaaccttcagccgcacaaaacagaacgatgaacaacaacaatcttcaatcgttcaaaccagcaacacaaccgaaatgaaactaaatcaagaggaagaccaccattaattccagcgaatttcactgaaaaagaagacagaacgatctaaacggaaattggcgaaaaacagatcgaaaaattgggacgaactgaacttaaacactcattttcggttttattcgatcaaaacaactcctcctaatatcgaaattcagattcatataatgtagatctctggccaacagatgtggaactcccccccctgaatccaaaaacatgtataatgtgaaaaataacaaaaaaatcatgaataatagatctaaggtatatacagttgcatttttgttgatttctgatttttaatatggaatatattaatttataaacgcaataagaaaagcaaattcgaattaatctacagccagttacgtataagtatgtttctttttttttggttgctttggtagttgcattatcgtttcataatattatttatcaaatttgtagaaatttcatttgacgatgaaaaggaaagatcacttcgaaaaacactgcttctacattgtaagtattatgaaaatagttgcatattcgttttataatagttgtaaaaaagttttgatacaaacaaaaatattgaaacaattgtacacatgcaaacagaagaagataatagcttcaagtacttgtttgttgcactagatgcttcaataaaaggatggaagaagtgcaaaccaataatagttgttgatggaacttttctaaaatcaacatatggaggaacattgctctctgcttgtacacaagatgcaaatcgacatatttttcccttagcattttctgttgtggattctagaaaacaacaactcatggcaatagttttttacaaaattaagggaaacatatgggatcagagaagaacagtgcttgatctctgacagacatgagagcataattaaggtagctgctcatgtatctttagaaataacacatggctatggcgtataccacctgttaagcaccctgaaagcaaccttcaagaagaatgcaagcaagctcgataaaccattctttgcagcatcaaaagcatacacagagagaaaattcgaataccatatgagcgagcttgagagcttggacattcatgttagaccatatttacaacaatttagataccataaatggtcaagataccacaacaaacacataatgtattcaactatgagttttaacattgctgaatctctaaa

SEQ ID NO: 226226 - DNA, 3235 bp, Cannabis indica
ttttattttttttaattttttaagaataattgatgtaggtcccaatcccataccttttggctgaggagcttttcaaactcaacacggaacgaaagtactgttgaggttgtctgatcagtttttctttttctgttacacttatactgagggggaaggacgcctcaggcaggcttagacttagttgatgactcgaacggcgtcgttcattgaacttgactcattgccacgtcaccattccacgaggtcatctatccattatattatcttttccgtagactcaggatgttgacccgaaaaaaccctttttaattctaattaagatttttactcctaattgatatgtactaaatcttttttgaatttttgtgttcaagtattatagttagatttaaagatttttttataattttatttaattttactattttagtgattatttatgtactaaatcatgctctccagactttgatatctatcaaatcatacatctcaaattttgactgatactaaatcatgcctcctgaattttcatctatgttagacattttttactaaaattggataaaagtccttaaattcaaccatatcgataatttaggggcatttttaacgaccttaaaagttcagggacataatttattacatgtaaaagttcaaaggataaaaatcttatttagcttttttcttgtaaagagacccaaaaaaaactttaatgtaaaatacattgaaatttttttttaggaataattttattgaaaaaaaaaagtaaaatttgatataccatctttttttttttgaataaaaattataaaatctattaattaataaattcgttcaaaacaatagaacgcggaacagtcctctaactgaaccacacgacctgtagagaaataagagtctcttgccaagcaataagccaacttatttgcagattgttttacaaaacacaaattgtgaaagcataaaataccgctttgaatcgcttggacacacacaaagatatttgtttccaacatgactctttcccacgaatgagttgtaatccaactcaatgcttctttaatgcctattatctcagcaatttcgagttgaacacatccaatcttcccattctttgaatgtgtctacatagcattatgataattctgaactatacaacccatgccaaaagacaagactcgaaccagaaaaaattaaaggaaaaagactaaaaaaaccatgttaaaagacaagactaaagaaccatgtcaaaagataagactaatagaaaaaaactaaattagtttcaacacataaacacgatcacaacattaaaattaattaaggaatgaactatttataattctaaccccataaaaacattaattggaattaaactaataatagtaaattaataaatgaaaacaaaaatttgaaacggaggatgtcgttgagccgaacccaaccactcttagacgactgctcttgaacccctcacaaaagaaaactttggtatcaaatcaatcaagaagatcaatacaataatcttctccttcggtaatatcttcgataatattcaaattctgcatttaatgagacacgaatttcctttactatttctcaatgtcagccacatacgtagagttgatttgatgaaattaatttgttgaaacacaaatccagattttgctaggattaaatcccattagatatcggtatagttccttaaaaggagtttggtttagtgtgacctttccatacacttgtcaatcaaaatcaatttggcgatttcttcatataccatctttaaatgctgtgtatttagtgtattaagaacatttttaatcaatggtaacattttgaaaaatgtttgataaggtgaaaagtttatgtagcaaaatataagaatgctatgcattggaaataaaagaataataatcttaaaattttcatgtcacacaatggtagtgatactattttttttaaaaataaaaaattagaaaagcaatatatatatataatagttaatagagaaaaaatgtatatacatataataatatattgttagaaaatattgtgctctaatagaaatatcaaactaataagattacaactctatgacaaataatacaaaataaaaatatagattaaataatatgacaacactaaataaaatatacataaaatagacaatatagagatgaagagaagaattataactcaaagcaataagctacacataaaacacaatatataaatagcatatatatataagagatgtgagagcaatctcaacaccacatacaccataagtgaataatagaggaatcattaaatttgaacaaagtcttacacctttgtccaaaagcttatttctccctaccacaaggggaaaaaaagaatgaaaatagttttctacatttatcaagcctaagtgtttctagcaatgtgctatcttgataaaaacttgttgtcttacaaaatgaacccaagacatttatttatagtgttttgagaatggatcttatatgaaaatcaaagttttttcaccacatggctgttacaagcacttaaattggtgtttaatgggatagaaacgttggacaagagagctggaaacatgctcaatcaattcatgtacgtttatggacattttcaaaaacttgttacaagtgttcgaaaaataaccataaaaataaccattaaacaactgtttctaaataactcaaaatttagtttttgtaactcctccccgagtcaaattttcatccaacgttccaatactcatttaaatgatataattgagtattgtaacagtttctaacagctagaaacttatcccattgatttcataacttccatatgtaataactcacttaattacatatcatcaattgtgatccttaagttacaatatatttttagatttgtaactcatatgtgttacaacttttatgtgtattattatactatagatgatataatacaacctccaacacataatatatattaattaatctcatattaatatataacatgtcacattttaaatattttaatctgtattatattataacaaatagtataatgttccctcactagattaaaatttgtgacacaccattgtaatatttgttgatctcgcttttagccaacgacagtgagtcaattaataagcgattagaaataaagacagagcaaaaatcaataagcaataaagaacaccaagttttaaagaggttcggcccctttagtt

SEQ ID NO: 226227 - DNA, 1553 bp, Cannabis indica
cataaaacccaacatgaatgccgtggtggataatcactctcttggatggcacctatttatcagttcttgagcatgggggaactccccactgatcgcattgcctccagaaagatccaataccaagctccgcgtcatgtggttatggatggtaagcttattgcagggggttttctatgccatatttgagatgcatcacagggacagagattagggtagtaatccatgaggtccatgaaggcttctatggagatcacacttccagacccagcctttccaagaaaatcctgcgacaagggtaattctggcccaccatgaaaagggattgcatggaatatgtaaggaagtgcgatcaatgtcagagattcgctaaagtcagcgcgcaccacccattgaaatcacactaatgaacagtccttggccttttgcggtttggggcattgatttagtaggatctctccccacaggtaaaggtggagtcaagtttgctattgttgtcattgactaattcaccaaatgggtcaaggcatgaacacgtttaactctaagaagacatgagattttattgtcaaaaacatcgtgtgccgatacggactcccctataagattgtgtcacacaatgggaagaaattcgacagtgaacatttcaccaatttgtgtgcccaacttagaattgtgaaatgcttctctgttgtagccaagttgcaagctaacgaccaggtggaagctgtcaacaaaatcctcaagaccacgttgaagaagaagatgcaggcttgcaaagcccactggccagaggaactccctcgagttctctgggcctataggatgacaaaaagaacttcaacggggcatacgccatatgaaatgacctacggatgcgaagcattgatcccagtagacaccattatcctgtcccattggcgagacacttacggccctacccataaccaatctctgctctaggagtcactagacttaatagaagagctatgggaatagtcgcaagtctagctcaaaatgtaacaaggaaagatgcacattatgtcttgtatgtaaagaattactcatgaaatatatattcattttaaatagactttcttttagtttaattgaaagactattttagtacaagcatggcactgactgctcattatggtcttgagttatatcaaatggattattaaaatttcatttatcaatggtaatattgatgaaaaaagctatgcggtgcaactagaaaattttgtatttaaagatccaaagaatatgatttgcaaattaggaaatctatgtataaactcaagtaagattcttgtcaatgattataaaattttcattaagcattctcattttgttttaagatagaagcttttgaagattgtgtatatatcacaggttcagtgagagtaagaatatgatcctgataacatattggtgaaaaattacttgccactgttgatatactcattttatattaggaatttaagatatgttgagaatgttcttgagatattcttaaattataacaaaagagatatcaataaagtattcaaaaa

SEQ ID NO: 226228 - DNA, 2932 bp, Cannabis indica
ttcttttggagtttatcttttctgaaaggtttgaagtgaaagattaagagagtttgtatgcaagcatgctgttatgcttcgacgcttacaagcagcctctacaagcaaagggaatagaaagcaagggaaaatttctttgaagattgataagacaagcttgatgggactgaacgccttcttttcctctttacttctctctgtctgtccttttagctaatagctttagtgagtgtatttatagaggtagcgtatcgtgcctcttcgaggtgaaccctatcttcgtaaagaaatcaagtggcagctgcttttatctttatgcattcacacctaaacccaggtatacattcgtctcaggttttgtgcggctattattcatatatacatctatttactatttttctccttctactgttattattttatttatttatacaatctttttttatttctttttttttactcatcaacaataagattatccaaaatgtttgtgatcgtacagggtgtctaaatatgagtatcctattttgtgtattctattagcccacacatccttgtttgtgatcattgtgtctaatccttcttgttgatactaataattctacccacactataaatatggttttgtagacttagaaaatcttactcgcacagtttcccactctctaccgctagctctcaaagttctctaattttcactataagcaaaatggaatttatgttagggtttatagcttgaacaatttgatatatctttgaatattttgaattatttattagtaatttttatataaatattagaatatttattaatcatatataagtttgtaacttgtattgtatggagaattaagatcacaaggtatgaataaaatagtcatcaacacattaaaattatagaatccttaatcaatagttaatagtatggttcactaatgtccgttattcggtgcaagcaatcttgattcaaaccgctgaaatagatagacatctcggtgaatgtgttgtatatgatagagattatatatggcagttgggatatgtatttgtcaaactatatagttgtttactataaagacttcagtcatatcacaacgacgatcaattagtagatcagcctaaatcctgagaaattatgaagtcttgttcatgttattagtttctttgatccacttgttaaaatttatctcagagaaaatatggaaccctaacttttttgatggattgaatattgattcccttaagtaattttagaactgaaagttgtgtgcaaatttagatcaaatcaaaattatactataattagaagagaaaaactgtaatttgaccaaaactaattatggagcaatacatagagggctaatcactggtattgattagatcaatggacaatgtagtaaactcaataaatataattctataattactaagagttcaattccatatttttactagagtaataatgggattaataaataggattatttgattattgagattaaataaataatataatttattagagtttggtattataggttcatggtccccagatcgctacgatataacattattaatggtatggttcaaattaatgatgttgagaaaaatttattttgaattagcaaaatagcaattatttatttttataataaataatttatttttaatttattttataaatgaattggggagacaaagatgatgtcaggacaagataccatttcgtaataatactacaaggtggcacctagcaccgtggttttgcacagtgataggcgctaactataattctgggccccgttgtgtttatttttgaattaattaattcaaaagatagacatttatttaaatttgaatttaaaaagtggttatagatatttatctatggttgagagattcttctagatgattgaagtattttctcaagggttgagatattttttcaatcgattattagatatctagtttaaattaactatttaaatttaaaaataatatttttaacagaattagttatagatatttattcaaatgtttaaatttcattatttaatattaaataaataaatatcttatttaattaaatctttaatattattttattagttataattattataccggtataaatttaaatttatatatacgatatatttaagaaacttaaaaaggttaatcgtattattttctttctagttagagttcttgctcatgtgttaagaataaaacatgaacattatcattttgtgtattctattagcccacactaatacttgtgtgtggtggtagatctgaaagatcatggtatgagtgttgttaacccataaacttttcatggtgatgtggacatcaatattggacatgtggcaagaaagatgacatctcggagttgagtagtcccgagtcataacagtcgaccagggagggtttcctagccttgtgctcaggttgattttaagaactccgaaatgaaagtttggactttgatagctcatttccaactcactgtctttcagtattttgtaccatgaagacatggagcaaccaaatctaggccaagagagccaaaaatacatgaaccaacacctcggatgttagcttgggcacctagctagggtttcacccagcgcccaggttgacatcctcatctaaggtttcaatttttgagaccatcttagtgcaaatgggtcaaattttgcattgtgacatgaactagacataccgcgaacatatttgagacatcaatatcaaattcagagaactttcattattgagcacccagatacccagtgcctgatcaccctagcgtcgaggttgacaatctatcaatctgggccacttccaagcatcagatcaaaaatacaactagtgcatcttctttgtcttcatcaaaaatgaggaaattaatggcagcagaataatatgactc

SEQ ID NO: 226229 - DNA, 1578 bp, Cannabis indica
aaaaataaataaataaagcaaatcacttgctgcagtgcccataaacatggaaaaattaaactttcttgtattgtatcatgattacacaacacatggtctaaggttaaactcaatccccaattaactctacagagccactctgatactcttattataagtgtcagaaagccttactgaattccggttcccgaagtacaaactccactatcggtgcaagttccaagactaccattaacaccgttacttgctattgctccacgatccacataattcaccatattaattatacaaaagataacgagcaacctgcagcaatacaaacaaaccaagaatttcatggacggaaaggtgagaatcaaaaatagaaagcatgagcccaattgaagcaattgaagaagtttcttcataattttgaaaagagagaggtaggaagaaagagtatgaaggaggtaccttttgggcgtaaaccatgtaggcttgcgatctgaatcgtgaattggaagggtggccattggaggtggaggttgaggtccgttggtttctgggtttgggtttgggtttggttgagaagaagaatgtttaacttcgatattcatcgtctttaaattaatatctgcaaaccaaattatatgtttcaaagttgaaagtccaaccccaacctcttccctctttcaccgcatgtctttttcaccttttttcttttttaactcttctaaattaaaattattatttataattcagataattatcttcttcttcttttcttatttataattttcattattagttgtcagtgacaaacttaattaaattgggggaaaatacactctggtaaatattatttttttttatttttatgttgctcacaaaatgggcatttaattttcctatacttttatgttttatcatgtactatttctccaactacatttttgtttatggaaactagtctatcgaaatctttaaagctaaatgggaggagcaaatagtcttttagtgaaaggaaagtcattaaaatcaactgttaaagatatagtgaaattagctgtttttgactcctttttgcttccaatggcaagaattaaaatcgttggcctacttgtttttcattaacaaatatgaataagtaatattcttatactcctttcaaaaaaaaaaaggtaatattcttatacttttagttatcaaaaaatattcttatacaaactatgtcagatcatcatccttagccaaattaattgtggactgattttattttttattttatttttgttttttaagagtatgttctatattattttaatttttaagagctctatgatcaggaagaaaaaaaaaactcttttgtcgatgaaatgcgtcagtatactaaatggttgatcctattcttaagggaagatgctcttttctcttaatttataaataaaatgaaaaataatgacactaactacaatattcaaccttgtaattgtaaatcaaattcagatattcaaaaagttggaatgtaagagaatcaaatcatttttaataagatgccaaaagaatatgtttgtagtgttagctaaattataaaatctt

SEQ ID NO: 226230 - DNA, 1770 bp, Cannabis indica
cttaaatgttaagttacttgcacaataagttagccgctgttcagttctagaaaacacgagtcatctgcatttgcttggtatggcgtaaaaaacattgtttcaaattattttactacatcaagtagttgagtccaagatgatgataataagctttgatggctgaatactaaggaagtattcctcaccttcacttagatttatctctggcgtttattagagcacgattcactaaaaaaagttaggacttacagaaaattggtaattgtttacgactattaatggggatactgtttaatggaggaaaagaaaataaaattgtgaattcgtttttttatagttgtcataaaaattttataattggaaaagtagaagaagcacactaaagagttaacgaaaagacatagttgtgtagaatataaacagcatagctaagtattaagttgatcagaaaaatgtttccattattgcatattaagttgatcttttggtggagtatatattacattacagaatggtttccaatgcatgaagagtctcgttagcctttatgattcatgtaagtttataaacaatatctgccagtagcttatggcgactcgctaacatgttttataaaaggatccaaatgtagttaaccagtgtcatcaaataataattggattgctcttgtacttatggaatatatctatgatcgtttgtttcttgtcgctcctatctttcagcaactttccctctggatttagtaaggcgaaggatgcagctggagggagctggcggtcgagcacgggtctacaacactgccttatttggcacatttaagcatatattcaagaacgaaggcctgcgaggcttatatagaggcattctgccagaatactacaaggtcgtcccgggtgtagctattgtgttcatgacctatgaaacactacagatgtgttggtcaagaatccaaacaagttattagtattgatttcccatattattagttgtgtttgtcaagctgattagccatgtttgaaaacaagaaaaagaatgtattagtcaaaaatcaggagaggtagataggagaaatatttctatggtagtaaattttgcagttgctgccaggattccataatttttttcccccatgtataggtatttagctttcttgcaccaattctctatacaatttaggtcttagtcttaaagcatttgttggtgatgattataccatatatcaggttttttatattttttttaagaaaatgttacccggtgtttggggagttacccttttcttattaattattatattatatttcttcacgattgttaaatgtctgataaaattagcaagtttaagtgttacttgattatatatttttattttaataaagaatagtattagattaacttgttattaattgtaaattatgtcaaggaacttcctttaattccggctttcttaattggtgtgtaatctgattgtaagacttgcttagttatttcaaaatcacatgtaaaaatacttgtaatcactctcatataggagataatgcggactgtctccataaatcaatcgattcaatttaatgataaccaattgattcaattataattaatcgttaaacattagatatcttatgattagattggattaaatgttattttagaatatctaattagatcgaattggatgttggatgaggtgtttaaaaattcaatacatttaacatctaatcgaattaattagtattttcatttaatttggatgagtaattaaatttt

SEQ ID NO: 226231 - DNA, 2062 bp, Cannabis indica
taacggcgttaaaaggaaagtttaaaaaaaatggtggatcgttctttttgggggttaaatttaacagaatattcttttatttgtaaagtatattctgttaaaccaagaaatgtcgttagataggcacttttaatatataaagatatactatttattgtgggtggtaattaaggaaactatcttgatttgtctctcgtatcattatctattaggaaaaagaaaattatcattatcatttatttagtttgatttttttttattacctttttacaaattttaaaattattattctacgatttttgaaaagaaaatctaatttgtagttagagaaattcgtatccatggaagcttccaatatataaaaatactagattacaaaataaaatattattcaaaattgactaaaacagattaagttgatttcatgttatgaaactttgactatttttttaactattcttttgataaaaaaaacagtagacgtctttaatgatatccttattatttattattattattgttattttgtaaatataattacatcgatcaaattatcattagcatttttcattgtccttaactataccgtggatcataagattgggaaattgtaatagaaaattttgtgttattttgtgaaaaataaatatattgtgtagatacatttaatacatataattatttgcaaaaaaaaaaaaaaaattggcaatattgtgtcattaaaaaaaagttgttgcaaggttatcaaagaaaacgttctctcatgtatttagagaaaaaagagatatcgggatcatatgtgaaaattgtcaggtgatttgcttggaaaaacttaatatggtataggtgagcctaaataaaaaatttcatccattcttacctaagcctaatgttataacccaattaagtcattttgattttaaaggacatgttattgacattagtggataaggctacgtattgcacccttattgataatcgggttgtggacaagatggattgatttcaatcatgtatatcaagttccaatagtttttgtcatttgcaagttatatttttctttttgagtttgaatgttaacgttgagtattgggagtaatcagattgaaaatttagttttataacaattgaatcttgtgagtggcggtagtgtggtgtaaattcaagtaaggcttggagcttgctagtgtttttttctctttagttcagtttagtgttgattattacttgagggcgagtatagattaagtttgggtaggctagttttaggtgcattttataaagtgctttagaggcatatttcaattgattatattcattttgtgtagaattatttttgttttgtatttatttcaggtttaaatggtaaatataatgagaataaacatgttaaatgatatgaatatgataaattatcatagaattttgagttctaggatacaagtggtaaaaaaaatttagttttggatgctcaacacgcttcgtttgtgatcgaaagtcaagtctgaataagcttcaagccaatttttaactatgatttgttaactttggggaaaaatgttgtgaataaaagttgtagatctctcttttagctttctaaaatattttgaatcgtcaaactccaagcaatattgaaatagttatcaccaaaacattatcagtcgttgcactaggaagtttgctgccaaaaattaagtttcaagcgtcatgcattacaagctagttgatgcccacaagttggccaagtggtggtgcatgttggtgtgcatgctggtggcatgcagatgcttagtttgtacgagagtgatattttcgtaaataccttcaatattgtccagatcgggacgggacttggtatttgtcatttatttggatctacgaatataatggtgcaatcagatttgagaaactctgtgatttggtatatggtgatgatcgtatgtctacagagcaaaaattatatatgttcttggtagaaagctaaaaccttagaatgctctttaaggggggaatatttagtgtcagttgtccaccacccccttgcaccttggtgctaagtgag

SEQ ID NO: 226232 - DNA, 2374 bp, Cannabis indica
aaccatgcaacataaaatgttatttttgatctttattaactagtaaatttgattatattgaaatgggttttatttagggcacaaaacccaacaacaactgcctttcaaacctctacaatttctggattcagacatatcaatgcgtgtctccaacttcattactccagatcgcacttggaacatctccttactgtcccgatatttcattccttttgacactcaacgaatattggacatccctctaagttacactcctcatcatgaccaacacatttggcactgcacttcggatggaatgtacaatgtcaaatcgggatatcaagtatcacttcagctacacaaaactgaagatggatcaacctccacttccgaatcaaaatggtggaaaaaaatttggtctttaaaggtaccatcgaagatcaaaatttttctatggcgagttcttcatgatgttcttccggttgctgcatcttgcatagaagacatattgttgattcaagtaaatgcccactttgttcttatcaccaagaaacaacttttcatgctctttttgcgtgcaaaagagcaaaaaaaagtgtggctttcgtacggtattcatataccacaactaacgaatcatcatgcttcttgtaagtcgcttctcttttatatctcagatttactaaccaagcaagaattggaacaagtggcttaaagaaacaatgacttccatggaagaaaatcaaagccgcctgatctcttatttcaatttgctttaaactatgtggctgaatatcaatctacaaattgtaatactaacaaaggaggacaacgcgccattgaacttaatcaaagacccatttctactacaccagaatggatgaatcctccttcaggacggctgaaactcaataccgttgttgcgatgaatacaatagaacaaaagctggattaggagccattttgtataactctgatggggagactttagcagccttctcccttcctttccaaagatgctacaaactagaaatattaaaggctttggcaattttctatagccttcagaggctgattgctcttcaatatctggtgcattacattgaaacggattcacttttggtggtgaaaggattgcaatcttctaatgtcttagtttctgaatttcattgtattttatctgatattcgtaatcttgtgagaaatttttcaggagtgcagatttctcatgttcctagatctgctaatactcatgctcataagctagttaagtatgctctttcagtagccacaaattgtgtttgattgggggaaacacctcctcttttttactgttgtattttaaaattgaacatctaatatataacagttttattctaaagaaaaaatggcgatattctagactttttttttcttttttaaataatattctactctttaaagtcatagtaatggtatcatccaacacaccatcaccctataaatgggctactttcatcaccatcaccatatacttagagggtgtccactacagatgcctccgacttttttttttttttttttttagaggaaaaactgctattataaatcaaaccaaagaatcatttacaataagaatttataggcggaggaatacaatccgaccaaaacaatcttcatctacccctagtgcaaatttagccaagccatcagcagccatattagctgttcgcttgacatgagttacatttacattagggaaaaaagaaagaagactagaaacatccatgataatatcattaaaaactgaggaagctactgttggggagcatattgcatttcttactcgaagtgcatctgtctctataagcagttgagaaaattgaaagtttagagcataatgcacaccatggaacatagcaagagcttccatttcatgaggttcaaagctgcctagcaatttcttggagaaagccgctatgaccataccagaactgtcccgtagaagagcacccaaaccagtagcattgttgttgcggtccactgcagcatctatattcagcttgtaagcacctgtaggaggaggtttccaggggacattgttacaattcgaagcagagggaatggaattctgcattggtgttgttgcctgagcttgaaaaggttgctgatatttggatatagctgatctgtaattcagcagatagtttccagcaaaggaagacaactccatggcctttttggctttgtgtccatgtacaactctgtttcgttcagaccagatagcccacaaaatacatactatttgttccatttcagccttagagtgaatacttgtaaggtgaatcaagtaatcccctttatgcattgaagaggctttataccaatcgaaattgaaaccagaaattctccacac

SEQ ID NO: 226233 - DNA, 3961 bp, Cannabis indica
agaataagattaaaatttgaataagaaaaaaatacaaaggtggcaaggctatatctcccactaagaatattactatcattaccagacaaggaggaactgctataataattactagattccctagatctagtaatcatataaagatcaaaggatttaagaggagacatatcccaatttgaatagccgagcctatcaaagttagtttcatactgtctatcgatcccaaagtatgaaccgttacaacttagttgaacatgatgtttagggtaccaactatcgaatttatgggaaattaggtcaatgcagttccaaatgtagaagttatagtgacaatctttaaattgaactaatgttgtttaatcagtcttaagaacagtaggggaccacccacaatgactgaaattattacctcaagaggcctcgtcttcaggttcccgagtggttacattcctaaggtaatgaatgtgagccacatagtcctcgtcctcttcctccgtgggtatagggacttgttgccaatttggaaacttgggagttttgaagtcattggtacattaatctcttccaagaagggcgcaagcttttaaattgtcatcgtgcaataaagggtctacaactcgcagaccatagggaagattgagaaggatcttgtgtttttccttaatttctgaggtgggaataggcctcttggtgatcatgtgaacataacaaaaaaggaagaattcttttaagtacaaaaaataataactcaaaaccaagaatttgagaaaaattcgtagttacgtaaaattcggaactttgtggtgttgattggatataaatcagtggtccaaaagaagtcattcatgaactccttttcgttaagcagcctcacaataatcttatgatcattagtgtgggtctcgagataataaaagccccccatttccatgcttcctcgcaggacatactttgacagaataaaaatacaaaatttttaggggtgttgaacactcccacttcaaaatttggtaaagggatttcaaacaggcaatgaccttttaaaaattcgatgtaagctgagatggagcaatactgaggtagttgcaaaattccttgaaataatccctaaggggaagaacaactccagcccttatgttctcaacactccgcgcaccaattctagtgggctccctagtgctgcggccttcatcttaaactagacgttcaggtgggtaatagctgaattctccctgagccatagatcacatgcaacatccttttttgttcctaatgccatatgaccttagaacatccccaacataaaggttgatggacctgaccctggaattcatcaactcagcctcaaaggtaagagtagggttctgtgggtcttggatttacgagccttttgagacatgatttcaaaatccaagtcacctggtgaaaaagcaacaatgactggtaaaaatattagccttgctaaggggatattaactaaactaggtgattcaaaccatgcaacttctcgcaaataataatgtttactctcaaagacttcttgtaagaatcgcctataatggttagaagcttcctcctggtcagacctaataaggtggtcgctaatttttgcattgttaatttcaagtatggtttgaggttcttgcgtttgaggcttaaaagctatggcgagaaattaaggatagtcttattctaaggattatggaattgtaaattctgggttaaattgggatatgattataaaaaataatgcttcaattcttggaaaaacaaaatccaaaacctacgaatcacataaccttaaattttctagccctattactcaaacattcatatacagttcgtcccaacaacaaaataatgctaacaaaaacatataccaagaaattaagatttaaaacttagaaaagtcaagaaaagagaatgtcacttactggtttgacgaagaattttgggtttcaaagaaatttgcgatgaaaactccaattttagaaaaattgggtcttggtgatcctgaagtcgaggggtgaaattggatgaaatttgaagaaagaatgtgaaagacagtgaggacatataaatttatagaagaggttgattgagagattttcaaagtctgaaggttttgtgggtacaaatagcaaaaataaaggaaaattttgaaatttatacccaaacggtggtaaccgttcgatcaaaagaagaatagtcatagcattaaatgctgaaataatttttctcgaagtcttgatctgccaaaataaaaacatgtaaaatttaaaggggaaaatacaattgtacccttgaaggaatttaaaaagttgttttcgcacttgtaagggacaattattatacctaaattttgactaacaataagaagctgacacgtgtacaaaactgcaatatgaaccagcctaagccgtgattattaaatacacattaaataactcgctcaagaataacaatgaatataaatattcaaactcaatgccgcttaggcaaaagcaagatgtgaataataactattaataggtaagactagcgagacaacaagtctattttgggataaatagaatacacaatgaaatttgttcaaaatatgtaaccaaagagcttgcaactgattggcccacatacttgtgagtaagatcttgcagctcattgatccacatactcgtgagtatgcttaaggagtggaaacaacttcaacatttactcaccttgcttttgacgtatggaagtaaccgcctcactaatatctatcaaacaaccaaaggagaactgcgagatgcattgtatcttaacacttaatattttccctacaaaggcggttgaaaaagatgtcatgcaactggcgagtgcaatctaataaaatcatcataattgttaacagatttagagaaagaatggttgaacggttatttaagattatcttatgtgcacaaagataaagcgtggggaatgtccatgttttatgaacgattactaataatgagtagatcccaagggaataactgtcatcccatacatctataaatagggacagaatccatggtaaaaatgacggccaattttagagagaaaagaaagatactattgctaaattacaccattatattttgtattcaaagatatttatccgtaataagatggactcgcaaactatgaagagttaaactttaaaatcacgttaaaatctccttgttatttattctttatttaataattaattgccatataataaattatatatttattacataaaggctaatattttagctaaaaaaaaatctgcgttaacactaatgtattcataatttttgattgattgtgctagagagccaaatctctattttcttataccatgttttattcatggtactcgaactcatactagtttcgtgtcgtgacgtgccaaaaattgtgacctaaatatacagctatgtcttgacctctttatcaatcactttattttattttttttataataaaatgagtgcattgcattggataaggtaattctgtattatacttctaaaaatttgttttgatacatctttatctattttggcatcaggagaaatttttttttgtcttttcaaaatcatgtacgttgtagttataatttatgatcacttgcaaattctcattaaatttcttatatgtgtgtaataataaattaaactttatttttatcactgtaattttttaaaaatatataagtaatcttaaaaaaactacagcatacgaaattttaaaaaaatattagctaaaagtaattttcacaatacctaaacagataaaaattatacaaatggaaaccacaatttaggaggatttgctatatatattttcatcattatatataatttttttaaggataacatacaccctgataatacgagaattgttattaattatcaaaagtgtctaatacctctaagacgtgtcacattataat

SEQ ID NO: 226234 - DNA, 4086 bp, Cannabis indica
aggacactttttcgaaaataagattggaaggcactgggtccagtttaaggcctcctggaagtttcaatttctccctgaaaatagttgaatcttaatctttgatgaaaacaaagaatatgcccaaaataattttgagaaaaactcctcaaaatcgtccaaggttgacaaaatgtcaccctaggccctaggccagctccaggtgttaacttgggctttggtctcttgttttggccctcaagttggtctatttcttccaaaagtacttgtttccccgttttgttatgaaaaagaagaagactcatgagtcaggtttttttcctaattcttgcaagtggtccagattggaaaattttcaacctgggcagtgggcactcgagcactaggtgcttcggctgtaaaaaaatgaaagttttacgaatctgattctaatgtctcaaatatgtcttttgtatgtctagctcatgtcccaatgcaaagtttaacccattttcactaagttagtcccagaaagggtgtgttgtagggtcttgaatgcgaaatacttaaaaggtagaccgtttctgaatttctcttttaacaacttcgactcctagttttggaagaaggtagtaaaatcaaaggacctaatcaaaaagggttcctgcaagctcatttttgatgggaatgataccgacatttgggacgatccatgggtgattcatggccagaatttctatcccaacccaaatgacggtcgtctggagggttagaaaagagttgcggaccttcttactgaggttgggaattgggatgctgaaaagctcaatttcttgtttgaccaagtgacaaccaagaatattcttaaagggggtaggcgggggccaaggcaaggaaaaatggatttggacaaaagattcaactggtcggttttctacgaaatctacctatcttgctcaggccttgtctcgtgccctgcctaccatagtggcgcccaccctttggaacaaactttggaattctagggtcttggagtgccataacgttttgtggtggagtatcctctctaatgctctacccatcaggaatgctctagctagaagaatgcacattgatgaggtgtctttccctctttacggagatgaagatgaaactataaaacatctattcctttattgtaatttttctgctcacttttggaggtcatccacttggggtgtgatgccagtgctggagttggggggccaaatgtgggattggattaaattcttatggaggctaaaggacaaaggagtggaggtcaatgagatcttcctgtatgcttcaatagtagtcgatacgattttgaaaacccagaatgataagatacataccactaattaaaattgtaacattaaaaagtgtattgacgatatttcttcatgttatgcagattacaacctctatttgctttcttcgccaatgattttttccttcatctgtgtataaacctagtaacatgataggatccatctaaatcagtttgtgcctatgcctatatgtttgctttgggcttggatgcatatagggagcccatttaattattataattaaaatagactaggttgctaaaataaaattattactttttgatagattttatttaggtccaattagtattggaattattcaatgaataacatttgtttaattaaggttaaatttcgctcctttggaccttgtgtgagagtaagggggccattagtagtgggtacgacatactgaacccagccctccctcacatgaacaaccccaattgtgaaggcccatttgccttatttgaataatttagtaggttaattacattagtttaacctaataaaattaattagcaacataaataatttcggaatacatgaaaaaaaaaacaattcacacttagtttaatgaaacttattcaatataaactagatgtatttttctgtatttaattaaataaaaacttataacaaattagaatttttcgaaatacttaattatttgaattttcaaagaatatatatttaagttgaaaatcaattatttaaactcattttggatcaacttaaatttgaatattttgaaattaatgattaagtggaattttctaagaaattagatattcaaatattctttaaaaatatttttaagttgaaaattagttaattttagatcaacttaaatagggattattttttctaattaaggtgattagtttaagatacttaatttgttatttaattaaaatttgaaaaattatttaaattgaaaattttattttagaacagcttaaattagatattttttaggaatttattttattatactttaatataattttgaaactttatatttatttataactagattttcgaaattattgttgggaatttaaattaaatttgaaaattaattttaattaattttggaccaacttaaattaagtaattttcattattaaaatatatagattaaaataaatgattagttaaaaatacatcatttttaatcaaagagatatttgatcaccattgttggtcttacaatggtttcttattttcaatataacctcgagacgctagacctcgacccccttatggatagttattcgttgaaagcacttaacactgtaagatctcgtatgataagtattttgtaagttttcgtttctattagactctccccgacgacgactacttagaaataaacttacaaagtatgaaacaatggtggaagcccataaaatgagaataaacttcactctcgcctaccgggacaacgctggattcttattttgatcgaataaaaagctccaaaaatggtgtccatattagatgagctgactattctattcaactaaagttatctttgactctcgcctaccatgacactgtatttcattatgttgaaaaccttggaaaataattaatatgctttattttggtatttttgcaaacatatttgcgttacttgttattttctgaacttgtgtatgaatttaattgaaccaataatttatttctgtttattgatatttatagtgtcaaaatataaaacccacaacccaatcctcatctagattatgcctttaggaattaactccaaagtgtgaagatgactcctggtcagagtatcacttcacacttgctcatggtgaacattccattccgaaaagcatctgtgctgggaattattttatctggagaccaaagagttcaatttgttctcaacagcttatcacctgagtttaaccaatttgtaattaacaattggaactcatctgacatagacaagcaagacgctgaattgcgtgcttatgaacggacattgtcacttgcatggaagtccttctccactaatgtagataagggcaaaaagaaagctgaagatattgagaatgattcctcggacaatcctactacttcaagctcagttgagaaaaatagagaaagtgattccacttcctcagattatctttcacaacaaattgaaccagcaataagaacaatccaagaacagttaagcagacatattattcaatgttctaattatgaacagaagggacattttaaaccaaattgtcccagacttctcaacactaagaacaatggtaatgctttacttcttgaatcatgtattttagagaatgacaaatccatctggattgttgattctggatctactaaccatgtgtaacaccctaactattttaggcatgttaacgtgattgttaacttactgtgcagctcgttgctaatcaatgaggttattgaaaatcgtgattaattaaaattttgcttaattaattaaaaacataaaatagcatagatatataattccaggatcccatttacaaaagcatttacaaatgtttcaatgtacatacataaaattttgtcgcctagtgactatacaaaataagtcttgatgtcccaaagaccgtacgctccaggcctaactgccctaacatgtacaatccccatctgctcgctctcacggctgctcagccttagccttgcccttacctacacatggaaatagaactctgagtcaacagacttagtaagaaaagcataacataaaacataataa

SEQ ID NO: 226235 - DNA, 4016 bp, Cannabis indica
ttttcaataaaaaaaaaaactaattaaaaaaatgttaccaaacgcagggccggccctgaaaatatatgggcccaagacgaattaaattttatggcccttaaaaatatattgaaaaaatataaaaaaagagtgctatggaatttgaacccatgactttagacattatgtcatccacctcaaccaactaagctatagatatttgttacttataatacacttaaattttacttaaataaaagcctaataattttttctatttttttattttgggcccccggaaagtgtgggccctaggcacgggcttagcccacctatacctagggcaaacgccaccttaattagttgtatgcctaacaattaagatattgttattatatattattaatagatgttcaaatcaccaaattaattattattataaatacttgattgtatttctctttattatattgatttagtttctcattcttttagtcttattcttgtataaataggtattcaccctatgagattcgaacccataacattgtataatatgtgatacaccttaaccaactaagctatgaatatttattatttacaatatactagattttacttaaataaatttataaattttttaataaattttttttattatttattttgggtctccgaaaggtgtgggctctaggcacgagcctagcccatctatgcctagggtcggccctgcacccatcgaatagctaaataagtgctagattgtctagcctaaatgttggtgttttccaaaaagaaggaatagctcccttgattcccatttattcttcctaattttatgaagtgttccttgaaaaaaaaaaaacttgtgtttagaagtaactgtgtaattactatagtttaattattagaatagtaattacattatatcttaaaatacaacgtgtgtttagacattaatttactagtaattatttatgaattcttaattttttatttagctaaatagttagtgattagaccaaaaaataataattttagtacatattatccaaaataaaaagttttaagtaattacacgaggattagaaggtgcaattgaggtctctcaattacacaattatagtataattacgtggtcagacaaacacacaaaattatataattactttcaattatccgcaattccaatactcccttcactttccaaacacactcttagtaatgtcaccattaaattgtgtcgttacgcttttcagttaataaatttcagtcatgactcatgagtagcaagtgaacttacttagccttacaaaacgacgtcgttatgtaactatcaaagacaaaaacgacgtcgtgtgacaatgagaaaaaaaaaatggttgtggcaagcggattagctactcgtatatatcagagccaggtttcgatcctgggacctgtgggttatgggcccaccacgcttccgctgcgccactctgatttgtagttctaacattcatcattagttataaaacaaaaaacttaaaaagtgagttaaattttcaaaaagtaataatctacttctttttaatgaagaaggattaattaattaattaaataaacaaacatgcttaacaataattatttgttttattacatttaaaacatgatttcccatatttaacagttccctcccaagtgtttttacctttttcatggaaataattacttttgaagtacttaataataacctaataaaaggtacttcaaatgaataatcttcaagctagaggaatgttttaacagttggataaatgtatatgacatagtgtctcaaatttaatcttcacaatttcaatttgttaactcttatatgtatatacttaaatattagagaagaggatggaaataacttttattgcttctactagtacagcccaaactctttatatagagttattaactctccacttgcactaagaaataggatcactaattatccaacatgtaaacatgcatcttctagaaaatagcaactaaccaaaccactacttacatagtcatctaattacacgtattaacaaaaaaaaaacataataaagataatttttccaacattctttctcttaagctaatgtgtttataaacactcaattgacattctcttaaacttaatcttccaaagcacatactcctagcatcttttttagcttttgaattatataccaaaaactataaataagttcaataacgccttctacagtgtgcttccttaagtaatgatacttcacatcaatatacttgcttataccaagaagaattagattgttagaaagtttaattgttgagctattatcacaataaattatggtggttcggccacttgcttgaagtgtaactcttcaagaatctttctcagccaaacagcttgacaggcactagttgttgcagctacaaactctactagtctttgataaagtgacaattacttgcttctttgaaaatcataaaattgctcctgatcccatcataaaaatataacaagatatgcttcttttatcatccaaatctcctgcataatcactgtaagtaaaaccaactaaatctactttttctcctttttagtagaagagcccgaaatcagttgtgttgcgcaagtacctaagaattctatttgcaacaagaagatgtatctcccttggatattctatatacctgctaatatctgtgcattatatatggccttgttgttgtcaagtacatcaaacttctaactatttgcttatatagagtgttgtcaaccttcttttcttctggatctttgataagcttcaaaccaactttaaatggagtgcccacaggattgtaattcttcatttggaacatgtctaaaaaaattctttcgagaacgaaaaataccatcattagtttgcacctcttctattctaagaaaatagtgcattaatccaagatcaatcatttcaaattcaagcatcatagatcgtttaaattttttaatcatgacactatcatttccagtataaattatatcatccacatataagtaaataatgagcattttacctccatttgaaaatttgatgaaaagtgtgtgcgatcatatggacatttatgaaaaccttcctttaaaaaataagtttcaatacgactataccaaacccatggaggttgttttagtccataaagagccttttttaatttatacactttatgctcatttccaatcttaacatagccatgaggctgataaataaatacatgttcctctaggtctccatgtaagaacgatgattttacatccaattggaagataggccatgagttatgtgcagccaatgtaatgaccaatctaattgcatcatgtctcgctactcgagcgaaaaatcctttgtagtccacaccaaactcttgcttatatcctttagccaccaattgcgctttttgcttgttgacttcaccattttccttcagtttcgtcttgtacacccacttaacaccaatagtcttttgccctttcggaagcatcatcaactcccaagtatattttctttctatggctgaaatttcagcatccatcgcctttctccacttttattctttagtagcttcttcataagctacttcatcacaatctgaaaataaacaaaaatgtgtgagtagatcctcttcagaatcattagaaccagataccccataatccatcatccatgcaggtctttttctctctagttgaggcctttgttcatgggtgcttcattagcaggtggactttgagtgattattgttgttggttgttggattgtctctataggtggccactactgtcttttctcttaatcaccatcaaaatctactgaatttgttgctgaacaatgttctccttccatgcccagattctttcttcatcaaaactttggtgttaggattgtataatttgtaggcttttgattgatcactaacaccgagaaaaatggatttttctcctttgtcatctagcttcttcctattctcatctggaatgtgggcataagcaa

SEQ ID NO: 226236 - DNA, 1574 bp, Cannabis indica
gaagcggggacgttacagatttctttttttattttctcatattttctcaaattgtataaaataattatgttgttacctatttaacaagatttttagaaattaaattgagttaaaataagattgagctaaagaaattgtgtttaagaaataaataagatgagattttttacacgtttggggcgttaaaaaactttagtccacaagtcaatattattaagctcttgactatggagtattttactattttttctcttacaagaatgactcgccaaaattcgtaatccttttgcataaagagataaggccttatttataggcattttgacttatggatcagactgatccggacccatcagggtctaaaaactagaaaaagaccactaatgggaaaaattacatttaaatattgacctttagaccggttaggtaaggcccaatgtgttggtaaccatcatccatacgcggatgtactagttaacattgacagttgttaacgcagattttcgttaaccaaatttaagtctaatagtgataatctcacacagaaaaatgaaagcagtaaagtaagaagcatgaacacaagagattttttacttggttttgtagttaaaattctgcatagtccacgagtcaatcttattaaatttctgatagttttttcagggcctcttttttcgtatgattttttcgtcccttttttgatctaacttgccactatttataattacatagtaggcagttaattacagagttgactgtaatctttacaacgtttatcccttgaaatcgtgggatttgattacatatctcccagcataaatgcggttattatttaaatatcacacagctatgctttttccgctttaactgaggcaaagatgatcgtgtgtttaaacacgtctttaattgtaacatcgtaagatgtttcgacaaaaactcagttctaatgaccttgatagagagctagagccttttcccttatcttttcgaggtcgacaaatgtacgccttattgcttctttgtttgaaagcttaacgcttcattgtggcaatcacagttcttattaacaaagattttctcagtagtcatttaaatgtcagcatttgactcgtcaagattataagtctaactgaaagatgtctgtagttaactggtaaaattaacaggaatgcgccctcctatagtgagatatgcgcctcgcttattaggtctcgagtccacccgactgttacactttgtacattatttgctaagtgttttcacactcgatatgcgtcgcttttgtcttcccaggtgaaacgaagtcgatgtctcgctttatgcatcaaatggcgtatggtttctcgttaatacacgaaacaacagtgtgcatatcttttcctcgcataagaccttatggtcaacgagttgcaagtacactctgtcacttacgcaattaataagttattgaaagtgattccattgatccatattctatttatcttgatacgtgtcctccattgaaatggtagccaaatttcagggaaaacaatttccccttaaaaagttcttttttaataaaaagtgcttttaat

SEQ ID NO: 226237 - DNA, 5010 bp, Cannabis indica
tgatttagacccgagacccaggaccaaagacccgaggcttggacctgacccacagtcgctgtctaaatttggcaattggacttggacccggacccagacccagaccagaactggaacccgtacctgaactcaaactagactcgacatgttgttggtgtctggatatgggaccaagactcggacctaaaccaaaataagaacctagacccagaccaggactcgaacctagacccacacccgaaccttaaatcttaccctatgacccaaaatttgaactggaactagaagcaggcccttaaaccctaaaccctaaacattaaacccttaatcctaaactctgtacacttacccgtaaaccctaagccctaaaccctaaaaataaaattcctaaacactaaacccaaaaccctaacctggacatgggcctagacccatacccatactgagatcggaacccgggacccagacccaaacctgaatatagaccaaaacctagaccaagactcatgaccttcacccggatccaaacacagaccataacctggttcgagacccagacccttactgggactcggatcgggaccccgactcggacccgaatagggacctgactcagaccgcgacccgttcctgtactcaaacctgaacccgtactgggacctagactcagacccaaactcaagatccaaacccgaacctgaacttggacctacaccgagacctaggatccagacctagatgggggacctgggccccaaacccgaacctagaccaagacctggataagagacttggacccgaaactgggccttggaacagggactaagacccaaaactcgaccctagactcgagacacaggacccgaccctggacccagaacccaagacctgactacggggacacaaccccaaacacggacccaaacccaaacttaagacccggcgctagacctagggccgaattggaacaagattgagatccaagattgagatccaaatctaaacctgaggctttgacctaacccatagtcagtgtttgaatccatgacccatacccggatccataccaagacttagatccagacccaaactgggatccaaactcgatcccagactcgaaattggaatcgaaccaagcctgggactagaacccagacctgggacggtaacaagacccaaacctaaacccaaactcagaccaaaaccaataccgagacttggacgtagaccgggacgtgtgacttaggacgtaaactaagaccgagaccttgacccaaaccgggacccgaacctagacctagacccaaaccaaaaactggggccggacccaggaccaaaaaaccagactcagaccagggacccgaacctcaaactcgcaataggactgggacccaaactgggaccataacccaaactaggacctttactcagatcgggactggagacccaaacctgaaccggaacacgcacatggacccggaccacgacctaggacttgaacatagattggggacccagacctgggaatggggtccataaactaggacaagaactgtggcctcagaacttcgatcgagatccatgacctgaccccaaaccgaggcccacactcgggaagcaaaatcaaaacttgaactggagcgggactgggatcttggaatatgaccgggacctggactcgaacctaaacccggcaccaggcccaactgcgaaccataacaaagaccgaaacctagacctcaacctcgccctagaaaaaaatcaagacccgaacccagactcggacccaaactcgacctgaacccataccctgtgacttgaaactagaaccaaaaccagaagcggattaggacttaggaacaggaccaggttatgggtccgtaccttaaactataatcggaccaggacccacactcagacaaaaacccaccatgggattgggtcccaaacccgaatccaaacctgaaccgagatgcgggaccagaaccaagacctaaacttagacccgaacatggaacaagactcgggacccagaattgggatcgagacaaagaattgcatggaagtctcggtctcggacctagactgagacccagatcgagacttgggatgtgtatcgaaaccagacggtgacccgtgattgggattcaaatcttgtcctgggatccgggaaccagggcttgcgcaagacccatagtcggtgtcttgatttgggactcagagaaggacccaaagctggaccaggacatggacccaaacccagacctgggacccaaaactcaaacttgaaccagaacgtgaccaggaccctggaacacaacaaggacctgcacctagaccgggacctgaaactaaaccagaacccagcctcagaacttaggctcggacccagtcccatacccagactaggactgagactcgaacctgaacccgaacccgaactcaggacttgatcccaaacccagaccaagcccttacataaactgggagtcagacttggacatggacgcgaaccagacccggactcaaataccgacccataccacgactggcatcgtaacacgggacctggacccagacgtagacaaaaacccaaacttgggacccagatcccggacccaaacctggacacggactcagacatagacccagatcgagatcagaaaaacccatactctgactcgaactaagactcggacgctgacccaacctggacccagacccgaacttggaaccgaactaggacacagaatcagaactagaactgtgactaggacccaaagcttagataagaaccgaatccaaacaataacgcaaacttagactgagaccttgactaggactgggacctgagacctgggacccgaacctggaccgggacccagactgggacctaaacctgacctggtcctaaaccctcctcaggacctgagacccgcaccccagaccaggatccagaccatgacaaggacctgaacctgaatcaagaccaagactgggatcgagacctggacccgaatccagaccgagacctagactaaaaccaagactcaggacccaaacccgaactctaacctagacgaggacctaagaaccagacttggataggggacctagaccagggacataggccccggaaccaagacccaaatttaaattcaagacttgaacccaacataggacttgacctagacctgggaatccgaagtctgacctagacttgcagccgaaacctgccctaaacccatacaaggataggaacttagacacgaacccataccacgaccaaacccgaacctggactcaaacccaaacttgggacctgcacctggatctgaacttaaatccagatcaggatcgaaacccaagacttagaccctaaactaatcccagactcatatcgagatcaaaatctgggactcgaacccaaacctagacaaagacccaggaccctaacccacatccagagctcggtctagacctagaacaagatccggacccaaaccgaccctaactcagaccaggactcaaacgccgacacgaacacgaaccccaacctaaactcgaacaaaaacatgagctcagaatcgcaattggaacttgaagcagactaggactacgacaaggacaaagacaaggaccaggactgagacacgaacccaaacccaaataaaaacccagaccgagacccaaatgcaaaccgcgactaggacccaaacttcaacctagaccaggacccaatcctagaccaaaactaggacctagacccataattgagatagggaccagggcaacgaaacaaggaccgggacacaacacccgacccaagacctagacttgggattaggacctgcgcaaaggaactaggagtgggacccaagacttgaccccagacccggacttgaaaccctctgacctggcaccaaaaatggaacaagaccagcactcgagatcaaggttcggatcaggacccggggcttggaccgaacccgtagtcggtgtctggatctgggacccagccccaaacccgaacccagaccaagatgcaaactcggacccggacctgaactcaatcccaaacccaaaccttgatcgaaagccataccttgtgacctgaaattggaacaaaaatcagaagtagaccgagactcggcaacgggaccggaaccaggacttggacctgaacctagacccgaaactgtaaccagaccaggacctagtttcccacccagacctagatctgaaccgggacccaaacctgaatcctaatcaagacctagactcggtgccgaaacttgacccaaactcagacccaaacatggaaccagacttgggacacagaattggggccgagacttagaagtgccccctagtcacggtcccgaacccaaacttagacatgggacccaagacctgaaccaaaaccccaacaagaccgagacacgtgatagggatctagatctgggactcaaaccaggacccagacccagactaagaccaaaactcggaccctaacccagactcgagacttgaaactagaacttgaataagaacttccagacgaggatactcgaacaagactaggaccgtgatcaggacccaaacctagaccttgaaccacactcagacctagcaccagaaccagaactctagcccatgcacagtcatatacacagaccgagaccaagacccggacccaaacctggacccagacctaaacccaggacccgatcaaagacccagactcggacctagatagggatcccgatacgaacctggactcgaacccagactaggacccacatcgggatcaaaacttgggacctagatctgaacccaaagtctgaccctgacccagacttggacccacatccaggatgtgaactcaaacctggacccgaacgcagacccagaccagaatctgaacctggacccaaacacggacccagactcggaccaggacttcgaccaaaacccaaacccgaaacataacccgaacccagacactga

SEQ ID NO: 226238 - DNA, 1571 bp, Cannabis indica
gaaacagtggctacaattcaagtttgaaaaggtgggtattttctgttataactatggtgtgcttggtcaccaacacaaaggatgcaatttaaccacacctgttatgatcgtggacaaggaagacaaatattttcccatgtttggaccttggctatcaccatcctctgcttatgctgatgttttctctggtcctaagatgaacgatgttcgtggtttgttggccacaaatccagaaatgaagctgcgtgtttttactccagtgaaggcaatcgacggttctggtggcgaccgattgaaaggtcctgggattctctctactcgtcttcctagacgctagctgatggtgaccacgcgtgcccttggttcgatgagctttgcgatggcttcgaaggcggtgtggctccctaagcccctatctgtcctccctgttcaagtagaggctccaactggtattggaggcgaagtaggtcagcaaggaggagaaaagagttttgaaagtttacctattttagcgagagagggacatgtcattgcctcgattttggagaaggataaaaatttgaatttgttagataatggtggatgtgatttgggtcaagatttggttgtttgtgggtcgtttatcctagtgggcctgtgaatggctccatttctgttatgaagcccgatgcctttaataatgacaaaagtttttttttttattgtgaaaatgagggcccacttcagctaaataatgcaattattttgagtggcataggtgataaggcccagtctactctcgggcaaggagggtcaaagctagtagagggtaatattttgggctcgacttgtgggcctggagccgagccaagtaatgttgaagaaaggactttgtctcaattttttaaagcccaagaaatattacttcatgatctgaaacattttgggaagttggattcgtatgagataaagtagttgggaagtgacattggagtggtgcctacttcggaaaccaatgagagaactacgccgtttaagaagcgtaaatttgaaggctctgcttcgatgtgctctagacctcacaaagtgctcagaaagcaccctgatgttgttcgtgacttcccgtgggatactaaggtacgagacattgaagctaaggtggcctatgaagaaccatctgatgaaattttttgttccccaagttgctctgatggaattatgaggaactctctggttggttcttttgtgattgaagaatctagatccagcttgtctgttcactctcatacccctgtggaggagaatgtcatatctcctccacaaaagccatgagaggggttgcttggaactgtagagggttaaggcagacctctacagttcgagaactgaagtccctgattagagcgcgctctcccgattttgtgtttctgactgaacgtaaagtggatgccactcccctagtacgtatactaaaatctctccatttttattttaatgttaatgttccacctattggcactgctgggggtattattttggcgtggaaatttggatttaattttgagcgtatctcttgttctcgtaaccatatc

SEQ ID NO: 226239 - DNA, 2717 bp, Cannabis indica
gtgcaaaataagagttattaatcgtcttgataaaattgaagatccacctactgtctctcgcactcttacaatttttaaacctcttgatcgtaacattcatgaaaaagctaagttgtacatacttcaaaattctccaaaaatacaagcttatttaaagtaagtttgttacctctcaaacataaactttcttaaattttaagtttttcttctctctttctctctatcgtaccttgacattatcacatttaacagtgaacatttggagaagattagacaagaatatcctaatggtaaccacaatgtttgcatagaaaaactcttcgtctgtggtttcataagaaggtacaatgagagtattttaaagttataatttgataatatatattcctatcatattaatacattttatgtatttagatgtatgagttgcacaagcttggatctttacaaaatagtgatgaattgattgctttaagatccagctcagattatttagtaaccttctataaaggttgtatagtgaacggtgtttgatttattgcgaccgaaagagatgaaaagcgaaagacacaaaatagtagagttagtgttgctagaactggggtttaattattacgatacacttgaagatgtaataatcatatcttatattggggcatatacagtgacattatttgaatacaagtagtataacactaatcctataagaaataaaacaatcactgaaaataatataatgagtataaatttatcgggattttggtatcaagatgagccgtacatacttgctaaccaagctaagcaagctttctatcttcaagatactatcgacaaatttggaacattgatgataacgaaggctagacagatgttgatgttgtaaatgatttgaactcatcaaattttgtgttgatggttgatcttggagagttgattttgcaatcggatgaactagctgtaactgttgaaccgaacaaccactcagtagatcctaagagggaaaataataaacttgatgaagattacgttgcccaaaaaaattattatttactagttgaacttgttaagaatgaaaacgagaattttgtgaatgatggaaatgatagtgatttctcattctagctttaattttacttttgtttgtaaaaaaactctaatgattgaataccaatatgtttttggttcgtatttttgtttgtgtcaactttgatttatatgttttacattttgtggatttttacatttttatattgttcacctctaacgtaaagtacaatgtcagctgatatagcaacgtaccacagtggggatggtggtggtatggaccccctgatccttctagagtaccgtcgtcctgccaatcaagttttatatttttcattactaaccttattcttaacataaatacatgattattttttgatgtactaatagaataattttttccttgaacaaataaagtcaaaccaagggtcagaaagagtcgtggccttgcttcaaaactgaacttgaaaaatgaaggagggaagttagtaaaccattagaggctgaggtggacctcagaacaggcaaagtaggttggattgaagccaacacatacatttgatttatggcacagcaagtatccattttgtgtccaagtcatcattataattttttcgatgtacctcaacaatataaggataaagtacttaatcaaataagagtgagtgatttttaattatttatggtttaaattattctataacgtcatttaaaaattaatataaatttttaattgctttattctacagctttactttaatatggacaggaacccccatcaagacctactaatggggactctatatacggagatggcaaagaggtatagtgagcgaaagaccaacagacataagtggtttaagcaacattacactaaaccgaaagattgggagaaagtttttgaatttcctcctgaccacttaaataaggaaagttggaagcctatttgctaactattcctcagcaattttttttttttgaaaagctcaagaaaaaacaaagcaaataagtagctgatgaaatatccaatgacgtaaggcacaagatcgttggtttctatacgttacaactttgtaagtaataatatttatcctttattttaaatataattaatcttaaaatacattataaattattttatttgtttattcttatatacggagtcctcccaaagagcatgaggttaatgcataaagggtggctcatacgaaacaaccgcctggtggttttgttaatgaagttgttgtagaagattatgtaagtgaataaaatattatattattaaaatttaaattttatattaattataagctctaataatttttaattaaataggatgcattgtgtaaggagcttgataggaaacgactcgaaagacaatcacagagtaatacatctggtactgaatctgatactagttatcaatttgacgtacatggaaaagttcatggcaaaagatctgactatcaaagaggtgtgggttataggtttaaaggcaaaggaaaaaatcacacagtcaaagtcggtcaactgcgcctctctgccccctaatgaaatgtttaacactgtggaagatatgtttacaactatacgtgatacattagggagtagtctgacccctgcacaacgtgccaatttatataactcacagtttgaaagctttattcaaatgt

SEQ ID NO: 226240 - DNA, 1155 bp, Cannabis indica
gacagttaaatatgttaggtgtttcttagcttcatttttctaggttaacagctttaaaaatcgaagctttaagaatcaaactgaacaataatataaaaaaacaaatccccttcttcttcttcttcttctggtttataaacataattattgtagaaataaccaaatggggtggagcaaaaatgtcataagattggattaaaagaccaattttgatacaaaatgaatggtaacaaagattatgaatacttgaattgaaaccgtagaaggacagtggcaaagataagtaaagctcaaaaaacaaaaatggcataaagataaaagtatatgattcagaagagtacataaatttcagggagagaagtaaagaatcaaactttgaagactggcttaccttgtcaacctccattgaaattgaatcccacagagagatatagaaaagaaagatttaggcggcaacagtgggaactagagacaagtgcagtgcaggagtccaggttttcttacttttcttttttgtaactaaattctttgaggaatcatttacaaaaaaaaaaaaaatctttgaggaaaaatgtttagggtagcattttcttagatatcaatattgttatattggtataattaattattgaattttatatagtttaatacaataattttgacagaatattgctacctaatggcaagacgacaaatttagaagtactagtactattaatattcaataacaatgctaaatatttggttttactctgctaacaatacccaatcataagaccacatatctaaaagtattagcactattaatattcaaaacaatgctaaatatttgattttactctgataacaatactcaatcataagacgacacatctaaaaatactagcactattaatattcaataacaatgctaaatatttaattttactacaataaatactaataaattcaatttttgataaatactaaatatttttaaaattttgataagtacatgatcacattaaatgttaattggtattattttttttattggtatatttaaagtaaattttaaataaaaaaataaaaatttaatgatctagattaattagggactgtcacgtgattattgacttgacatattacagttaagtttaaaaaatataacttaag

SEQ ID NO: 226241 - DNA, 2050 bp, Cannabis indica
aagtcgaatggtgctatagtttcaggtggtaacagagtggtcgatatccttactatggggattgggatattcagaaattaaattacctctttgacaaagaatatgtttcgaccatcttgaaagagggtagaccctccggttaaggtaaggataggtagattcggaccaaggagagtattgggcatttctcgtgtaaattggcttatctcattcaagctttagaaatggctcctcattatgaagttgcaccatctttctagaataaactgtgaaatagtatcatattggaatgccataagatactgtggtggtgtatcctctctaaggccctcccagttcgtgttattctttctaagagactccatttagaggatgtgacctaccccttgtgtggggtggtgagaaaacgttggagcacttatttctcacttgtgattggacttttcatttgtagcgttcttcccagtggggttgtttcctatttttgggtttggcattcgcttgtgggactggatcaaattcatctaaggactaggaaaacaaggcattaatacagatgaattattatttctatatgcttcgattgttgttgatacaatttggcagactcggaatgacaaggtacacaatagaagtctggctaatgttaatcagtctattgactatattcattactcttatgcagattacagtgcttgttttttccctactccttcttcgtatctggtagttggatggatatcttcaaatccgtaaatctgtctatattgagtaagaagtgtatataagaagcagatcttttatttaagccattcaaaatatctttcttgatatagaaatatcaaatataaaataaaatacatatggaaataaattgcgtccaataggatttgaacctctactaaaggggattgggaaggaccgtagagttggcaagctctcttccttatggcctcttctgctttctcctttgttgaggatgttcgacttcagtcggttttccaaagtggaaaggcaccctccctctagagtgggttaggcttaactgtgatgttaaagtggggatgaaaagcatgtgcattgcagttgtggctagaaaccaccttggagtggtgtgcggggtcatacaactagattagagttctctgatactttttgtggagaagcggcagcctactgcttcgctttggaagttgctaaagatgaaagctgtaattttattataatagagagtaattttagggtggttatcaattcgctcaacaatctagaatttcgttgggagattgaaaactgtgctaatttttataatagactctctcgatttttcgcttgttgtaatttttttttgttagcagaacttataactttatggcccattatgtggataagtgggcttttacccacaattagtatggtctaatttcatctatgcatgtttatttcaaaagaaaaaggtaaatattaaattcctactttcattttaatttacaattatagacacgattcaataatattatatatggtaagattaatataaattcctttttatttttacctttaaaatatttttttttttatctttacagaattccacatagaaacttctattgcaactaacggagcaacctaaattataatcaaaatctgtatagcaacccatatagaaaccaattgagaaacaacctgagaaacccaaaccgtaaatttttaaaagaaaaagttaaaaaaaataatatatggggtaattttcctataaataaataaggctatacataaatttttgtaaatcgccgaattcaaatacttcgtccaaaataaattaaaaaaaaatcaataaaaactagaaatataaaaatccaacaacctaatctatatatggagcgaattgaaaataaagcttccatccaatgaacccgaactaatctattagacatgttatttttttttatttttttttttgttctttatttaggcaagttgcacttaaattttttgtaactcactattcatatatatttttttttttgacaaagtgattaaaatcact

SEQ ID NO: 226242 - DNA, 2194 bp, Cannabis indica
agcctgagtgctatggggtgttctgcctcacttatgatctcaaagctgtcagttttttatcttcacttcatcaaacttgatcactgggtttactatctttattgttattgctattgttgctgttgttggtagtatttggttccataatttctcggagtttgtcggttggcatggctttaaaatttgtctgtcatatgtttgtccatatgtgtagcagagtttccttagtgtttcttttctttttttctttttttcttttttctcaagtgttccaactgttaattcgtatgtcaatatttttgttgagtttttcaaattctgatataacataagcctaataaaatcttgatgagtttgtttatgggtggaagacaggataggccaaactgccttatgcttatctattctgctacaatttcgggtggcttctgataattgtaaaggcttattgtttttacgtatttcaaatttctcaggaagaagagacgaaatcatggaagaaactaattaatgttgcagtctcaggagctgctgggatgatatcaaatcatctacttttcaaagtaagtgtgcctagatcacattggaagtgattcttctttataaataatgttctgttatatttttgcttttggaccacaaccaagtttgttttgttttggaattccaccaagttatttgttatattttttaaaatgttttgtcatgtcattgtcagcttgcagctggggaggtttttggtccagaccaacccattgcattgaaattactgggatctgagaggtctattcaagctcttgaaggtctgtttcttaaaagattttgttttgaaaagattttgctattaacatgctgcataaaatcaagatttgttctatctctgatgtatgatttgttaaaaaatgtatcaataatatggagattaccacatgagttaccagacgaaaacttattcaagtaaaatacagttcaacattttgtgtgcatgactttcaagactaaaattaaactaattttctttaataaaatcagagtgggctggaatctaaaggtttagcttggttctaattgatgaaacaattttctgtgcaggagttgccatggaattggaggactccttgtttcccctgttgagagaggtcagcataggcattgatccatatgaggtatttcaagatgcagaatgggctcttttaattggagcaaagcctcgaggacctggactggaacgagcagacttgttagacataaacggacagatcttcgcagaacaggtttccatcatgatgttaactattagtccattttcatacacaataataagttttaacttcttatgtatttcttctatcttcaacatcatagggaaaagctctcaatgctgttgcatctcgaaatgtcaaagttatagtggttggcaatccctgtaataccaagtaaggaattccttcacgaggaagtgatcaataaagtaaaaggaattcattgtaatgcttgttactgatattactgttttcttttttcatgtagtactctaatttgtttgaaaaacgctccagacatacctgcaaagaatttccatgctttaacacggttagatgaaaacagagcaaaatgtcaggtagaaaagaaatattttatgggcatcatcacacttatcaattatatttagatttaactattggaggcttgaaatgatggttataatttatgcagcttgcccttaaagcaggagttttctatgataaagtgtctaatatgacaatttggggaaaccactcaactactcaggtaatataaagaatttggtctgttaggaagtgaaggctttgggtagatagagctgtggctgaggttacttgtaatttctaccaggttcctgatttcttaaatgctagaatagatggggtacctgtcaaagaggtcatcaaggatcacaagtggttagagaatgagttcactgaaataattcagaaggtaagaactttagaacacctaattccatgaaacagaaaatttttctcattaccttacctatatggtctttgtctttaaccactcaaatttattttttttcagtagagtgggtgcttataaaaatgggaagatcatctgcagcatctactgctgtttcaattgttgatgccatgaaatctttggttacaccgacccccgagggtgattggttttctac

SEQ ID NO: 226243 - DNA, 2253 bp, Cannabis indica
tgaaaacaaaattctggtgaatagccctggtgggacaccgcccaatatcgaaagcacatttgaattcagggactatgacgcaagtctcttgcccaccaatggaaattccctcaatcgaatagccttccaaatccatcccctttcgaaggacctgcgacctagcaatccggtactcgtcatcttcgatggctcggccgatggctggcaaaaagccgggctctttgagggcgttcaccaccggactcggacgggtgagaagtggaagtctgcaagtctttgatggtgcagctgaaatgggttggtggggtgagaatagcagaggaactttggatggtgaaagggtcagagagatatgcatttttggatgactgagaggaacacatataagagataatgaatgggggttttagagaggtttttcagctttttttttttttcctcttttctcttttgggagggataatgcaagaaaaataaatgaacaatagaaaaacttcttatttatttatgctagtagttttgccctccaaaccaaactataaatttgttataaatgttccttaaattatttgtagcattataaattaatcattttgtcaaattttgtcatgactgcttagtcaattatcacattcacactattgtaaattgtactactttactcctacattttatttaaattagttagaatgtttattggatccatccacacaattttgttttcgcgattgagaataacgaatgaaaattttcaattccactcattactttttttcaaacccaaaatcccggaatttcaattccactcattactttttttctacaattgagaacatggcttcttagtccatttaagaatcatggggttccatctcaaaatcaattggcaatggaaggagtagcttatttatcttatatatcacaatttatttccacacattagcaatgtgggactaactcttaatacaccctcttcacgtttgggcctggaaagtgtgggtataacgaacgacctttaagagaccacaggaccgaacgtgacatttgaaagaatcccacaaggccaaatatcagaaaatttgtgggtgtacacgtcgagaaatttgtggatttgaaactgctcaaagaccccaacactggaaattggcacacattggccgaaaggtcccaaatggaggttataggggagacagcggaagtatcaacggatcacaagtggctctgataccatgttaggaatcatggggttccatctcaaaaccaattggcaatgggaggagtagcccattcatcttatatatcacaatttatttccacacattagcaatgtgggactaactcttaatatccatcaagagcgagtacggtagcacgctcgatgacgaccagcgccatgccaaagccgctgaagccctttcagtcgagaactttcgcgttgcctctggttacaggtttttttttatttattttatttttcgatttgactctggagaaaatgttgttatgaatgtgtcttaggaaacaactaggattattgaatacaagttagtgttgcaaacatggatgggctaagttggaattatctattactttgttaatgagtgcattgaaatatatatagatgtatgattggaactttctacatgtatgaataggcatctgattatgctttggttattctagattgtttaaatacacataggcaattggttttggaatttggtgttttatcatgtgtgaagttttgacaaaccagattctgaagcagaggcatgttaagtcttcagagttattgggattttgcatatgccgatgagttgactaattttcgtgaacatgtccattccggtgaagtttggtacaatatactttaccacagcttttacttctaatgacttcatgctcaaggccttttatcccttgtggatctcaaacctagttcttgtctcaaaaccaaacgatacttgaaggacttgtatcgattttttagacttgaataaggcatgtaatgactgttatacttagacatgggattagtgggtcacttaacactaattaatctcactatgtgattatttatgtatttttgcttaaggatatcatgatttcgtgagagtttgtatattctttgctttatgtttatttaagacatttatgtatttggttattttctgatcagaaataaagttttcagttcattcactctgttttgttgtttaagtctgcctcactttggtttaaggaggaccagtt

SEQ ID NO: 226244 - DNA, 2159 bp, Cannabis indica
gtttctttatccatggcaagaagccaatggcaaaattgagaagcttcagcatagctttggggttcaatttcagagtatgctgcaagaacaacagctctaaattgaggatgtaacttaatatatgaaagaaaaggctcaattggatgtgctgtagatgcagcattgcagacataatctgtgagatgctttggtttttgcaaggtcctgcccaatttagtagtttttaagggcattggagctgctgatggggcaattttttgttgacaacctagtgaagtagcggcagaattaggagctatagtcccaggttgaggagaatttttagaaactggtgcatgagggctgccaggttgtgaagaattgggtgaagttgcttctgttttggaagcattaatttgagatttttttgctggtgcaggggtgaataacctgccaggtttggggcacgggtggatgcttttttctggtgccgaaatgttatgttctggtgcagaaatggtattttctggtgtagaaaatagtgtacctgagccagtgtgatttgtgtttgatgctggtggaaaaccagatgaaggagaggaattagttgctggtatacagccctgatgttgttgttctactggtttgcacgtaggaagaatgacatcaggaaacaagttttgtatattggatggtgaagtttgtgaaaacaaaggaaaaatgttttcatgaaagataacatcccgtgaagtgtaaacttgttttgtttcaatgtcaagtagggtataggctttcatgccatgaggataaccaataaaaatagatgccctactcctaggtgtaaatttatgtctttttgaagtaagagtggagccataggttagacacccgaaacttcacaaatgatcatatttgggaggtgtaccatgtagaacttggtaggatgttaaacctttgaacaatttagagggtgttctattcatgagataggtagccgtttgaactaggtatgaccaataaaccaagggtaaattggattgaaacgctagtgctctgactatatttagaatatgttggtgttttcgttccacaactgaattttgttgtggtctttccacacaagagtggtaattaatgatgccttttgaggcaaaaaatgattgtaatttcaattcttttgcattgtcggagcgaattgctttaatggacaaggagaattgtgtacaaaccatattaaagaaattgggaatgatgctttgaacatcggatttgtttttaagcatgtaaatccaagtgaatcttgatttatcatcaacaatagtaaggaagtatttaaaaccttccacactagggatgtgaaaagggccccaaatatccatatgaaaccaaatcaaatatgttgttagagaaattgtgattggaaataaaaggcgaccttttttgcttggctaaatgacaaatatgacaatgtaattgggaattaatgtgtagagaattgttgtcttgattgaaaaaatttgaaatacacatggatggatgtccaaggcgattatgccattgagttacattgtttttattgaaagaaaaaccagcagtaggaagggaaatggcagctgctgtagtgaagttgtcttgatgaagcaagtacaattgtccacattgtttagctgtcccaatcaccatattcagagaaggatcctgaataatacaacgattttgttgaaacaatattgaattaggagattgaagcatgaaatcggatattgaaaaaagattaagttcaagccgtgggacatagagaacattctgcagtaaaagatgaggatttatttgcacagtcccaatattttcatcaggaatgttttgcccagttggtaaagaaacatatttggggaaaggtatgttagaaaatgatgaaaaacaattgatattgcaacacatgtggtgggttgcaccactatccacaatccaataagttgagagggaattgttacctgctaaattcgaggcagcaggggttgtagcagcaggatcagtggagatgttgttgctgagttgttggctcaacaaggaaatgagatgttgacattgagatgaaagatcagcttgaaccgagctgttatcaatgtcaatctcgggttgtttgtggctgcaatgttggcttttgcttttcctttttc

SEQ ID NO: 226245 - DNA, 4649 bp, Cannabis indica
aacatgtaaagtaaaggtataattaactaataataatttctcaaaaaaaaataacaaataataatatattaaaaatcaaatcgtatacatatacatatgaataaacactatttaaaggcccaaaaatcatataccaactagataaagaatgaactcaggtctgatgaaaaaaaaaataaatttgtttttccgagaagaattgaaaaagaagatcgaatatgatttttgttgtctaaaccctgagaaatcaagtggagtacaatgactaaataaccataaccaaagccaccaaccacacaccgactctcaaaaaaccacaaactcataaactctataataattttttctagaaaaaagtcaaaaaagaaatccagatttgacctgaccctattcacattcaaaacaagctcaacccaatttttatgtcgaccctacgcgcacattgccgtcttcatctcttcttccccaccttttgggtatcgaaacccagatcttgtaacccactcaacccctccactaccaacgatctggacagatgcacggtggtttctcacacaaaaatgtcaagagaagatgagatagatgatcggaaaagaggacgagagggaaggagaattagacgcttttcatatgggcatacgctcgaagagagaacgaccaccattaagtgctcatttgggcatacaacagagagaaaacattgtggtggttctcggcagacgacaatccaccattaacgccgaagaaagactcaccggaggaaagagggagaggagaaagctgaagcgggagtgagagggagaaccaagatctaattgtttgtttttctttattacttatttattcatttaaaatctattttttttaaaaaaaaaagtcatttttatttttctatttattaaataaatattaatatgaggtggactaataatatgctaacatgtgtcaacactattatgtccagtcagcacttaatatactagtagtaacagaagtagaaaaaagtgtaacatttggtatttaatccgtcgaaaaaatagatgtagtatttaagtgtataaaaatcgaaaaacataaagtatttatgtcgcaaatatcccatattaataattagaaaatatatacttaaataataattaattttatgtttaaatttatatagccaataattaatttttgtagttactttttataaattatatagttaagaattatttatattattagataaattctactttataatttaatatatatatataaatatattttttatagttaatttctctattttttttctatctaatttttttgttttgtttgcattttataaataattaatgataaaatttaagaatgacactaaataaattttttttattctaaaaaagaaaaaaaaaacaagtatgtatacttttttttggtttgaagaaagatacatatactttatataaaatatatatgagaatatgtgaaagtatcattatataattatataagtgtataagtaaaatttaaaatttaacaaatttttataaatatttaaacttaaattcagttttttaaattttaatttttttccattttcagttgaaaaatgaaaaacaaattaatatattgttattttatttaataaataatatagaaataaaaaaaacttaattaacgaatatatatataaataaaaatactattaataataacaacaataataattaatatatcttttgatgagaagtatatgataaatttttttcaattttttttcttcaataaattacatatgaaatatgagaatattaaaagtgtcacaacaataataatagatatacatatattatatatatagttatgaaattagaagattatcaataactatctacttgtatttatttaattaatagcgtcgaataactttaattataattaatatttctaacggttagatttttatattctttttatcttttaattaattactgtcattataaaagattcattatattttttaaaaaagaaaagattaattatattattaatagagaaagttagtatgaagaaattaaaagttttattatagaaaaataataattagaaaaattatataaatgtgataatgtgaaaaaacaataaagaaagaaatgaaaagcttatatacagaaaattaattttaaagagtgagttactagggtacagccactgtaccacatacactatgtaccgacattgtacgagtgttggtaggatttgttttgtaccctaagtaccactaagtgatataccacatacaccatgtactttcccgtacttgtgctggtaacaccgtaatgtactctttaaacaatatacattataccaatatactctgtaccatttccgtacaagtgttggtagtgtactaaccataataagcatgcataatatattttacacatatatacattcgcatatatatcatatcacatgttctacgctattcttacctcgtttccgaattcaagtgagttggccgacctgaacggaaaatctcgtgctggatggatgtcctaattacataacataatcgggtaaataacacaccaaaaccctaatctagaaaacccgaacctccaatttaaggttcagctattgataactgaaactaaaataccctaagaaatagggaatcacctaaccaaggctctaaaatggacacgaatcaacgaaaagaatttttcggggaacctgttcacaaccggttaaccgattttacaaatcctggcaatccggttaaccggtttgcaccaggtttcctcaaacaatccaaaacctttccaaaacatgtccaaatctcaccaaattttccaaaacacctatattgacctcccacaacatattccaatcaacagaatccagaaatacacacaaaatcaaagcatgccatggatgaacaactcaaacttctgcatctaccacactaaacatcaaaaacagctgcaagaaccaatttctaacttaaattgaacataaaagacgaattccaactcatacaaaccctaacagcctctatacttcataattgcataatcaagctaaacttcaagttaagaaactaaagaactagggtgttaaagcttacctccacttggaaacacttagattacttgctgaattccaaaaatacaagatggaatctgctggtttccccccttgttttgtggtggtcgaacaaagaaagagaaagagaaatgagttttctctaattttgattttcttttaattttcttatttcttcaaaaatgcataacataatctcaaaattcagcaatagtggggagctgtcaagctctagaaaaaaaggccatctaatccccctcttaaaattactaaaatacccttttagcttaaaactaaagccaacttaagtctaggggtaaaatggtcaaaaattataactccgctcaaacatggtattctatttatttctaattttatcaatatttatcccactaagaaaaaggttctagaattacccatgtgatttaaatggccatccatcgcattttccgtcgtcaccgagcaaaaatcataaaaattgcatatttcatatataatacaaataatacatctagagtttaataaaatctttggaattgagaaattataactctaatgcccatttctaaaaatgtgacctacaattaaataaattcataaacatttatagaattatcataattaacgctaattgcctttattaatccatattctaaaatgcggtcattacacatataaagtaaaagaaaccttaaattggttgcaccggaattaaattactccctccgctcagatctctaacctttattcctttctgttgtagagtattatcaagatataaggccgacactcctttggttgtttggattctttacagtcttacacactatgattgaagactaacttgctatgggtgggtatgcactcaatcactaaggctcgaatttttttgtgaactataggatttcgaattagaagagaaaaaaaaaagaagaagtctcaaactctgtagctgtctgacgagatgaaaactaggttaagagtcattagttggattatgagaccgttcttttctttttatactaattcacttagggttaggattgaattatatggaataaaaaatgataaaataatagcaaaaataggattatagtggccaaccatatgtgggcccaacactagttacatttttgccatttttcttaaccatttatctattatttcacaaataccatattttccaatttcaatcctataaatgtcaaaaactatttatttaataattataattaattatcaaataaaatttcatttatattatttattaattagactccacaaagtctcttaattgacaaataaaccctaaaatcctacttcttcacaatcaagtcatatcttagtgaaaaattataaattagacatagtctaattttagaattataattgattaattaaaatcaattaactaagtcttataagcagtttgtctcaactagtatagggaccatgggcctatataaccgagcttccaataagcagatttagaatttaccaagtaaattctctaaattattaattcctccttgcaccactgtagatttggaatt

SEQ ID NO: 226246 - DNA, 2466 bp, Cannabis indica
actttataatgggcggcaaacctattaatgtatggaacaataagtaaaatgttatataaaaagacaagtgttgttgtaccaaatccattaattagaagccggatttttacatgaatatggtgaataataatgtacaatgtgtcattaataagaatacatattaaacctttttataaattaatagtaacatgtttttactttaagcttgaagttctcagtggatattaactaaatgagcatattaattattccttgagttcaaattataatagttctctgggactgaataagtcaatcagttttgcctaaacaaataggttattattcttattaatgtaatgtttccgatttgcctaactatagccactatgaaattaaaatatttaaatcattaatagagtactaatctatatacaattaacattcttattaattagtctcaaatttcaattaacgcacgtgattcatatgttcacatcagtcacaatatcgggaaaatattttattcgtattgaaagcaaaagttaaataacattcgatatcgatgtgtagttatattttagacgatgagatttgtggcaggtttaattatttgtttgtgacccaatacttaaaaagacgagccttcatttattgtgatttttgggtcaatttattattattctatggagaaagatttttttaaagtaatacaagattaacttctcttctaattataataagtggggcaataaagaaaacgatcctccacattgtataagaaatatataattatatattgtattcagactgaagtatccattcacacaccagcaccattattgtcacaagttggggtcccttcacttgcttgcttcttcctaaatttctagccctttagtttttttttttttttttaataatagtatggaaatagcttgcactaatataatattgtattattattgcaaataataataataataataataataataataataataataccaaacttgcttttggcgcccctaaaactgggggatatattttggaaaaaagggaagcttaagaacatcaattagcaaatacaagtttagaagtcacatatttgtttatcaattatatatagtggcccgtaatgatattattttgagtagacttaattacattgttaatttattacaaatagagtgatgctaattgtaatgaaaagttaggtatataatagggaaagtgtgtatattctatttctaacatatgttggaagtttcttaattaatttagtttaagtcacgaacctataaatacgtaccacaaggcaagagtttaataggctcaatttctaatttctataacatttttgtaggtatagctattgtatttgattgtgcttataattagttctctatcaattaaatattgatgatgtgtataaagtgatatatataattttagcattctttaaagaattagttttctaatagactgtatttaaaattatatttgccaaatttttagaaataagttgagaaatattattttttattacacattaattagatataactacaaaaataattttaattagtaaatacaatattttataatcaaagtattaaatataatctcacacaacttattaaaattaaaattctttaacacacgtaatgacaatataatctataaaactaacttaaaaaataacaaaaaagataaaaattaaaataaaaatgtaaaatggatatacaatacggtactcaagcttaaagtagatatggccttttatacacttttttttttgatgaagtggggggtgttcaggacacccattcaataaaaggcagaaaaagccaagttcaaaaacaacaacagtaaagatacaaccgaaaaacagaacagtaccagctaggataagaccctaaccagacaaaaacagaattaaaaacaacagaacaataaacagcagaaattacaaagagattgcaggtcccgggtcccaatcattgaagtcatccaacacccttacatggatatcttcgatttcaattgtcccagttttttgatgcatcaatgcccattttgcaatattgtgcgccatatagttgcacaatcgagagatgtgcacgatttcccattcctcgaacttggaacagaaatctttaaaccgagtctcagccgcttggattcgaaagtcccctatacaatgagccgaggctgcaaacgaattggccacacactgattatcacaaaggaatagaactcgttgcatacctgaagcccgagccacctcagctgccaaacacacagcattagcttcagcaatgagcggatcagagaataacacctctcgtgtggtaattgagatgatctttccttgatcgttgcggaatacagctgaaagcatgctgccagttgaggagactgcaacatcagtattacaggatacccaagacggtggagggggcgcccaagacacaacttcag

SEQ ID NO: 226247 - DNA, 1393 bp, Cannabis indica
tagtaataaaaatatttttgattattacactatgctccttgatgtcgatccttgttctccatgcactggggtttgttctgccatagctttcacacgaacggacacaccaccggtgttgacagcgctctgataccaagtttgaatacagagagaaaacagaggaaagaaaatagacaatagtaatttgaaagaatcagctcaatgaattcattggataggcattgtatttataaacatgtgtataccgtacaagaataatgacctaataatatttacacagtcacaaggtaatcattacaatcattacaagggaatattctaacaataattggttacaatatgggaccacataattctgttatgccagctcacaacttctagagcagtagggtaaatttcatttcttcactgaattttgttaaccagaaatttatgaatgaacttatgattttttcaaatttatatgttatgaattttcaagattaaattaacatattcttatgaaaatttataattaaagaacacaagttaagtattaacttccaataggtcatacaaggtaaatagtataatcctataccatctacaaatcacacttttttaaggtgataatcatgcatcattaaattatttttattaatcctatttttttcaaaattaaaatcagcgaacaacctacaattaatgatcaaacaaaagtaggttgacaaatattaaacatccttgaatgaacaaaatgttggacaccccaacacgtgaaaaacgtaattactttaattattgaaaaaacaattacatcaagacttgaacattttttactagaccacaatacaccaaatattcacactcttattttaatactggacacctttataacactcttgtgtataactcacacttttgaaacactttatctttatgttgggacactttagaacactctctcactcttttgaacacactttgaaggcactcttgttggatgcacaacttgaagacccataacccctatttatactactaaaaagaaaccaactataatattctagataattctagctaattgtgttactaaaatattcttgaaacttcttatggatattaattctatctaattctagatggctctataattttaccaaaattataaaaaattctagatacttgtaaatgaggtattgatgttttgacactccccatcaacaccaactcttcatattgagttggtctctcagctttcgaaatctcgctgtgctaagttctttagtgaataagtctgctacttgatctttgctcttcacttggcgcacctctaattcttcctgaagtactttctctctgagaaaatggtaatgcacctccacatgttttgttcgagcatgaaatactagat

SEQ ID NO: 226248 - DNA, 1982 bp, Cannabis indica
tcagctactcaacaccccatcccctgctgttggcccaagcggatcaccactgttagccgttgttggcccaaatggagatccattcgactctggccccatcatcggttaccccactcactgtctcacctccttgtcatctctccacttcgcctaggaagatgattcaacctccaacaataattcaacccattcgtctcctccttgtcatcatcggatcccccctcattgtctctttgcccaagcgttgcagctcattatttcggtcatctatgtttgacagggcatggtattttatggaggtttttggttcgtggttgagggaggaaaaataaatttgaactttttttaggtttatattattccattttaccttgattgctaacaaaatatattaccattatttggtaattattctaaaattccatgattgttgtttatattaacttggttataattttttataagaactatgcatatttttttctctgtaagttgacaaagacattgggatgatttaggggtttcatagagctaatgaattgggtcgtggttctcagaacgccgctgatttggtggctttgatttcttctatttgctcaaaatgcaagtgttagaatattgtccattatagtatttgtgtaaaaaaacgctagtcattcttataaaaaagaataattctttataaaatccatttattattgaaagattttaatatatgtagtaacatttttattttttttaattttgacaattaataaaaattaattgtttgattaataaatttatttatttattgctacaatagtaaatatgtgatataacattaaaacaaaaaaaaaagactaattaaagcgtacacagtatataaaataattaataaataaattagaaaataaaggatatagtgacactttatgtatgttgcagttaactttttagtctgataaaacttaactttaaacgcttttagtgacgcccagagagagaatgtaaaaggattcagtgacacgcgcgaagtgtcactaaaaactgttttcagtcactctcattagtgacgcggattgaagtgtcactaaacagttttagagttacttaatgtgagtcacttaaacctatttttctagtagtgattcctctgacaacatttggcgccgtctgtgagaaactattgtatcgattttggagaaaaatcatcatggctgccaaccagacaaatggaaacaacaacacgggatcctttaatgttggaactatgaatattccccatcccagggagatgggaacaagcccaattgatacaatcattggatgtgtgggacgaacaaaggtcatcccctcaacctattccgaaaaactgtcggtcatactagggaaacctcgatgccagcaactatagtgggtcacttttcacctatcatgccagctgtagtctccgaaggcattatccaacttactacaacactaaacacaaccatgcaggagtagatgtgggatttgcaggtcaaagtcgatggaagaggacaaaacaggacctgacgtccaccccaggtcccaaacccatgttcaagcaaccctcaggtaaccaccacagctagacgtcgtattgagcgtcctaagaatactcgtactcgcagagaacgtgtgactgaacaaggaaatcacgatctgaatcaacctacatgcgacttggcatgaaatcaggagtcagttgacattgatgtcactcgtaagactaagagaagagaggagagaccgcaggaagaagactgtaaatggtagaactcgcagagttgggcccaactgttgggttttatgccctaaataaaactcatttcacataatcagatttacttattaataaagatcagaaataacattttatgttgcatggttcacatgatttatttcatgattatatgtgtatataatgtatgattcttttttaagtccagaacatatgagttggttaaagattatagtgt

SEQ ID NO: 226249 - DNA, 2583 bp, Cannabis indica
tcagcttcacatcgagtctcgaacggtcacactcgacacgtgtccccatccaaaggcagaatcagctcggatgaagtctacacgcaactttggaagtcccgtacagacttgggggcaaatgttatcccaaattttacactctgacatggcatcacaagaatggtcacacgtggagtccacttggaacatccgctcggaaagataggtcgagcaggatgtctcgttggcatgcccagagcaagatattcaacgatctgcgcagggcaaccaacacttagcgaattcagctttcgcatcatgagtcatcagctcaatccctataactcagggatcgatttacatggatatggtatacacacgatcccattatcagtgtattcagcctcaatcccacgatccttgcattcagcattgatcccacgatctttctgtttatacgcattgtaatgagagaggaaactttttctccttaagcttcctagccctataaatagtgatgtatattcactaggcattggatcggtcaaaaagcaactaagctaagactatactattgtccaagaattatatattcagagatactgttgtaagagctataagaataggaatctttctccttgatcttaagtcaatacaaataacaaggattaggctattaccgaactgctcggggttgaacctctataaaattcctatgtcttattattgttttatcatatatctgttactacatatcgtttatcgcttataaaatagactcattgtcgtttgctaaaatcgaagtcaacagtttacaatgtttgtaattggtaagattagccattacatatataaagtacacagattgagggatttagatagcttgccatatctctgtgatataatcccaaatttatagggattgctcttgtgcttcacgatacaaatactgaatttgctaagtgttggtatgttgttcagattgtctactgctcggttgagaggacctcgtccgtacaggtatacgtggtgctcggcttagaacatctccttcaagcagatgtagggaatcacttccacgagtcaccagcatgtgatgccacgtcagagtgcaaacattgggataacatttgcccccaagtctgtacgagacttcttaagttgcgtggagacttcatcttagttgcctttacatttgaatgggtgacacgtatcgaatgcacctatttgtaattcgatgtgagtctaacaaggcgtctcttcagttttcggctaattaatgctctgatttaattaattcctcgatacacgatttcctttgcacgctttggcggttatccttgaggaacttgattgccttttatttcccaatatttactttatgggggaaatcaaaacgtcttaggaatttcgaaatgattacctcttttcacaaatctacctgttaataaggctggaactttttcagaaatctctttccccattttctccacaaagaaaactcagagaagaaaaggaatttccttcaagtctgtcgtgagatttttagcagaggcattcgagcagctttgtgtggactatgtttagacttcaaacagtgagtaaatattcaatctttttctcttttaactttgtatctttaatctctaggtttccattgtagaaaatacattttttcttgacttgttgtagaagatctgggctcaaaactttgtagttttctctacaatagttcttacaacttcgtggtttacaacattttgattttaatctcgcaatattcaatttttgccttgctcattcgaagctttgtgaaatttaacccttaacccaaaaatttaaaactcctaggtcatgacttaatttgtgtgcgctttttgtccttttaatgtgttgtcttttgtagatgaaccctggtgagttttggggaggcgaacactgaattgaccatgatctgcttcaatttctgtacgaggatcaacctcatcttcacgctagtccgtcctcttcgagtgacaggctttctaactcttgctttgaagattgggaagtgagtagtgatccttctcctactccaaaacctgaagtgcaacaccactcttactccgaatagattgcaggagaagggtacggtcgcttcatttgggagctgaagaagggttggagacgttatcttctgtgcaagtggatgtatattgtccgaccaggtgttgctgatactcttcccgttggccgtccaagttctggtaactttagtagcccaatagctattcctgccgtaactgttgcacgtcatacacatcagtatccatccaggagaaggttgatggcccgcacaaagcagacaatgcggaaagttagtgcgtcttaccctcatgtggcccagcttgccacattgccaagtgtcgagcaggatctgcccgctatgaatgaggaggatcgtgaggggggacattgaggtccaagagaaagaggagcaggatgacgaccgtcctaatagcccttccaaagttgaggaggaaggagtggccgaacctccaaattttggagggtataatgaggtcagggagccagtatctgcagagggtgacgtcttggtcgaag

SEQ ID NO: 226250 - DNA, 1560 bp, Cannabis indica
tttatttacgcccccctcactttaatctgggtccgccattgcttggtctgtattcttgaatagagcttctactatatatgaatatttgtttatataataatgataataatgatgatgatgattaaaaagaatttcccgggttctacccccacaaccatgagaagaatatttgcttaaaaataccatttaaaaaggaaatggttggattttatttagcttttttcaaaacacaagagaaaaagcttacttgtgattttttatgagaatataataaataaataaataaattattgccaacctctagctttaattgcttcaagaggctttgctctttatgtagcccgtcctttgtattattattgtttctatattgaactttttcttccctagaatctctttccaatgaattagcatcctaggacaacgttttctccatagtccccactattaccaaaatgtctttctttttaatattatattattattatttattattatatcccttcacatgtattatgcttttactctagggcctaattatagaaattatatatattttcttgatacaactttgtatattgtagttttaattgcacatataaaaaaggtcttattgtagttttaattgctctttaattgtttttgaatttttttaaataatatacgaggttcaaaataaagtttaaaacaactaattacacatataataaaagtatttattgtgcaactgattgtttgaaatttgaatcctatttttggtataataaattattcagaagtttcttaagatattaccttacctaaaagaattgagatatactctttcaaatattgaaaataaaaaaaagtatcaaccgtaagaacaaaagtattatcattgtacattgacaaggaataccaactatatgcaaaactatattatataatagtagtgctataataaaccatttttaaaaaatatacatacatatatagtacaataataaatgcaccccataatatacaaatacacaaagtatattgtactattgtaaattattaaagtaggaccaaaaactagataaaaccctaagtaagtaggtaatcatatatatcatttcaatccttgatgcttgatccaaagtgcctcttacaaggcccaccccaaataaaaaaactaatcaatatgataagactgccatgaatatattaattaatgtacagggagataatcaatcattgacatgatgtggaagaagttaaatatccttgaagctgttgacgatattattattattattatgaatttatatatatactgcaagtcatgtactattaacattttgtccttaagcatcaataataaaaattaaagctaattagtaattttttttcttctgaattttgacatgtactaaatcgtgtccctgaacttttttttgccgttaaaaatttcctccgaactattgagattgttaaatttaaggatttttgtctaattttagtaaaaaaaaatctaacataaatgaaagttcaaggggcatgttttagtacatatcaaagtttgaggggcatgatttg

SEQ ID NO: 226251 - DNA, 1337 bp, Cannabis indica
agggtatttgctcttactcaggctgatgcaaaagctagcccgtcggtcgttacaggccagctcttgtccaacaactcttatttccctattttgtttgactctgggccactcattcatatgtggtggccagaataattaataaattgggtaggccatgtgataaatatgataaagttttggaaccctactacctggtggggaattagttatctctaaaaggtgggttaggtttatgccaattagaattgagggtaaagagttgagtgttgatttagtggaattgggtttagcagattttgatatcatacctgccaattatccaagtatgctgctaatattcactgtaagcgaaagattgtgatcttccaatccgagggcgaggaaccatttgtgtttgtgggatcagttcagagatcccaaattctagtgatctaggtaatgaaggctaaagatctattacaagagggttgtctagggtttttagcagtggtgttggataccacccaacttgaatatgtttggcctgaaaatacaaagtagttcaagaatttctggatgtatttcttgatgaacttccaggtttaccaccacaacaggaaaatagattttgtgattgacttagcacttggagcggagccattttctaaagcaccttatagaatagctcctgcagaacttaaagagttgaagattcaactacaggggatgcttgacttagggttttctcatccagtgtgtctctctgaggagctctagtattgtttgttgagaagaaagacagatccctacgcatgtgaatttattatcgggaaccaaacaattgactatgaagaataagtattccttacctaggatcgacaacttgttcgatcaacttcaagggaagatagtcttctctaagattgatctttgatcgggctatcatcagttgataatctaagaggaggacattccaaagactgctttccacactaggtatggacattatgaatttttagttatgtcttttagactaaccaattgttggggattattttaccaggatctagatttactaccatgtatgttgtttaacatcctaaaacaatgaaatttaaatacatataaagttcaagaaaccttacattggttgcagtagaattaaatgactccttccactcagatctgtagcccttgttccattttactgtagagtattatgaagatctgaacccgacactccttcagttgattggattcttcacagtcctacacactatgattaagtaccaacttgctatgcgtgcgcatgtactttatcactataggagattggaaattgaagagagagagagaga

SEQ ID NO: 226252 - DNA, 3552 bp, Cannabis indica
agtggagatggtcgactggtgccgcatgttaagatcaggttgctggagctggtgatagcatttagtcgggtctggtgagcaggaacttggctcccatgtggatgatctgtagtggggcattgtccttgaaaaccctgctggtgtgtagaccgacttgtaggagtagcaatgtgattgacctgctggtgtggctgctgcaattttgtgcaggaaattcgctttgcacttcgatattgctctatgtaattcaaggcataagatgcaagtgtaaaggaatctctttgtttgccaccatggagaaacttgtttctatcattccaaatgctccacgttacacaaattagtgcttcaaaattatccttatccattgttgaagccaagtgtattaggtaatccccattaaacatacccatagcatggtgtgtatcaatttgaaacttagtgttcttccaaacagacttggcaaatttacaagagaataaagcatgtccaatcgacttccatgcagatttacaccgtgtacataaggctgaatcaatgactttctgtttgtgcaaagccgtggcgactgggagggcattttgaatgactttccaagcaaatattttcacttttggtggtaaatgcagcttccaaaagaatttccaccgggttttgtaatcatccgaagacgattcttggtccttttccgagagtgaggtggcaaggtggaagccagatttaacactatagaagccattagtgttatggtgccatataagccggtctgatgactcgtaaaaactcaaagggattgtgagaattcggtaatgtcaatttgagcaaagtcttgatgtagttgtggcaagttccattccatagtatcaagaatatatgtggacacaggcgtagatggatctctgtataggaaatcggcttaaactcatcatgacctggaatccaaggatctagcccacttctgacatgaaaaccattaccaatcttgtagcgaagtcccttaagaagtaactcgcgcccccagtgtattccttgccacgtcaaagaaggtgagtgacccttatgagcttccaaaaaagaatttcgagggaagtatctatgcttcaaaagtcggcccaaaagtgagttcggattgtcaaataacctccatgcttgtttggctagcattgcttgattaaaatcaacaaaagatctgaaccccataccaccttcaaacttggatttgcaaagtaatttccatcttttccaatgaattttggacccatctttgttagtgccccaccaaaaattggccatcatagactcaatttgattgcaaaaactcgttggcaagcgaaaacaactcatggcatatgtaggaatagattgtaccacagcttttagaagtacttctttcccacctacagaaaacagcttttcattccaagcatgtaacaatttccagattcgttccttgacattactaaacaactccttcttgttgtgacttgaataggcaggaagtccaaggtaagtctcatggcactcacagattggcattcctaaggtttgactgaagaaattcttcgcatcatctgaagtgttaggagagaaggacatgatagatttgttggtatttagaaactgtcctgaagcttggtgataaacctccaatattcttttgatggctgtagcagaacttggatttgcatgacaaaataggagactatcatcagcgaataataagtgggaaaccgatggagcatgtctcgtgagtttcagacccaacaaattaccaagctgctcttcatggtgaagtagtcttgagagaccttccgaacaaattaaaaaaagatatggcgaaagtgggtcaccttgccgaagtcctcttgttggccaaacattacccacaatttctccattcagttgaaaagagaaactattagacgacaaacatcgcataatgagagagatccattgatgagcaaaacccattttttccattaccgcagagagataatcccattcaactctatcaaatgctttgctcatgtcaagcttgagtgccgagtagcctttagttccttgtgtcttatgtttgagatggtgaaccaactcaaaagcaacaagaacgttatcagtgatcagacggttaggtaagaaagcactctgatttttcagatttcaccaaaggtaggacatctttaaatcgtagtactatcacttttgagattaacttatagatcacattacaaagactaattggcctgtagtcccccattccttttggctttttgacctttggtattagagtgattacagattgatttatgcgactcatatcatgaccatcatttaatactccaagaacaaccgcagtgacatccgtacctatatgatcccaataatgttgataaaacattgcagacataccatcacttcccgggctcttacctggactcattgtgcgaagagcatccaacacttctgtggcagtaaaagggagcagcagggaggagttcatgtcatccgagactgttgtaggaatagcatgaagaatttgttgcagagctgctgcatttgttccagtagcagtgaacagattagtgaaaaaattgcagataatttcagtcagtccttgctttgaactaactgcaacaccaacttcgttatgcagcagtttgatggtgttgtcggactttcttgaagatgcataagcatggaaaaatttagtgttctcatccccgctttgaagccaatcaatcctagatctttgttgccaataaacctcctcttgagataataattcgtctaaagtatcctccatctttttcagtttgcacactgattcatttgttcgggtttgttgattattgaggagttccacttccttatgagctgctttaattttttcttgatgttaccgtatttcatgtggtgccactgttgaagagagtcagatacagacttaagattagtgcaaaatttatccatcgtggtacctggcagatccttcttccaatattgctgaatgatatcagttgctgctgtgtcagacagccacatttttttgaacctgaatcttgatagctttttaatttcattctttcgagtatccaaagggagtacttcaattgaaatggctcgattgtctgaattgtagtagtccaagtgctttgttataatcggttggaaactgttttgccattggtcattaatgaagcaccaatcaagtcgttctttgatagtatttacattgtggcgccctttaatccaagtgaatgggtctccttcgaaaggttgttcataaagataacaagtatccaataacgatctgaacttgtccatttgttgctcattctgtaaagccccaccaagtttgttgtcgttagaaagtatttcattaaaatccccaatcacgagccaaggcatcaagggtgcaacatccttgcatctctctagcagtgtctaggtatgaattcgtttgtgagtttcaggtgcgccatagaaggcagagaagtgccaagattggccattatcagactttatgtagcagtcaaaaatatttagattata

SEQ ID NO: 226253 - DNA, 3033 bp, Cannabis indica
gtaaaataatttccaacacccttacccttgcatccttgctacgtccttttgtcttagtggctacctttaagaaccattggatgtagtccttgaggggctcatcttcctgttgcttgacgtctaccaaatcatttggctcaattaggcattatcgagattgagaaatttggttgcccaaagcatccactagatctttccatgagtcgattgatcgaagagggagcttaaggtatgactgctgagctaggtctgtcagtgaggtagggaagattatgtacttaacattgtctcttacaccatgtagattggtctatactttgaaggaatggatgtgtgatagtggatcttcctttctggtgtattgatgacaagaagggttcttgaactttggaaggattggtagggcttttattctttcagagagtggtgagtgctactctttgtcaagttcaaattcaaacagcttagaggtagtcattcctttcactaatgttgctaggttgtcaaactctgccctgttgacaccatggatggtggttatcaaacaagaggcaagaaagagtttcatcaactactgaaaccgaacaaaatcatggcttagaatgctaacgcgggtaacaatggaggcaacaacggtaataatggaggtgccgttgaagatcaagcaaatggccacagtttgagtgattacattcttccaactcttacgggggtccagtcttgtctaagaccaccctccgtagatgctaacaactttgaaataaagcctgccatactccaaatggtgcaatattcagtccaatttggtggactgccatataaagaccccaatttgcacttgtcaaactttatggagttatgtcagactttcaaagtcaatggagttagtgatgatgccatccgtttgagactttttccattcttgctgaaagagtgagccaagagttggttgatctccttgccaccgaactttatagcaacatggactgatttggcaatgaattttctatctaagttctttcctccagcaaagtgtgctaagctgcgaggagaaattaataatttctgtcagctagacaatgaatatctccatgaagcttgggagaggttcaaggatctcatcaggaagtgtccacatcatggtattgacaagtggatgctggtccacaacttctacaacaggctgattggtaatacaagaacaattatagatgctgcagctggtggagcatttatgaggaaaagtgcaaacgaggcatatgatttcctagaagagatggccatgaataatcagcaatggccagctgaaagaattcagacaaagaaggtggctggtatgcatgaggttgatgccatagcaaaactgacagcccaggtaaaggccctgacaaaactgatagctatgcagacaaaataggctcaagttgtttgtgagctttgtggaggccctctcacccctatgaggaatgcctagtagatgtgaatagtttgtcaatggatgaagaaaaatccatttggaattactctcaaaacaataactttgggtccaatcaaggagggggccgaagaaatagtgattttaaccagcaacaacaagggttctatcagcaaagaaattagaaccgaacgcaaagccaacaaaaatcacagaaacaaggctctagtgggagttctagtcttcacacagatttattgctacagtttatgacagagactagatcatccattaaagacttacagactcagatggggcagttggcaactcaaatagcaacccatcctcaggggaacttgcctagtacaacagaggtcaatccaaaagaaaactgcaaggcaattaccctgagcaacgggaagaagtatgaagggcctgatgggggacaaccagtggaagaagagattcaggatcaactggcaccgatatcaacggaaaagaagactactgagagtctcgcaccaaaacaagcttctcaaccagtcagtatagatcaccatgtgaagatcccgtacctgcagagactccgaaagaccaacttagacaagaagtttttgaaatttctagaggtctttaaaaagttacacatcaacattccttttgcagaagccttggaacagatgcctagctatgtgaagtttatgaaggagatcttgttaaagaaaagaaaaattgaagactatgaaataatggcattgactgagggttgtagcgccatattgcagaagaaactccctcccaaactcagagatcctgggagtttcaccattccttgtaccattgggagaatagaagggataaatgcattgtgtgacttgggagccagcattaacttaatgcctctgtcggtttttcagaaaattacagttgggtgaggcaaagccaactacagtaaccttgcaattggctgatcgatcactagctcatccaaggggagtcatggaggatgtgttagtaaaagttgataagttcatcttcccagctgattttattgttcttgacatggaaaaagatagcaatatcccaattactcttgggagaccattcttggaaactggcccagcattgattgatgttcagaaggtgaattgaagctgcgagtgtaaggggaagaagtggtctttaatgtacttaaggcgatgacttttccaaaggcaagtgataacggtttctttgttgatctgattgataccattgcagagaagaaaaagttgatagaagatcctttagaattgagcttaaccgaggatgagttgactgagcaagaaagaatggaggcagtgggatatgccaaatggcttgactcctataagccattgaataggaagtattatgaagagttggggtggtgccaaaggacttgtgccatctatagagaaaccaccagagttagaactgaaggtgcttcctaatcatctacggtatgagtttttgggagaagacaagaagcttccagtgatagtgtcagcttcacttgctgatgtggagactgccaagttgcttagagtactccgagcgcacaataaagccattgggtg

SEQ ID NO: 226254 - DNA, 1279 bp, Cannabis indica
tatgtaaggtgttgcttcctatatatcttacgttaagaaaattgagttcactctatggaatgagattgtaagaaatttatctctctttgatttctgatctcataatttctaatatggcaatatttagacagcatcttaaaaaatttagtgaataccatccattgtaattagggtcggcaaaacgggtcacacacgataacaagacttgaaacccacacgagaattagcgagtttggatttgccttaaatgggtttgagtcgtgttcggattgattcgtctaacccgtttaataaatatgttgtattcgaattgacacggctaacacgaaattgatctgttaatgatttatttaaagttattttagtactttaacgtgtcataaatttgttataaatgtgttgttgattgacatgtttaaacaaaatatgcttataaacgagttacacggatcttgtcaacccgtttataaacagatcgtgtttaagtttcatttttttgatacaaacgggtcatttttgggtcgagcatgtaccaactgttatacatggatctcgacatgatacgaacacgacctgcgaacacgaattgccacccctaagtgtaattgttctgttagttttaagttcacttttagagaatcgaactttgttgctcttgtacactttgaattgtagagttagtgctatttgaaattggattatccattctgtacttggtaattggtatttatttatatagttaaaacattttttctaattaaattgtatggtcttgtatagttttaagtacactctagagtctagattgtggagttagtggtatttgaaatagtgttgcctttgttaaagactttcaattccattgtaattagtatttttctcaattctattttttaaaaaagaaaatataagtattaaataattaatttaataattattataaaaaaaattaattattcttaatttgtggcataaatacttaaatttaattatcggttttatataaatatttaagtttaattctttatggtaataatacctaagttatatttctaaaattttttaggtacttaatcgttaagtgtcaagttttatctacgcattattttcttttaatttttaaataaaaaataaaaatttaatgatatatacaattaagaactgcaacgtgataatttatttgacatttaatggtcaggtacttacaaataatttaaaaaatttataacttagatattatttgtaacgccccaatattttgccttattttacaaaaata

SEQ ID NO: 226255 - DNA, 2599 bp, Cannabis indica
aaagtaattaattttctaatcaaacttaatatatattgtaaagttaagagtgggtccccgcggggccccatccacactacgggatatgtcatctttaaatcacgttcgaaatttattatttaaatgaattataatagattggtcatctctcagagagtctacttggaggacagatagttctagtctcttcttctccgcgagtgaatgcgacctggaggaggtacggaaggacagctggagtgtagcacattgttcgaggttaagtcactgtatacgcatttaatgcggtatgtggaagaacattcaacacattatgctgaacagacgtgttcgaggatttaaacccataattttctcatttcacgatatccatacatcaattgacgactacataatgagctattaaatcataagtaagagatatgtcaaggcttaccgaacataaaaagaaggtaattatgccctatgatcaaatttagaaaattatacaaggcatgactcatacaatcacgacaacaatgtttttttgacttaccattataattctataaatacattaatgatgcatagaagagggactctagaaaattcttgtaagaaaaactttcattaataacagtaatttgtgaattaagactcattaatattccaaccacaaaaattctcttttttaatcctctttcattacttcagttctaattaatagttactgaaaaccgcgatcaatgtatatatatatatttataacttaaggctcagatataaagttatttgtataaaatcactatggtttttttaaaactcttttggttagatatgaaataatccctaaattaaggctcatataaattaagtcatcaaaggtaagaagacctagtgatttattcggtctatcacggtctatcattacatttgattaatttataagtcatctaagtaacataactccacaggatatagtccactcgttcaatagaaagaaaggcagagaaggcttgtttgcaataaagatcgatatgatgaaagcttatgataggatgagttggggtttcattgaccatgtgttgtcttgttttggtgttccccatgagtttcgaaattgggtttctcagtgcattactactgcctcccttaatatctgccttaatgggggtctggtgggaaagatatccccctcgtgtggccttcgtcagggtgaccccctattttatttgggcagcgaaaattttgtcaaagattctggagaactgcacaaaactcgggtatcataaaagggattaggctgagtaggggaggcccagttatttctcacattttctttgttgatgacctaatccttgttggaagagccaatgtggaggaggccaagggtttttgggaatgtcttaaaaagttctgctcttggtcgggacaaaaggtaaatactatgaagacctccatctctttagtaagaatacgcccactgcgattaaacagaggataagggagcttttgggtttaggatcgccagagggtaatgtcaattatatggggcttcctcttttcagatctagacaaaaggatgcagacttaaacttattctggataacctgacttcaaaattgcatggttggaaggccaagaccctatctaaagcagggcgagcaactcttatcaagtctgtcggattatctcttcctttgtatgcaatgcaaaccactaaactctccaataaacttgccactaagattgatggtttggtgcgtgatttctggtggggttcggagaaaggtaatcatggtctccacctaaaagcctgggacaaactttgcctccccaagtctctagagggcttgggcttccggaaatctaaagaaatgaaccaggctttcctagccaaggcggggtggaaccttctgacaggacaccagtcattatgctgtcgtatacttgaagccaaattccttaaaggaaagtctttccttgactgcgagccgaaagcctaggactcgtggttctggaagaatgaaagcaagagaaatcatccgaaaaggtgcctccaagcaggtggccgatggcctggatactaacatttgggtggatccttggattccgcacttgcagggatttaccccccatcctattgggcggaataggaatagggaaatgaaggtagctgagcttcttttggataatggaggatgggatcaccaaaaacttaacagtttgtttgatcaaaaaaatatttcagccattctgaaagggggtattcctgctggccatggaattgatagctggttctggactttggaaagtaatggtcgcttctcctgtaaatcagcttatttggcccaagtagtggatagagcgagtcctggtgaggttgccccctctttgtggaacaagctctggaatagtaaaattccagagagactcaaggttttgtggtggtgtactctttctaaggctcttccggttcgttcggagttaagaagaagatttcctatagaagatgagagctgccccttgtgtgggttggaggttgaaaccatggagcacctatcctagcttgtaatgttgcctctcacttatggcggtcgtctccttggggaattttccc

SEQ ID NO: 226256 - DNA, 3056 bp, Cannabis indica
gagtttctactctcttcttagttctttgtactaagctactataagtagtaccattcttcttgtattttattactcttctctctctctctactttgtttgctcctttgagctaatatggtattagaaccattagtgtgagctcttttcttcttcttccttgatcttgtttttgttgtcaatggcatatggtagaggagttcaaactcatggaaatcgtgaagcagagaacgcttcgaatgattcaaatatgttctttgttcttggagaaaattctcgatcgacaaatgccaatgacctttcaaatccttactatctctctaatggcgataatccaggagatgtgcttgttccaaaaattcttactcgaagtaaaaattacagtacttaaagaagatctataataattgctctcgttgctcgaaataaaataaagtttgttaatggaagactacctcaacccaatgatgatcatgaagattatgtcagttggtgtcgttgcaataacactattatatcttcaatctttcatgctattttttatgaactcactgatagcattatgtatcatgataatgctactgaaatttgaatagagcttcatgaaagattcaatgaaaaaagtgcacatcgaatctttgaagttaaaaagactattcaaagtcttactcaatgattgaacagtgtcactacctattttactcgattgaaagttttatgagatcaaagtagggaatatacagaccacaaccagtgtattcttgtggtgctttgaaggtgatttagaaatatcaagaagaggatcgacttctcaaattcctggttagattgaacgactcctacagtgttatgagatctctgatcttgatgcatgatccacttccaagtgtgaataaagcttatgttgttgtcattcaagaagaaagacagtaaggattaactagtagctctagtaattcctttgaaattgatagatctacatcaaataccaccagacagtttgttggtgttgtccaaccttttcgatctaagtatacatgtactcattgtggtatgtctggacatacaattaatctaagtattagggatcaattatactgacactttgcccttgtcactaaactagttactgtaaagctaggtcttgcacttgctgcaatcaaagattgacatctacaccaattagatgtcaacaatactctcttgcatggtgatctccaagaagatgtctatatgtctttacctcctaggtatagacataaggggaaattaccaccaaaccatgtttataagctaagaaagtcattgtatgacttgaaacaagcctcaagacagtggtttgcaaagtttttgagtgctttatatgttgaaggtttctctcattctgcaacaaaatcattctctgttcataaaacacttcattggaggattcatctttctactggtatatgtaggtgatgtcatcttagccaacaataatgctcaagaactcaacactaaaactcagattgaatgctcaattaaagaaaagatttgggacaactaaaatacttcttaggactagaggttgcttaatcaaataagagaatttttgtttcccaaagaccatatgctctggaactattagaggatcttagttaccttggttgtaagctaatgagcacaccaatggaagccaatcttagacttggacaagatgagaaagaaaaattggcaaatttaaccctatacagaagaattatgggtaagttacagtacttaacaatcacaagacttttactcagttaataaattgagtcaatttctggctacaccaagagttagtcacttgaatgcagcacataggatactgcaatatgataaacaatctcctggtcaaggcatcttcttttagctacatctgaagttaaaattcaggcctacactgactttgattgggttgcctgtctaaatacaagaaggtccacaacaaggttctacatctttattagagattcaatcatctcatggaaaagttatttggtccacaacatattgtttctaagtcctctgtagatgctgaatattgaacaatgaccaatacaacttatacagttatttggcttaatattgagcataaagggcatgcattacttcattgtgacaacaaattaactcatcacatagctgcaaatccaattttctatgagataaccaagtacattgaaatagactgtcgcttggttagagagaaagtgcaagagaaatcataaagcatttcatgttcctcaaaaggaacaactagctaacatcttaactaagtctctgtttcttaaccagctcaagatattcaaagacaagatgggcttaaaggacatatatagcccatcttaaggagagtatcaaggttgttaggattagtttagagttagttaaaggttgttaggtgtgtgtgagttgcctttgagtttgttagagagctagttactactctcttcttcgtacttagctactataagtagcatcattcttcttgtataaacttaatgatcaatacacacatctcatcttattactctattttctctctctctctagtgtattttgctccttcgagctaatagtcagcaacactcaaattaaaaaataaggtaaacgaagaaacaagaatttgcaaatttacttgaagtaattgttcaccttaactgtgtcgattaaaagtagaagtatcgaaatatctaatgctaattagtgaaaatctaaattttagtataccaaaccaaaccttataaaagtgttatagcgttataaacattccaaggttggaagcacattataaaaaatcttacttttagtcacaacaaaacttgtgactaaaagtgaaaaaattgtgactaattataaattattattcctatattgtgactaaaaggcccgtggctaaaagtattagtcacaaaaattacaatttattgtgacttaaatgtatttttagtcacaatacttgttgtgactaaaactaaattagtgacaacttataactaaatactatattttagtcacaagtaacatttttgttg

SEQ ID NO: 226257 - DNA, 2274 bp, Cannabis indica
cacaagagagagcgttctgctctggcggatgtcattttagacatcaaaaattccttgtcacatctccctattgctgcggtctatcatattccaagggacagtaatatccatgctcatcatatggcaaaaggagctttagggcttgataaggaattgatttagaaagatacttgttcaaatcttctctttgtaacttgagttcattgttctatccttaaaaaaaaaaaaaaaaaaggaaatcaacatggaataataaaaactttccaaacctcttttatatatacaacaaatttccacgttttaatttgtacctctcaaggattattatatagtgaattaaagagaaatgctagaggattatagtggtgtggtacaatttaatatcgactttaatatatttttaatttaataattaatcaactattataatagtgaattaatatcgacctgacatgacacactacttttaatattatcataaaccaacaaaaaggtgactactgtattcggtctactataagaaacaaatatgacacgagtctattcgatatatataaatgattaaggccacacacatatataggaaggactgctttccacgaaagccaccatatgttaaaacgagctagagctacacatccgattacgtacgtatacagattacaatttaataaaatataatatgctctttatatatattattatattactatctcagctgttagctagatatatatttatatatatatatatatataggttcacctcaccagctacacgaattcatatatgaagaaaagaagagaaaaacacatacaagagatacaagcccatcatataatatatatatatctaactttttctacttccaccaattttgttcttttttcacttaatttatttgattcaaattaagatggaatatttggatcaacggcccataaaaataggagttggcacaataagtacaaggccttcttcttctgatcatcatattaatgatggtggtctttgtaataatcgttctgagtccttccggacgctggagatgggtgtaccgaaatctgaatcggcagaggtgagattagcatggcttcgttcacaaataattggtggcaattacgaagtggaatataagtctccttttggaaaacgaaccattgtctatgccgaccacaccgcttctggccgatctcttctctacattgagaatttcatcatcaataatgttcttcctttctatggtacggactcaatttacctctccccacttcaatattttataataatactagtcggcaactacgtgtgagttacgttgtttgttcttttgtgtgttttttttaatttttttttcatattaaaaaattacataggttaagttttgattataatatttaaattattacttatatataatttatactataattgatataataattaataaaaatattataagttttattgaattatatatttacataaaatattatattacatatgagtaagttttaagctctatttctttagataagatggttatcgctaaaaaattaaataactatttaaaaccgttgagaaaaatttagtattcccgacggtttaaaatcgcagtaaacaaaataagcgacgtttttttaataaaatataattttttaataaacccttatgggcaacggtttaatcattgacttttacacacgtcccacacttctaaagttgactctttcctctcaatcctacttatctcatagttatatttcattaattttaaaagtttgataatattttaattaataataataataaaataattagtaatcaaatgttgtaatagtatgaaatatgggcggaagatataaattacattattagtaggttttaacaaacctattaataattttcattaaaaaaaaatacaaaacaacttatttctgttattatatttgagtaatttttttttattattattataattattatttttaaaaaataacttcatttcattattgtaggttttaacaaatctactaatatttttcattcaaaaaaaacctactaattatatatgtttctgttattatattcaagtaattttattattattattattattattattattatttaataaaataacttccaaaaataccactaataaacaaaaaacttaaaggaaaacaacttaatagatacatattctttaacaacaaatagtttcaatcaataatttccatttttttaaaaaaaaactactaatatttaccaaat

SEQ ID NO: 226258 - DNA, 1423 bp, Cannabis indica
caactggcgcaagctagagaggtccatggcccccagttggggcttcaggtcgtacatccgctaaagagaaacatgtttttgattgatgagaaactctctcttgtcccactgatctagacttgtcagagtggagagcttaaggaaccagtgctatcaaggcctgttagagtggcagggaagattctgcacctgacatcatctctcacaccttaaaactcagtctgcacttcgaagtaggggatgtgagacagtggatcttccttcctggtgtattgatgtcaggaagggttcttaaactttagagggataggaagagatttgattcatttagacagtggtgagcgctgctctctgtcaagttcaaattcttacaatttaggggtcgtgatccctttcagtaaggttgctaaagtgtcaaattctacccagtttccccatggacattgctctgcatcccaactggagcttctattacctggtagggtctccttagaagtttcttgttccaccaaccatcttctggtcagaggtcacataggtctcttagtcttccaagtcaaccatggactccgctcgacttgggtctttctgttgtctcctaaccatggggtcatggaggaacctctggtgataccttcgagatgaaatccagatcatcttgagataatccgctatgggagtggtcattcagagcgttgtagtggctacttccctcaaagtaatcttcatctggatcacaagtgtgaagataattgagctagttgctcaagtttaacttctctccatgtactcgaggaaagtactcatactgcttgccatgggggccacgggaaaagtaacgacacaactcatccctttcgtctcaaaagtacattcaagtatgaagtggttcaatggtccttacccaacggatctcatagccttcagtctcaaagtaattcttcatccacctaaattgtcttgaggggcaggtccctttccttttgcaggttctcggggcctggtatcatgagagcattaaggagaacttagtggaggagtcatgttggttctctcgattatctaaagttgttccacatcaggtggtaggcccatcggttggcgcccacgagcttgagtcctctttaggctcttgctcgaaggtgatttccctcttggaggtctccacgcctgatgcttgcttagtgcttgcacggttgccatctgtggtagtgccaagataatgtaatggcaagaatgttagaccataaagaagctatcatttcccatttaggttgggcaagcctctttgtagggttccatactgggactttatgttcataatgatgtcatgcttgcttttggtactttggaaaaacaaatcttgatcgaacctatatttacccaatggatatgtaaaattcatatgggttcgatgtacttt

SEQ ID NO: 226259 - DNA, 1729 bp, Cannabis indica
tggacggatgtattggcagcaatgatgttgaaactgctacctatactgaccagctgtatttcacacgttgaactacttcttcaagctttacaatccatctgctcaatctaggaactctcccattgatcctacagtgagtctttatatgtctttccatagttctcccacatgttcaatacctcctaggatggtagccagtcacccttctttgggtagccctttcaccattatggccttagtcataaatcttctaatgtaggctatcaaaggctcttttgatacttgttttactttgaccaagtcctctaattgagatgaatttttcctagaagaggagaaatgcgcgtggaactcttccatgaaggaatcccatgagctgaaatttcctagacctatcttgaagtaccaatattgtgcgatctctgccaaggtagctggaaagattctacaccgtacatctccctttactacctacaagtccatttgcattttaaagtatttaatgtgggagagaggatcttcctttcccatgtacatttatagtgttggcattttgaacatgggttgtagattaatggtgttaatttcttttgagaagggtgattccctagtctgatcaagttctaggtccatgaattttggaccggttaggctttgtacaaggctcttaagttgatttagttaggcttgaactactagatcaacttgacctacctgttgaccgacctgtgtcacttgtggatctctcagaacattaccacgcagataattgtttacattggtcggatgaatatatggagggatgtatttttccatcatgtccccttctatgattaagatcatctctcaaatcatgtacaaggcctaatttgttaaagattgatacacataggggctccttgtctggctattatcaataattggttggttcggcatatccatatgaggatgaatgctatattgattaacatgctagataaatttgctcatctactgtgtggccatcagtttgactctgtgaccttggataggaaagcttttttccttgggtttgttgagtgtttccagttggacgttcttctggcacgtactatggttcagtggggatatagacatctagtcttctattcaaatcctgtagaactagactatctgtcactaattactgcccacttagctggtaggcttgcataattagtatggtggcctgatgagaacgattatcgattacttcttgttgggctctcacgatcttcatttattgatccatccattcttggaattggagcttcgctgctcaaaggtgaaattcacagctggttgggtatcttgctaatcatggtgaagagggttggtgtgcccttgcatctgccctaaagtagctcacaaattttgcatcttggtatcacttccaatcaccaatgaaggatcggaacaaatgcattttttgtgccagaggcagtctgctcggtctaggtactcattgttctagtttcttgtacgccatgagtgaacccatccaaaggagttgtcactctgtcttgttgatcgaggaccaattggaggctgaggaatagtagattcgggatccttccttgctggatctctttagttcgcagggtatgcacattaggaatcataaccatcagatcagttgtttcgttgagattacctccatgtttgtacaaccatcttcgtgtgtcttgaaaagattcaaaacaaaaattgt

SEQ ID NO: 226260 - DNA, 6504 bp, Cannabis indica
ttgcctatgttgttagatatatgcgcactatatggtcatgaaaatgaagagttgaccagggttttggtaagtagatgtcatagatggttgcgtgctttttgtcttagtagtttcataagctgatccatttccctccctttttttattattatttttggctggaagagttgtagattggctgtgttgaggggttgaaagtaggattagaaaggacctgcctatacctatgaagagtaaagtgtgtgacacagaattctgatgaaagtcaacataaagagagaattttttttttgaaatgtttgatctttctttttatgtagttaagtagcagtcatacttgcacctttggctaattggtcatttaactgcactattgaatagatagttatgtttataagatttgttcaagaatgcaacacagtatctacacacttaagtaatttgcacattcatatattacaatttttttttcttactcatcaaaccaatacattacatgcttttgtgtggtactcgctgttttggctaattgatcatttatgttttaaactaatattcttactctttcttgtactaatctccttcctctttaggtgaggaatgctttaaatgcccaacctattattcatgaaaatttggcttcagtagtgtcacagtttctgagcattactcacacaatgcatcaacgttgcagcacatccctggaggtattttagtgatgtttaagtttctataacaagtattataattgagagttaggttcatattcttgttttgatagaacatgctcatttggtttggttgttttttatatggtacatagctttatatacatatcaaatccccttaacttctctttagtacctattcactctttttcatttgaaataatataataatatgacacaatgtacaggttttgttctcttcgggcagtcatggagaccctggatctagtcgtcttcatgttgatatgcaggaggtgagttgctttctgtacctggcttagtttaatatgtctgtttaaatgcagtgctttcagtcttttaatttttataaatattaaataggtaatggatttcatcaatgatgcgattgtatcaatggacgcatttgttggtgcatacaaaccggcggctttgttcttttcaaaccctgttgaaataagctatgcaatgaagtaaattatgcattatccagttgtgttactgctgctatttctggatggagtgtcacaagatgagcgagtggaatttattatgaagaaaaagatgtatctgtgtgtgtacaaagagaggaattgatagtacttgtaacgttttgatatgaactgagctagccgatgaataaatgtaataggacagtagcgaaacagagaatagtaaggactaaatgtagacaatatgtaaaacttgtgtatgctacggcagcaagagaattgcagagacagtttccctaggcattcgagaggccttggactctcgatgatgcagagaaataacctcttaattcttgcataaactctctcactccctatactcacttatttatactattcttttcccactctaaaactatcctctaccacaatgacttaactacccttttatttaatcccggggtctaaacattttgagatattagtattcattgtttcgcctgtgatgactaatattatgctgttttgctctctttttttaacaagtttttgattttattttcttcatttgattctgttatgttgcagtgatgggaatgaagagctactgtgcactcttgcaaagttgcacgattccttccttccttctctacagcgtggtttccatgtgctactaacatcgaaagaagatcaactgatgtctagtattaacgcgggcttgaaactgttagcaacgagaataatcaagtttggatggaagttattggacatctgctatttgagtgatgaggtgttcgaagataatcttcccgtacaagctgcgacaaaaatgttcccagccaatattgaagatcctgttataagggctgatatattaattcaaacgtttagagaaatcgctacagtgtcagtatctagtccagagaaccagagcagagaaacatttcttctaacatattgaaaagaacttcaatataatgagtaaattggagaatctacaagaaactggttagtttttttttcttttcttaatggtgaaaaatgcatggcttttgttatatatactgctttcaaacaatttgtgattcggttttcaacaattacgcttactactcatgttttgcaggatggatattcgttgataataagcaactcaagtacttttcggggatattgatgtcctctaagaaggccactgagaaggaactccctactatgcaaaaaccctggcacaagcaccaaagtacagatggatgaggatgctgcaattatggagtctaaaataagtcaaataaaagatttattccccgattatggtaagggattcttggctgcctatcttgaaacttacaaccagaatcctgaagaggtgattcagagggttctcgagggaactcttcatgaagatcttcgaaacatggatacttcattggagacgatgcctatacccaaggcggctgctacagtcgttggcaagaacgataaagggaaaggaaaattggttgaatctgtatcagtatcctctcccaacccaaatttaactcccggggaaagggtgcaacagagggaatcttctttggtttcatcttcatctactcatggaaggtttgttaggaagtctaatgctaatgtgcttgattctagtactcttgatgataaaaaccagatggattcattgagaacggctgctcttatttcgcaatatgaatacgatgatgagtacgatgactctttcgatgaccttggcctgagcgtgggagattcagggttggatgaaaatcagagtttgagtgacaaaattaactccaatatggggaaaacttggcagaaagagactactgaaggtggctcttcccagaataataattctaattcgaaatggggctcgaaaaagaaaccgcagtattatgtgaaggacggtaagaattacagttacaaagttgaaggttcggttgcagttgcaaacgctggcgaagcatcgttacttactcaggctcagcaagaacttatccatggcctcggccgtggtggcaaccttccacttggtgctgtgaagaagttgatagagacctctaatgaccaagataagcagcagcaacacaaacaacaacaacaacaacaacaagatgttaccgagactgaagaaaactgatttgggaataatactagaggatggggaaggggaaggaggggaggtggccgagccaacggggaggaacaagataagaggtttggggtttcagaaggtgaagaagtgagagataatgcagggaatttcaggggaagaggaaggagacgaggaggcggtggcggtggaaggaacaaccattaccgaaaggatcgtgccaatgcaaaacacttttctggactaagtggttattagggagagtaaccttcaagtttcaatcattttgaccttgactcaggtttctttcactttcacaatcagttgtaaattgaaacttattttttatggtttaaactttggtaagttttatagttgaaaagctttgataaagtatgagcacaactgcttaagaagatgagaacaacagtaattatttttggtcagttctccaaataaaatgaagtgtttgttttaaaagtgtcatgcgtaaaatagaactatatttcattgatgatgatacgtgataactctaattttacaccaacgtaatctaaaacttctcataattgcatacaccaataaaaggtaatttttttttgagagacctataaaaaatattgggtgattttacaatgtactattttggcatctaaaaaaatttttagtctaatttttttcatatttgtttacattatagttatttaaaatattttacaaaactttgagaaattcagaataatatacaatatagaaaatagtgtttaaataatctatttcacacgcgtataaaataaaataattacgcgtgcaacaagtagtaatttagctttaagtgtgactctaatcaaattatgcacatgagtaactaagaaaatcttttgctcaaaaatacaagcattatgattcctccaaataaaataaattgttgctgcacaagtagccgcaacaggcctatgaagcagactgcgatcacgattagcattcaaccacaaaagccaatttaggtaagactcgggccaaatagcattgccaagccaaaaatggatagcacgcatgagatgcttggaaaaagaacaataaaagaaaagataattatgacagtcaacaccaacctcacaaactggacagctagtaaaaatcatagtaaaacctcttgccaacaggtgatctctggttaataagttattttatgggaggcttgccagagaataaatctatattttggtacagataatttacaccaaatcattttataattatcaactttagcataaggagtaagaaaagagttataaagcttactaacctgaaatcttctctcttttccagcatccagaattattattattattattattattattaaactgaagcatgaggcggttttaatttttttaaatactttgatctattatctttctgatgtttgtatttttttttttttaaattataactttcacttaatcataataagtaatgatcattgctcgcttttaaaaattatcaattcatcgataatttaattgctgatttttttttagttctatatattcaaagattctattttaaaatagcagttcttagtgttgtaaatatgggttagattttttgacacgacacgaaatcggtatgagcttcgaaagcacgagcacgactaggcacacaaaaatatgggtctagacacgacacgatacaatgctataaattgacacgacacgacacgagaagcgcaaaagacacgacacataagtataaatagtctatatcctgaaagccacaacacgatatattaatcgaatcttataatttattattaataataatagtaaaatatgaatttatcaattataaataagttaaaataataataaaacttaaatataatacttagtattataattctataattaaaactattaaaacataaaaaattaaaattatatattaatttatttatagtgcgtgatataaaaatttgagtattcataagtaaatattcaaatttgagtattgttcaaaagttatatagctacatctaaagctttgaaatatacatataattcagtaattgtaaaaaaaaaatataaaaaaataaagtacgaatttaagtcaagatatgaaaatggactggcctgtttaagaaatacgagccgacataagcaaaacacgacacgaattcgagcacagtacaaaaatgtcgggcctatggaccgtcccaagcctatccttgaaaaatgttagcacgacacggtacgacccatatttttccgtggcaaggcataacacagctcgtattttttaaaaagcaagaataagcacagaccgggctagcatgacacgcacagacttacagtactagcaattcaatatattctatttgaattaaaatcaattttttaaaaaacagtatttgctaaaagttaaatgatgtggctagacgaccaacaaaaataaaactgaactttcaagcagaaattcaaccatgttctattcagattttagaaaattcaaaacatgaaagttttagagttctttctcaacttttaaatgcatctttaatcaactcattcaaaattcgtattaaaaaattatgtgtattttattgagagaggtcagagcaaaaaaatgtcaggcactacagcccccaaaattaacgtcacgatgctaattgcgcctccaaggcgccacgacatgaacttaagagaaaagtggtaattttttcaaaaagctccaagccctgcagcaccctatgcttgcattgcgccgtcatcgtcggctccatttaattttttttaagacaacaaaaattttaaataagattttattaattttagtcttgaaaaatgtttttaaaaaatgtaactaaaactgaaaatttcacaatattctataagagatataaacatttagaaatgaattataattatcaaaatatttattacaacttaaaaaattaattttaaaattaatacaatattatttaatagaatttccatctattaactttaatataataaaattagattaaacattctataatctaatcagtttttatgtttctccataaaattagtattgttaagtattaaaactacaaagaataaaataaaattaaaacttacatgtggaagtggcataccattgtgtactactagttacatatagggttatttgcggcaaaacctcctaaagtaggcaggtttttgcaactaacccc

SEQ ID NO: 226261 - DNA, 1927 bp, Cannabis indica
aacctcattcttaaactaatgatgccgagaaacgatgaggtctgagcttattttatacccatgaatgaattatcacttttgttccgcttttgcccttattgctatttctgggtttggggagaatatggagggttataatggtaaatagcaaatataatttgggttttcacgtctcaactctgaagtatgagaaaggggattaattgaaaaattgattaatgaatattaagtaaatacttgtatttttattcattggtaaaattttatttgtaattaaaaagagggggaaatgccatttgacagtgacacaacattttgttatgctaataatattatgaaactagtcttagcctaggaagtagaaaaaacaaaggcttgtaattgaaggagaaatgcactgaaagttgaagttgaggcactgaaagttggaactacttgatgatatcaataagaggcaaggaacctatacttatgttttgtgacatgtaattttctttttcatagaatcacttaatggaatcacatttcactcaaaaactagagctagagtaactgtaagcaagcaacaaagattgaattttacaacttaccacttaccaatgttccattctactcttctcttctcagctaacctaaattatcagttcttaaatcagtttgaaactaagttcttattttcttatttaaaataactacacaaaaagaaactggcttttacaactgctaacaaaaaagggttatggtgattgctcataaataaatggaatttaggtccaaatattaatttacacatttcaatcaaaatttgaagaagaaaggaacttctaagtgtaaagagctagaagagatgtagggaatctacatgacctctttgcccctctgttggagaacacttctgtgcacaacttctccagctgaactaacaaaataagtaacctgtcatcaacaaaaaccacaagttttgtatttaggcatgagttcatcatgggcacaaatgattgcagagaacagacaatgaatactcacaatctcaagtgagctgactctgtgaagcaggaacccgtcgaccggtgttctgggaaaacaaccaaaaaaaagagaggaagtccattaaagagttgcaaacatagtatgttacaaattgcttatgtatccctaagcaccccgccttcgacggagatgtcttacaaatttcttgtagattctgaccttccatttgataatgagaggaaaggttactttgtacaattgagcctggattctctatgtaaccaatgctaccttgatgggagcaatctttcccacttatgtatgcattctgaaaaaaaatagatggttttgggagtctagttaatgttttcatctaagtcgaaactaatcatatctaataaataagtcttaccacttcaaatagtgatgagtagtctgctgaagagtactcaaaagcatggtttagtctccattttctcatccccttctctgcagtctagcctaatggatggaatccaacaataattcgcctgtttcgcagaagaaaatctatgcagccttttaagccatttagcaactactaacttttcacttgataaataagaaaatgatctattttgaaatgaatgttttagacatacatagaaaacaaggattgtccaaactatagctaatagagattggaatttaccagttaccactggtctcttctagtgttcttgtcagccagagaaattgattgtcctctgtctcctccaaaggtcccgggtgcacattctacaagtttaaagtaagttcaataagatgaatgaaagaaaaatgctgcaatattataatatgctactatgtcttgataggatatgttagcaagtttcctccataagcaatggaagccaatttaagctaactcgattagtacggattcaagaggggagta

SEQ ID NO: 226262 - DNA, 1524 bp, Cannabis indica
gttagcacaaaaaatccttaaaagtcttgttcataagaaatcttgttagcacaaaaaatccttaaaattaaagataaacataataattaatttcagagttccaataagttaaactttcagagaaaccagatcaaagattacatatatcatgtatccttgccaacatactttgctgacaagaaatcatatcaccaaagaattatttggaacacaacaaaggcataggctaaaaaattctcatgaccagttcatatttaaaatgttgagaatatctagctactggaaccattttaagtgactagagattagtggtgatacttgggtcgtgacgtatcactttagaaaaataaaacaccttgtttgaaacttgacaaattaatttgttttttgagtctagcattataatactttcttaaacaatatttttcaaatattattctgaacaatgaatagatatatcaaaaaaaattattatttctctctcatgtaattagaaaactaccactcttagagcattgtttgaatctataaaattatcttattatttctagaactataagtatataattcagaaattttgattaagtattgaaaaattgatcccgtaagccatttacaaatcagaattcgtaagctataagcacctaagaaaaataacaattcaaaataatttattttaaacaccaaagtggaaaaagtaacctttcatattttaaaattcttagtacttacaaagaaaaaaattatgtaggcaaccatgaaactaataaacaaaaatctttatcgccttagaaagcagaaaagcaaatacttgataatataatataaatccataataaatgtcaagcaacacaattaaagcatttacatacctggagattgatgacaagtataaacggaagcttcttcccagcttctgactacaaattgagaaggattatcattaaaacaggaaaatattttggagtttaagagctaaaactaagattggtaaatatacattatcttccttttgcattaataatgaaacatccccatatcttgattggaatataaaatactattttgtttttttcctctttgaaagtgataagttcacttttccacaaaaagagggcacattaagggatccagataatgggaccaaccacacgaagatcaacatagaagtgaataaaagattattgcattccctttcgaaatagaatatctacctgaacaagacacttgggatgcaatgcaattcgatctacacttttgtcaactttgaaccaatcaactgcaaggagcttgagaaggggttctcctcccattatctgaaaatgttcatgtgttaactaacaccctcagaactatttttcagataagaacatccactaaataatgcacatcaattactcgcaagaacgcccacaaaagctacaaatcattcgattaattcgtagaatataggaaggaaaaaaccaagtttccaaggaaaaccaaacacacacacacacacacacacacacacacacacacaac

SEQ ID NO: 226263 - DNA, 1959 bp, Cannabis indica
atgtcaagtactacaatgaggcacttagaagtgcaaagagaaatgaatttatccagctgacccagaaagagaatatgagcgttactgagtacacaactcagtttgatcgattggctaggttggcctcaagaattgtgacaaccgaatttagtaaaaaagaaaagtacctagatggattgaatccaaaaataaaacacgaccttatgattatcactgatgacaacaccacctatgctgatatggtaggaaagacactaagagcagaggacacagttgagtgcacccaagagtcctgaggggctcatgtttttggtggagcccctactcctcctacccctggttatggtagggggtgtagtgactcgaccactgaccaaaaaaaaaggcaccatttgcacttggtggctcaagtcagaacaagaggttcctagggatccaaggtcgaagcaattgttaaggtggttctgaaacttgatatacccacccagattgtcccaattgtaagaagcatcatctgggtgagtgtagagggtgaggacgtttacagtgtgggttgcctggacagtataagagagactgtccgcaactcaagaaagaagaacaaaagataacattaaaacctgctccagcaagggtgtttgctttaactcaggttgatgcaaaagctagcccttcagttgttacaggtcacctctcgatcaataactattactcctctgtattgtttaactctcggaccactcattcctatgtggcagccaaatttttaataaattgggtagaccgtatgatagttatgagaaagggtttgcaaccttactgcctggcgaagaattagttatctccaaaatgtggattacgtctatcccaatcagaattattgaggatagggagttgagtgctgatttggtagaattgggtttagcggattttgatattatacttggaaatgatttcttgcccaagtactcagctagtattgattgtaaatggagaatatggtaattttccaacctaagggtgaggaaccgtttgtttttgtgggatcagttcagggatcccaaattccaataatatcggtactgaaagttagagaattattacaagacggatgccttggatttctggcagtggtattgaataccacacgacctgagtcaattcggccagaggacatcagggtggttcaggaatttctaaatatttttcctgatgaacttttgggtttaccaccacagagggaaatcgattttgttatcgatttagcaccaagagcagaactagtttctaaggcacagtacagaatggctccggcgaagcttaaagaattgaagattcagctttagaggttgcttgacctaagattttcatgacccagtgtgtcaccctggggagctcccgttttatttgttaagaagaaagacaggtccctacgcatgtgcattaactatcgggaactaaataaactgactatcaagaacaaatatccgttacctatgatcgatgacttatttgatcagcttcaggggaagatggtcttctcaaagattgatctctaatcgggctatcatcagttgagaatctgagaggaagacattccaaagactgttttctgcactaggtatggacactatgaattcctagttatgtcttttggactaaccaacgctccaacagcttttatggatctaatggatagggttggtcagatcaggcattgagtttgtggtagacaaactccataaattgacaatctgatctattagacaaaattaaagccactcagttaactaattcgaaactaatgaagatccaataagaggttttagctggtcaagctaaagattttacggtgtcagattatgggatgctgttgtaaaaaactagagtttgtgttctaagtagtgtggatgaggaagctcatatcactccatactcactgcatcttggcactaccaa

SEQ ID NO: 226264 - DNA, 1558 bp, Cannabis indica
caaaaaaaaatattaaaaaaatgaataatacaacataagtattcaaaattttgacttcttaatcggcatgaatttaataagatacatgtaagacctatattttaaagggattatttcacaaatataaaaaaataacaaaaaaaaaattacaaaaatacggttcactgaattttaaatatttttacgattttttttattttattcacagaaaatacgatatttttatgttgtactcttgttaatttattattgattttttgttatttgtatgttattttttattgttatttagatgttattttcatgttacttttatgtagttttcttaaaatgtaaaaaaaaaaatttatttaaatgtaaaaatataattgttttacaaaaaataatgtcttatgtaattattattattttaaatcattgagtttgaatgtgtaatataagttactacaaaatcctctttcaacaaattcaacaaacaagtttatacaaacaaaattactaatattaagtacttataccgctaaaaattttattaaaattatgtcaattacaaagtcaaatttttaagtgcttatgctacaaatatcaaattatatatttatgaatttaattagtacgccatgatttcatgccaatataattactttcgtaccatacttaactcatatttttctcgtgttgtgtgttgtgaaaaattgtatacgcaagtgcacgcaatcgtaacaagtaataaagtgataaatcgagtatcgtctccacagggattgaaaattggaaattaatttataaaactaattactcacaaattggtttcaacaaaaaaataaaataaaataaagtgatgagaatatgtaaaaaaaaaataacaaacacaaactatgaagaaaacaagctagaactattaaattgacctaaaaaatgcaaagttgatataatggtgcaaatgagtattgttgcaaattgatgatgtcaactaggaatttaaaatgtcataatcctttttccaaagtatttatggtttgattctctaattaattaacatattcctatgcccaattaattttaagaataccaatttaagcacaattccttcaagtcataatggtaaattgagtttgataaatatatacatattataatttagagggaaaattgtgagaaattattgtgggaaaacatgtttcactttataacaactggtgaaacccactaagaacataggagagaataataatcttgaaataaataaaatatttttttatttatttatggaatattagcagcaacaccacttaaattttatatttttaacacttaattacataaactaattttttaaagacaacctactaaaccccattctactttgccttttacactttccttcaaaaactttaattaagtgacacggtagactgtccattgaaagaaaattaccataatattgacttgcataaataaaggaattgggaaaagaaattggcaacaaattgtcatcttttgacaaggtaattacaaattagtagaagaaagctcataatatattcatatatatata

SEQ ID NO: 226265 - DNA, 1991 bp, Cannabis indica
gatcaatctagccatccatcgcatttttcgttgtcgtcgaacaaaaattacaaaaatattatattccacatataaactaaataatacccctagagtctaataaaatctccggaattgagaaattataactctaatatttatttctaaatattgggatccattattaaataaattcacaaataataataaaataataaaaattagtgctaattgcctttactaatccaaattactaaagcggtcattacatggatcgtgagaagaaagagttgctggtggtagtttcttgggctgtttggaatgccagaaatgatcgggtttggaaaaataaagttcagagtgttgatagcatcatttcatcagtaaaaggcttccttaatgctcaatctgctggttttgagctctcgtcttctagtttgattcatggagacggagctgagcattgggcggctccacaagaacatagtgttaaggttaatgttgacacagcggtgtttggtgaaacccgacaatttaggattggtttggtggctcgggatgcacaggggttgcttattgaaggtcgtaccaagattttccaaggtcactcttctcctaagtttatcgaggccatgggcatacgtcaagcactaagttggatcaaggctcgtcactggcaaaaagtggtcctggaaactgattgtctttcggttgttcaagccttgcgaagctcaatttttatgatatccacgttcggtcaagtggttaatgattgtaaggctatgcttaatgttttaaaaaatgtttctatttattttgttcgtcgatcaacaaatatggtggctcataagttcgctagagcctctgtatcgttccctgattgtattttcagtctgaagtctgatccaactgatttgttacctggtttggtaactgaaatggttatctaataaagtatgattttccattcaaacagaaaaaaattgactattttttagaggaaattacactcattatgggattttaaaagttgttaacgtaaatatgacacttttaagtttgactaatttatatggtattttttttttatttttaggtatttttatgatatttgatatgccatatatatctaaattaggttttcaaatctcatttttaatatttttacttgtttaggtagttttatttgtcactgatgctaaaaaagtcaccggagtttgctgtcggcaccggaaatataactgaaatagctgttagtgctagaaaagtcgtcaaagttgttgccgatgccagaaaagtcatcaaaattagtattgtctctgaaaaaaatcaccaaccagtttcttgatgaagaaaccaatttcttgatgaagaaatcacgttcttggtgattttccggcgacaatgccaattccgacgacttttccaactccagtgaattttccaccaccgacagcaaatttcataaaagtattcagaattggcatagtcgtcgaaaaaattatcaagaaacgaaacgaatttcttggtgattttctagtgatttttccggcgacaatgtcaattctgatgacttttctgatgccggcagcaactccgatgactaacccagtgccgacagctactccgttgacttttctggcatcgacagctactccggtgactttttcgacaccaacaacaaactccgacacattttcttgtaccggtgacaactccggcaatcactgtagttttatttgttttatttttaaaaaaaaatatataaagggaattttaatattttttatggtaattcaatccataatgttaaatttttattttaaatactatattttttcctattaaattttcttaccatatctatctaaactagctttactttttccatatttatataaatactccaattttttatggtattttattttatttttgggcttttatatagttttgaacataccatatttaagtagagttttttaaaattccatagtttttttttttgaaat

SEQ ID NO: 226266 - DNA, 2763 bp, Cannabis indica
aatttattatattaaactatataaaatccgatattaattgtactaataataatatttacatgtaagagaatattagacgatcactttagcatttctcttttattctcttcttttcttggctttgctttaattgaatttttggaaattgaaccaagaggtctggtggctttaaagaggtctcaagctttagtttaacttcttgaaatgggagaaaaattgtatatgtaaaagtaaattatgtattcaaattttggaggtgtgaaattgtcattttgcatcttgattgttttcactacttaatcatccaattttatggtcattatatcatgcatgagatattaggattaatttgttgggtcatgccatttggaatttattttcttgcatccaagcttgacattcttttttttcttattactaaaactatcaccatcactttgcacccttttgtgatctgagtgacaaaacacacacacaagtccaatttctgcatcaaattatcaatataatacctaacatttgaagaacgtttcatctgcctactgtttttatgattctgatttctcatagtttgaggggttgatgaaattaagcctatgatttaagttgtatgattgctttttgtagtttgttttttaccctcttggaaatttgtacatcttattccatagaaaggtctttctaactattttcaaaattttattgttcattatcttttgtatgttttgatttaatttgcttgtggaatacaattaaaagggagagcaaaagaattatggaaattttattgttcatttgttctattcttttttgaagcttttgacactaatgcgtctacaacttgcattcgtgagttatggcgtggtctataaattatttaggcatatctttttaatttgtatgatttcttattttgattttgggcaaatactattttgaatctagtgttttgcaaaaattaccaattaaactttctgttttgttaaatgacaaaatagaccctatattttctaaaatagtaaatatagagaactcaattttcaacaattttatttttttaatataaccaaatttaagataatttttaatactaatagatatagaaaatgtaaccaattttgtcataacatctctaaattatattattattaagttttaatttgacaaaaaatcagttcattgtcctatttgtacaattttaaaaaacatccaagccagagacaaagaagaagaccttgcagtagagccaccaccttcgccacatgagtagtaaacccaactgttgctggagaagtcgttgagcaaaggaactccctagcccgattcatcaccaccgccccaagtctaatctctcaatcttgatcttaatgccggcatccacaaatagatcgacatcgcccaacaccaaattagtgtttgagtttccatgaaaaggactactcgctcgtgaaacaattagcactacatccagagaaaaaaggagtttgagcatcttagtacctccaaaggaaactcaatgaccattggctaaccataaaatctgagagcaacttatggtcatggacaaaagtgtttcttctatgccacatccgccaacaaagaaccacaaactcctccatttcatgcttgagagaatatctatacaacccaccaaaagctcataaaagttagaagcctcttttagtacatcaagacctctcagcacccacccttgcttgatttcttaaagagaatggcaaaactaaagagcatgcacaattgttttattattctgaatgcaaacaggacaaacctttgcagcattcattccatgtctaaagagattaccataacgatgcaaaaaattcaatttcgctttcgaaataaaattcttaacttttggctaaatagagagggaccacaagagtttccacctacgagacagacccaaagaggcagctacttgaccccatcccaaccttgccacagagctccaatatccacttttgaccgtatactgaccattatcagtgtagttccatatcaaataatcctgactagcataaatacaaacaagaatagacaaaacagccttagcctcaacctcattaaagagagctttaaccaaagagacattccaataactcttagccaacttgagatcacaaaaatgttgaaactcaacaccaccccaaaagaataggcgcgacccacatgatcttttagagtccaagcatcttcaccaatacgaacatgagtcccatcaccataagccaaagaatcccttttatcaataaatcccaaccccaaaggatgtttttcttaaaaacgaagctctttcagtttcctccacatgaatcatgttacttgtattaaaatagaagtctttcattaccttagcagccaaaaagtcaagaaagttgtataactgagcagcttgcttggccaataaagattgattaaagagaaatatatcccaaaagcccatacatcatctgacttatgccaacacaagcgagaccaagtgcaccattgtattttttgtttatcaaggtcgtcccccacaagaagcgagcacaaagaagatgaatttcattaataatgcccacagggattcgaaacaactccatagtataagttgggatcgcttgaataactgacttcagaaggacttcatggccaccaaaagaaaaaaagtttagacttccaaccatacaacttgttctaatattcgaccaagaataggtctactcctagtctactcctcgagtgtgtttattttat

SEQ ID NO: 226267 - DNA, 1783 bp, Cannabis indica
taatttataaaagcacacatgtagtgttcctgcggaatagggtgttatactctagctaccacgtgtgcacattaggtcaccagcatcagctctgcactaaccagcgcacgccgcctgtaatctctatcaactccaaactaatagccattagccacattgcacctgttgagaagaaacagaaggaaaaaatgagttgttatttggctaatttctcatcctaaaactacactaacaaaagccaaaaatcaatattttctcccaacattttacacataaaaactcatttactcctcccaatttatttcaccttaataaacaatcatatcttatttttaccctatctttttcactacttttccatccaaacaaatatttcatttttccaatactcttatatttactctaattatcctatcacttctcaaccgtaattaaattaatcaatttatgtattttattttgattaatttaattccttcatttctcctataaatagagtgttgtaagaccattttcacaccaacatctctcttactactctactcttccactcttcacttctaaacttttcatctcatagatcactcttttacaatttctttctatcaccattttctttctactatttttatatcttgaagaaagtatatctatcttttgaaatttttatctagttatgaacttctaatctttttttttcaagattattaagataacgatgaatcaaaatataactagatgatatttatttttgtatgttgattttccatttgtgcaaacatttttcatgaatttttctatcaaaaatatatatttttttatcttcagtatcatgtattcttgattgttaaagcatatttcacttagttcttcaatgtgtaaaaatatagtactctataattaaatatctttcattaaattgtgtacatctaattcttagaacataagtattatattttgcctacaaataattaattttttgtagttttattaggtcgtaacacaatgaatgcttaaaaattatatattttgtaagtgaagaaaaattatagatttttaaaaataacttgttcttaaatagaaaatatattttagaaaatatagtgtgatttattttaactataactaaaacttgggaatcaatatacttataaatactactgaacttgcatattgtgaattctaatatcttaataatcttattttatacatcttatttgaaaactatttctatattcattcaattttatttcaaatcattttattacttgtcttttatttttctaaaacaatctcatcaaatatttggaaccaggttagaatattattgtttcgtttgaaataatttctctttgatgttaggcaactcctttggattcgacctcgtacttatatgaatattatattatgagacgattcgtgtacttgtgagtatacatatttaaacacccacctttgggttcaacacttggaccccagacttgaccccgatcctgacaccgaccttgatctagactcgactccaaccccaaaccgagacctggacttgaccttggatcccggacctgaccctgaccctgatcccaaactcggaccttgatgagagagaaaatgaggagagagaaagtgatgagagaaaatattttgagaaatttagaaaaagatgagtataataacgttagataaagtggaaaaaaatattgacaaaaagtaaattattttctaacacagaaaataacattttgttgttctcaaaattgttgtttattgtaactttattttt

SEQ ID NO: 226268 - DNA, 1850 bp, Cannabis indica
tattgctcccattcaatgatgccaaaaatactccaagattactgaatattcttccttattactgaagtgattaatgtttattcttgaaaagaaggaaaaaaaacagggtcatgtcattatatatgagtagctcttgtatctattcactaaaaagctaattaaacaataagaagagaaacttgatgagcacaagcatcatttgaaaagccatctcaaattgttttaggaaaaacaagaataatatcagtgtatccaaagtcatcatgttctattaatagattagtattgctataccaaactctgatatttctcaatattatgaattattggtagtgttgatgttttataaattttctagcatacacctcaattatatcttcttgtatgaaagaagaatgagaaaattcaatttctttcagaattattagcttattcatattatttatatctaacaacctatcccctaactaaatgactggtttaagtcctaaagactccttttgagtggatgatttcaatgtaggtacaagttacgaaggcgatatcatgttaggctatcaaataaacaccataaactggaaaatacataagacagaaaataattgtattgctggctggtacagaaaagttttaagacaaaaagaccaatcgacatatgacattatatacatatcaatggacttctcacaagaataaaatgcatagtaataataccaattaccataggtaaaatttatgcaacaagcaaacatgactagacaatcttctctattatctttttggaaagaatgcaggaaaacaattcaaaagcaaaaataggtctgaagaaaaaatcaaagctgaatgacacaatattattacctggtctctgaatggttgaagaactttctgccgcacaatacaattgggaaataatgctacaggaggtacctatgtagaaagtcacatgagattctggccacacatgtataatatatattatatataaaccagtccttataagatatttttaaaaaaacatattatgtgcaaaccacgagtgaaaaccaatccagttcttccccaaatatggacaccaatatgctacattaaagtccatataaaatcaaacctattttgattatcgattgtcatgtagtagtgggagttttttttatgctaatcctactcgaagatctactcatattaacaaagcaaagatcctctaccgccaagccaattactcagttttgaccaactacacttcgtaataacaaagcttttgagttaagtaaagaacaacctaaacatctaaattgcacaaagttaatctacaacaagtcgtgaatgaattcaacagtaaaaaatagccacaattgattgagcatctctacttagatactctagtagctctatcatcatcattaaaattaatagcacaatttcaacatttctatctatttaaaaataaaaaatcaaaatagaaactcagtataaactaacagaaatgatgaggtttagaaactagcaaatgactaatttatttattcttagcgcaaataaaattaaacaatattatcaatagtaattgtgacaatagtaaatattatttcattccactataggaaaggtgttctaatctaactactactttttctttttttataaggattccactatatgtaacatcacaggaaatggtcataggtgtacggttgacttttaagatcagaccaagtcatctaaaaaaagcagaggaatgtacgtaattgacttgtgttaatcaaacatttaccatttctcatttaggtaggtgtgttatcatcatttaccatttcacacacacactcactcacactacaaaaatcata

SEQ ID NO: 226269 - DNA, 1548 bp, Cannabis indica
aagtattaattgtaactctaaaatacgaatattagtatagttcaacatacatacattaagtatccaaaaatcatttaatacttaatagtataaaaaacatattatgtttagttttcatatatcaaaaagcactatatatacattatactaaatatctcatctcatacaactatgaattaggaatagcaagcataaaatagacagtgattagaaataatatcatataaacaactatgagaatataagagtttaaaaataaaagaatggtggcatattaccttattttaataaaattgcatatacaaactaaaattattagaaaattaaacagttatcaaaatagtatataatagggaaataacatttgactacaaaatataacgtatattagagtatttatggtaggtatttatagtatttatataaaataaaatatatataaaaggaaagtatagaaacgaaaaatataactgtattgtcatattgtcaataatataggagcaaaagtagtaattttttaatttaataaatatggtcatagataacaataacttatttgatttgggtatattttttgttgggtaacatatctataattatcttgtcatacatgtgtagtattgtaaactccccttttataaacacttgatgcttactcacagtacagtgcatgatggctctcctacgagaaagtcttttggcaatagaagagtctttcctttatcattagatcacacttaatgttttatgtaagttgggcttgaagggaataaagttagagtaggattaggaccgactctaaaatatagtttgtcgtaataaaaaaaatattttgaatttttatttaaaaaaatgtgattttttttgttaatcagtaaaaaaaaaagtataattttagaagattttttttttttgaatcctaaactagctgagttctatatacaggcttagcccacctatacttaaggccggacctgatttagagggtgcttagcgtaaggaaatatgaagaggaaattacactttataccctttttatgttgtcctcttttatttttactctcttttttaaagtctatcatttttacttctttttttaaaacattatactaattttgtccgtgtcacttcaagatattctccatgtgactctcttatgctagggtattttggggacaatacattaaaaaagaggtatgtttcaattaaatataagattagaggtcaatttgatcaattgattaataaaaatggtatttttcaactcaccccaacctcttttgaacacactcccttttggtagataaagaaaagaaactcttttgagtttaaacactcattggcctttttctaaagggaagcagggaggtctttaagggtgtttccaaagtgttcattctcattcggatattgcttaaggaaaattgattgtcattaatgtaaaagttcaagtgtcttgatctgaacattgtaataaggattctttggaaggagtttaaagaggaataagttctatacaaattacagaggaaagttcaaacctctcta

SEQ ID NO: 226270 - DNA, 2214 bp, Cannabis indica
attatgaaaatcttgagttggaatgcgcggggtttggggaacccgtctgcattcaggcaccttcggttgcttgtcaaacagcaatcgccccacattctgtttcttatggaaacaaagctcccacagaattctcttacgcattttcggcaaactttaaattttagtaatggtttagaatcaccacgttctggtctaagtggtggaatgatgcttctttggcaacatgatattgatgtctctattctgaattatggtagaactttctttgatggttttgttcaagtggagaatgacaaaagttttcacctcacagccttttatggtgctccggatgctcacaataaagctgattcttggctccttttgcaacgtcttgctaatgtgtccccttttgttccatggtttgttataggagatttcaatgaaatactatccaacaatgacaaatccggtggtggtttaagacttgaacgacaaatggaagcttttcgcaagtctttggatctttgcaaattacatgaaactacttttgaaggagatcgcttcacttggataaagaaccgttcaggagtcaacaccattaaagaaaggcttgattggtgttttgtgaatcatctttgggtcaaccaattcaatgctccacttgtacatcatcttgactattttggctcagatcacagagcaatctctgccacttttacaccagtaaactcactgctccagcaagataaaagacgtagtaggttccgctttgagaagttatggctttcggatgaacaaagtaaggagattatatcggctagttggcaatctacttcagcagtcgatcctattggttcagtccttcagaatttggaagagtgtgcttcaaaacttcaaagatggcatattcacaagtacggtaacatgaagaaaaaaatttccgaggcacaaaagaaagtggaaactcttaacaactctccacaccgaaccacaattgctatggattcattgaaaaattcagaggctgttcttgatgatttgttggagcaagaagaagtctattggcagcagaggtctcggattgattggttaacctcgggagatcgtaacacgaaattctttcatgcaaaagcttcagctaggaagacaaacaacaccattaaatttctggttactgaaacaggcaatcgggttagttctaaacctgctatggctgctgcaattcatgattattttgcctcaattttcacgacttcaactattgatgagaatgccctcgctaccactttaaatgccattcctacaacgatcacacctgaaatgaattgtgatcttcttaaacctttcgaagcagctgaagttgagttggctttaagcatgatggctccgaataagagtcccggtattgatggtatgtcccctatgttctaccaacaaaactgggctgttgttggtgatttagtgacagctactgtgttaagtgttttgaataatggggctgatcctacaaggttaaaaaaaaacactaattaccctcatacctaagatcaaaaaaccacagaagctacaagactttcgccctattagtctttgtaatgttatctccaagctaatcaccaaagtgcttgtgaaccgattcaaacatgttctaccctatgttatctcagaaacccaaagtgtattcttgccgaatcgcttaatcaccgacaatattcttgttgcttttgagcttgttaatgccatcaagaacaaaactacgggtcgtaaaggggtggcaactttgaaattggacatgagtaaagcctttgatcgtgttgaatggagatttgttgaggaggtcatgaggaaaatggggtttgctaatggatggattgcactaatcatgagctgcttgtgtaccaacagtttttcatttctcttgaatggtgaggtcacgggttcacttactccatcgagagggcttcgcaaaggctgtcctctctcaccgtgcttgttcttaatttgttctgaaggcttatcacggctgctccaacatgaagaagcgatggggaatctgaatgggttcaagttaacacgacatgctcagtccatctctcatttgttttttgcggatgacaaccttcttttctgtcaagctaatgagtcttcttgcctcgcaattaagagatctttggatgtttatcacagagcatcgggccaagttctcaaccccgataagtcagttatgtcctt

SEQ ID NO: 226271 - DNA, 2860 bp, Cannabis indica
caaatgtagcctgtacaaaagttcataaaatttcaaactttggtaacaccaattaacaaatcacttcacttcataaaaaacttaacttgtctaaatttgattgattatgctagccatattcatcatttgtaacgaaaatttaaataactaatcaaattttgtttcataccccagttaagagaatcacattcaattcctaaaaaagcttaaacttgtccagataatcattcaatattactaaccaatttataatagatagtaatgtttatgaataagaaaaggaagaattaaattacaaaccttgacgaagttgccaagagtctttgtggatcccctggatgaagtgaaaacatcatcaattccagcgaactgaagaaccttctttggaaccctagcagccacaatcccagcaccacggggagctggaaccattcggacagtcacggaaccacactttccggtaaccttgcaaggaacggtgtgaggctttccgatcttgttaccccaataaccccttctaacagggatcacagagagcttagccaaaataatagcaccccgaatggcggtggcgacttccttgctgcatttcacaccgagaccgacgtggccgttgctgtcaccgacgacaacgaaggccttgaacctggttcgctgaccggcacgtgtctgcttctgaacaggcatgattttcatgacctcatcctttagggttggtccgacgagggtatcaatgatctgatgctccttgattggtagagaatggagatagatctgctctagggatgcgatcttaccttccttaaccagacgacctagcttcgtcactggcacccacttctcctcttcctcacgtcgcccagcgcgtcggcgaccaccacggcctcggtctccaccgcgtccgcgaccaccgaagccgcggccgaatccacctctttcgcctactcctctttcacctcctcctctttcagccatggttggaaattagagagaaaccctagctcgtttgtgctctcagtgagggaatgagtgaaagaagaaggcgctgaacttagctttggaggtaatgtatagactctagacaaaaaccctaatggggtttggaaggagactctattttgggcttatactttgggctcttcatatccaggcccatattggacttaagcctctacaattttcttttaagtatttcaaaaatatcatattttttaggggtatgcatatcaaatctaattacaaccaacgactaaatattggatatcagattggattggatgccatttttagatattcaattggatcagatcggatcagtgtttgatgagacgtccaaaaatccaatactatctaatatctagttgtttttttttttttttgctaaagaatatctagttgttgttatacttaaaatacatgtacaactaggatttcaatttgtgttttatgggggattgaatggatccaattaatatttgatttaaagtattggatggatctaattagattcaaaaagattgaattaataatattggataaatccgaactaattcaatagatatacataaaatacatttaatagatggaaccgatctaatccaacattctattaaatttgattggttcgaataattgaaattaatgagatcagatcagttggaagaattcaacatccaatctcaataggccttaaaccattagatgtggtctaataaacactcttaatcttagttattttaaataaatcttagttacttttatttcatgttgtaataattagttatttagtttgtaacttatatatgtaggattagtagttttgataactttatgagatgcttctctaaattgtgtttgctttgatagttcatccactttttagtgcactataatgtctcatttgttggtccaagatttaaattgattatatttttgtaaatttttcaaacaatgtgccagaagagatgtctcatttgttggttcaagattttataatgtcattttaacccaaattgtagacaccttaggcccaaattctgtacttttgtgaaagttccacgtgatttgattacctcatgcttctttcgtataaacaattgaaaatttatggtttcaaattgtgcatgtctatactcagaaaaaaaatgtgcatttctaaaatatgatatttttgaaattttgatcctttcaatggaattttgttagttttcaacacaagtcaattttgtctgaaagactttcgatataggtcttaacattaatttgcagtcggtcaatggtagttggagttcatccatggaggaggatgtttggaagatgctgtggaagattaaagcccctcgtaagattttacattttatttggaaagctctttcgggttgtttgcctacacgtagcatagtaaacatgttcctgtggatttacattgtgtgttttgcaatgttactgaagagtccattttccatgttttagttcaatgctcttttgcgcattcttgttggctccgatcagcgttaggtgttgggcattctgtagctaccaatttttttgactggtttttggaagtgttggcagtaggtaatatggggttggttgaagaagccgtcatggttggttgggcaatttggaaggttcggaatgatatgctttggaatggtaaaaattgtagtgctgctgatgttatttggatggctcgtaccactctgcgacaatggacgtgtgctcaatctaagaggctggattcgatttccctggcctcgagtcgcactgacacaagagaacactggtccaaaccggctgctggtcagttaaaaattaatgtggacggggcggtttttgaagacacaaatgaggtagggac

SEQ ID NO: 226272 - DNA, 2360 bp, Cannabis indica
aaaaaaaaaaaaaagaagacgatagacagagaaaacgaaaggggtaattcccagatttcaagattgaaaaagaaaaaaaaaaatcccaattcgataattactcgattacacacaaaaccaaccttatccatcagatagggaccgacccatttgatacaaaccccggtcaacaaaaccacgcatgcaatcagcacaatcaaacgaacccaataccaccaaggccttctttttacagaagaagattcttccaacgagtcatctaactcctccgccggcacacattctcccggtccagtcttcaatttcacataacatccattctcaacatcgccctcaaatcggatccccaggaccggtaccacctcgtctctactatcttcctcataataagtcatggaaaccccccaatacacaatcaacaacacagaagcccctttgtcccctccggtatctacaaatacatatatttacaattccctctctaatgtggatctcgaatcagtaaatcaaagcgataatcctagaattgtatgaaattgtagagaatgagaaccggagagaatcaaaggaaccctagggaggtttgcaacgaatttgggacagaaatatgggaaagaatgggatttttagacagaacaagaagaaggattcaatggcaaatttcgatatttaatatggaaagaagtgtaataatagaaaataactctgaaatagcagaagctttactttacggttctcccacatgaaacggcgtcgttttaagtacgcgtgtcgtgtcgtctcgtgaggtaggagtgtgtttaattaaagtgccaaattacataacggttatattgagatgagagtatatgagtgacttttgctttattcatttttattggtttgtcgtggtttcaccgtcacggtggttaagtggggtccgccataatttgggtttgggcctgatattttttttaaatgtgggccctagcagatattttgggccgactatttgttagtgatgtagaaggaggtcagcactgagtcgactcgctcacacttttcctgtaatggccgagttgaagttgacacgtgaaatggggaatagtaagttggcagattgtggatgcaacacgtggaattgggtggacgaaaactcaaagaaaaactagtggcttcaagcaattgtatacagctagatataagctaagcaatttgagttggacctttttttctttttcgtttttttttttttttttaaatatttgttttaagagttagaccattgtcaaagtttaaagataaggcgtagaatagaagtatgatattccttttaatatataatatcgtattaattattattattattttgaaaaaaaaattattctctttaattaagaaaatattggaatttttgtttttgattaaaaaaatatctttttttgaactattaaaaaatatttattatttaattctgatcaaattaaaagatataataattttaaggagcatcgctaaatatttagaagtgttaaatattattagtatttaataataatattttataagtaagagtaaagatcatctttgatagaaaataattttatacttgttaaaatacatatattatcttaaaatattatttcttttatattctctcttatctacataagatttgacattatttcttagaaaaaatacttcaagacaattctatgttgtatactatgatcccacatatgacattttggacctgtttatttcaaaagttgttttttaaaagaaattgtaataaaaatgtatttggtaaactttttgaagaatttttaaagaacctacagctaaaaactaaaactgctccaatccaactattaaaaaaaaattgtaataataaacttttttgtaataaaatcatatttacgtatttattatatattaaaaaaataaaaaaaaattaaaataaactaattataataaaataaataatttttttatcaagaaaaaaactcttcattaaataacagagccaattaaaaattattaattataaatctctcatttttcgaaaataataatttatattttattttaatattaagaaacaacaatttttgttatatacttaagttattattttttttttacatttaataaaacataataaaaaatattataaattatttttatcaaatacatataaatttatatttgaaaaaaaattaaaaaatatgtagaaaataaaataatatataaaataagtttattacatactttgattataataaactagattatatcattatcattatcattataatagatcttaataactcatagtactttgaaatttataatttatcaaacactcaactcagcctttt

SEQ ID NO: 226273 - DNA, 2845 bp, Cannabis indica
gtgctcgctcccttagagcgttagatggggcaaccgcaaatgagactttgagtctcttggctagcaagatgggtcagaaaccaaccttaagaacctctaaggcagggacagccaaacacctctcacatgtcacctgaggagtcttaatgcttgaagcaatgctttttggcagagtatcgtccaccttgggacatttcactggagacttttggttgaaggcatcacctgacctcttctttagcgcacgtagcatcctttgacacataactgcacacaagtaaaaaaaagagatatgtcaggaaagcataaataaagcaagtgaaaataaagttaagggaaattaatctaccctgaatgtgtacaggggcaccctcacaaacatgtaaggaagggacatcctcataagaagagtcttcttcttcctacttgaacataatggctttttcctttccttccacttggacggaaggatgagtagcttccttggaaccatccctaatcctaataggccgctcaataggtacttggtcaccttggggagttttcttctgtttcttcttcttcagagcttccagttcgggcataatgtcctcttgtaggccaaacatatactctcctgctacctacttggccccttgtccatcatcaattagatatagtttatacttgataaaattagcctcggtagccaaaagagaaatattccaagcatccaaaggaagtttgagtatttcttgggccctcttaagtcctagcatgaaaggagactgacagtacgagggaatgtgttaaaaacttgtgtgattagtgtccacgcatttgacaaaatattagtcctccataaaaccaccaatcttggacacgtcagtatccatggtgccacttaaccacttctcttcgatctgggagcactagaagtaccccaaacctattttgcttggggctggacttcaggtgaaataaccagttggtgacgtgggtggatggctgatcccatccttgagaagcgtacaacacgaatagggcaaaaggtatttaatgcccttgggagtaagatgggtcagactgatgtggtagtaattttcaatctctttgaagtatggatacaatggaaacattgcaccctgcttggcatgaggacccagcccacacagtaaccctctctaggatcagttgtgagttttccgagagaaggaaggaaacactcgacctacccaagaaggccttcctcgaagagattggtcaatctcttgaatgtcaggacggatggtggagagacccatcgagatctcttcagatccctcctatttatgggcgagcctcgatgtattcttcctctatgtaatcttagccagcttctagaacttttccaatttcagaaataagctctccttttccattaaagccaccaaaaggcatcactcagattaccctctcttcctcctctccttcatcctcaaagggagtagcatgacggacctcgcaatgctcctcaacttcttggacctcaacgtctctctcaatgacattttctttgtcgacctaggtcgggcttattccattccagctacagcgaacagtctcggaaaatgagggtcactctttgaagttttcctcattgtctgctgtattcgcgccattactttatgattgggcgatgaccttaattcagttgtgtgctgactaatagttataaaaaacttggccacatgggttccctcgacatgcggggttggacgaccttcgggcagagtatcaatgacacttgattagactctgtatgtctagttagcgggcagataatgcctctaacctttcttcaattcccagatgaaatgcttgtatcctttgccacacacttgatcggataccaatgatgctgcacctcgagctcaagagatggtgtgtgctcactactcacttcccagtcttcaaagctagaatttgagaggttatcactaaacgaagatgaatttgcacggagtcgagggtggtcttcgtataaaagttgaagcaagtcctggtcaatgtggtgcttgcctccccagaaatcaccagggttcatctacaaaaggtaggagataagaaaataagagttggtcagaggaagagatgaaaaatagattttatatgccgaccattccagattaaggataaaaacaaagggtgtcactcaaagttggaattcccaatcccagaagttcaaaacttcaaagaaaaaactagaaatttttagaatctcatgaacgagtggaaatgaatgggtccaggctaaaatcgatacgcagtcaaagaattaaaagttatagttaaacattggttaaagttccaaaccttagaactatctattctacattcagtcaaaaacaattcaagaatagttaaagttcatggcaagatatctagaaaatgatgcatatattcattagcaatcagctaaaagtagaaggaataagtgacttactcactgttcaaagttttcttgatttccttggaagacaacgtcaataaatttcttggcaagttccttcaaaggtttggaagaaaattgggatgaaatttttttgctctggtgccatgagagtaaacatggctaaaagaattcccaagagctttaatccccttttataggcatccaaaaaatgaagataaatcatttaaaattctaaaatttgggttttcttcccaaaagtgaatgttagtactcattacaagaagtacaaccatcacgcatgctgtgtcattcagccatcaatacgtgattcgaggtaccgtttttaagaggtatttcatgctcagacaccaaagagactcttagtcaaagtcacgtcagatcaacctcaac

SEQ ID NO: 226274 - DNA, 1110 bp, Cannabis indica
aaaaatatatctatgtatcgatcggttcgcatgcaccaccaaattataattaattaatattttcagcgttaattatgcacaggtgggcgcctgtggggggccgcataatcctccgaccaccacgaaggcggcggaagtggccgcggcactagttctacctcatcatcaagatcaccataatgaatatcatcatgatgtgatgatgatgatgatggtgatcttcttccatgtagtaccgcttctttctgatgttgatcgtgatcatgatgatggtaattgttctcattatctaataaccccatatcatgatgaaaacctgttgttctaaactaattaattatttcgatatactatatatatagtactttttaaattaatttctaagataatatttaaggaaaaaatacataaaactagctagctatatatatagttattaattatatataaattaaaaagagtagtatataaaattcttacctgaaaaatgagtagttgatctggctgaagatactaaaaataatgtctggtatttgcaaaggaaaaataatataatcagaaaattcatcatcaagatatatcgacttatacactacactagatcataacatatatatatatttgttctatatatgtgtgtgtgtgtaagtgatgataatcattatatatatgcgtgatgataaaagatagagatagggttaattagatatcaatcaatagctaagaattttatatatatatattacctaattaagactattgaaaagtatataataagttaatttcattaaatattatatgatctgtgaatctctgctgcaggcatataagaaaactcaaaagacagtatttttgtacatttttaatgaatttcggtatcgaatattagttttcacttttcagttttatttatatatataaatttatatagtcgtttttcttatttactatcaactagctacaaataaatttgtaaaaaaaattaaataatttacaatattaaaaataagcacaacatacactaatatgaaaaataagcacaacattaaattaattatattaattattgtgcggtaactattttaccattttatttcgatatgataattt

SEQ ID NO: 226275 - DNA, 2562 bp, Cannabis indica
aacagactctaacaacttgatacatgagatcttcttggcgcaaccccttttttgcttcaaagaaatcatgaatagatccattaaatgatagaataaagcaaggagtttggatacataccatgacaaggcaaacaaagctagctagctaggaaattcagagctaaaaacatttcttcaataaagatccattcattatattgttttttgaagatctaacttgattatacacttcggtctagttcctttacacccatagtgcctcacctaagttttgtactaccatgacaatataggcaatgaaccgaccttgaataaagccggtatagttttgtgctaccagttcaaggtaaaatctgacctaagtcgagaaactaaattatcgttggttgactaactttaagtaaaggacatttaattacaatatgctatagatctaacaaatatacattatttacttatgtatagagatattatatattaagtaaaaaatttattttatagtcttttcacttcttgtgttatgatatatatataataaaataaaataaaaaataaaaactaaaacccctcaagttcattagttacaaagaaaaaaaaaagtattctcttttagaaaatagaaaattacaagaaacaaaaaaaagtactctcaagagcaaggattactattgaaattggtcttttttttaataatctttcaataaggcttattttcttaataattaattttgataagtttgatatttaatcaactataagagtatttgtaatgaaatatatatatatatatatatatatttatatatatgaatctacttccatattttagtattaattttgtaaaaatactacttaattggtatgtaaaaaattgtccctagttgggaggaaatgccacacaaagaatgtaaattaaaattactaacagaaagctaaacataatctaacacatatatgtgatcagtaaattattacaaaagactacaaattcataagttacattaatcaaatacaaatcttcatcatgtgtgtttttctatgtgtgaaatatcatacatatagtaggaatcaaatacaaatcagcttttcttcttaaagtaatggcagaaaactcagtcatatctaaatctttaggttccattccattaggcagtttccaatcaaaatggtatagtaacaaagcaagggaaagctcaacattggtgataccaaatgacatgcctggacatattctccttccagcaccaaatggaataaactcgaaattgctacccttgaaatcaatagagctaccaacaaatctttctggtataaaactctcaggttcaatccaatatttagaatctcttccgatcgcccaaatatttatcatcattctagtttttttaggtatctcataaccattgatcttgcacttttctctactttctcttggaattaataaaggagctggagggtgtaaccttagagtttctttaacaagtgatttcaagtatttcatctcattgattgaggattcatctgttgacccatttctgccaaagacttctctaacctcgtcttgagcctttttcatcactctttgatttctcatcatttctaccatagcccaatctacagttagagctgatgtctcacttccagctataaaaatatcctgacataataaatgaattcaccattttttataaaattatatgaacttagagaattatatgtatgtattatgggtaaatactattttggaccttgtgttttgtaaaaattatatattgattagactatctgtttcgttaaatgaaaaattgaactcttattttctaccaagtaataccctgaactgatgtttttttaaaataaaaattcataataattcgatctagagttgttatgccaaaattgggtacattttttgtatttattcgtgttaaaaattgtcttcaaattggttatattaaaaaatatatataaaaaaattaagctaaaggtacttttgtactattttaaaaaaaatatggtcaaatttattattttacaaaataaagggtacaattaataacttttgaaaagaaaagatcaaaaattgtattaagaacctttacaaaaataacatgaagtttaattagattataatgatatacagaaaatgaatttaaatttgaggcacttacccaaattacagctttgatattgtcaattgttaatgtgaacccaagatcatcaccattcttcttatcatgaaactttagaagaacatcaaccaagtcttccttctttccatttgtctctcttgacataatattttcattctcttttctatgctctttgataatatcttccattatccttgaagaccttaatttaaagctctcatacttaaccctagtaatccaatcaagaaaactcaaagaaggaaagacctctccaaatctaaagcctccagctaccttgagagcttcctccacaatggatatgaactcatcatgatcactacttttcttgccaaaggcagccctagaagtaatgctatatgttgaagctttgaccatttgagtaatattg

SEQ ID NO: 226276 - DNA, 1395 bp, Cannabis indica
tttctgatattaagaatattaagttttaaaattaaaaaaaataaatgtaatgcatctgaacccttcacgtgtccatatttacgtgttaacgggagtggtagtaacagatgtaagagaattgtaacattgagtatttttgcctccaaaaataaagataaggtatttaagtgtataaaatctgaaatattaggtatttatgccgcaatttatcctttgctaaaagcataattggatgaatatacttatattgttttcttggtggaaaggaattgaggaagcgtttttccttgtctgactgtcctattttattttttaatgggaaagtcagctttatttaacaattagaatcaacctctcaatagaggactcaaatcagttgggacatttcctaaattaaaattacaatcaagatataaaatagaagctctaacaagtttatgagctcccatatttgttaatcgtttaacaaaacaaaacgagacattactcatatcaataagttgctttttacagtcctcaataaaaaaattaaacaaagatatcatacgaactaaacttcaaattgcttgtaagtcctcactgtcacatgttgccattgtttcatattcaaccaactcaaagcttaccttactcccatggcttcagcaagagctggttccattgtcccttggaaaagttttgtaactccttccaacatgaggcctttatcgtcacgagcaatcacccccacattgagcctttgtctttctcaaaaagagatgcatccacattgatcttgacacatattgactcagtaatctggatagatctctgggtcacacccgctcactagattagcgagaattacaagttaagtataagtaaagagacaataatttatagttgttcactttccgtgtcgcgacagtaatggagttacgtctacttcaagttttatttctcacaagatggattacagaaaaatagctaagtctggatgctctaatttctaaagagataaactacagagagattctttgaccttatggctactattatgaacttaaaaaatgagttagtggagctctccttttataggtgaaggtggtcctatttaggttattttttaccgtagattatgatctaacagtgaaaattaacttttgatgttgattgtcaattttcacaattcgagttgcactggcgggatctgcttcgggtaagttgcagtttaaacttctaactcccttggaggtgaaatttggagactataccttcatattgaaattgaagtgtgagacacgacttgatctagcttcaaaatgcaagttgaatcgcgtcaatcaaatcaatattgagtgagttatggctatttaattgaaggatgttttggatccagcgcccaagatgacatcc

SEQ ID NO: 226277 - DNA, 1976 bp, Cannabis indica
gtaattattccaaacttttgaaatgttgtattatattcatataatttttagagctctacatgtgaaggctggattgttggtcaaccacatgaatgttactataagctgtacttagatgcaggaattgaaaattagaacaattcatcattacattgcatatgcctgcttcgtcgtgaaggtcatgaaataattgttatgctgctagatagtgttctttgaaacaaactagttcattgttatatctggaattcggtgttccatattcccttttaggcagacaacaatggatgttaaatttattttggacattctaataatttatttcccattttttccctcttcaggagacatctttgcacaatttcaggttatcatgatcggacaatattttcagtgcattggtccaggtattggttgtatactaataattaataaatgttgtgttttttatgtatattaatatatgtgtgacctttggagcattagctagatgaaggccatcaaaatgtgtacttaggtcccttagttgatgttcattttttaattaatctattgacaaaaataatgctctggacaacatttttgttgaaaaaatatgcatcttaattcagtgcaattgattatattttagttaatcaagatttgttccaaaagagatgtgattatcatctgtaaggatattgtatacttgaattcaattgccttggtttttactcttatatcttcaattcttcatatgtttttgcctattgaaaacttctttccttgttgcaatctaatcccattaattatctataattgaagggaaggtatcatcgccagtggcgcagctgatgatgccataagattttttgtggaaaactcagacaaagatggtttggtataattcatctgtgcttatcatcttacaattctgtatatatataattctattgctgattctctctactttttcttctatcctttttctttttatatatatgtatattaaaggttgatggacctatgtataaactgctattgaaagaggaaaaggcccatgagatggatgtaaattcagtgcaatggagtcctggggtaagaatttttcagaaatactttatttatctggaacccttagaacattcactttcttctactaccaatagtcgctggtgctgtgttttgctgaaaaagataatatcattttctccactttttattttcaccatcatcatctagctttcgcatattactgtgtttggtttggtcatacattgtcatttaaaaattacaaaatcgaagatacaaggttgagagagctagacatagtactagtttacacattgtttattgccttaaattgtgccaccatattcactttcacacttttatgtaatgttttctcatgtatttatcaggagaaacggctacttgcttctgctagtgatgatggaaccattaaagtatgggagcttgcacctgtagcacccagctgaagaaatttacagaatctcctcactgaattatgtgtaacgcaaaaatttacttttattggtccaattttgtcagtcaacagattaattatagtttagcggagaaacatggttgttgtaatttttaacaataaattgttgaccatttatttaaacaatgataaggttttgagtgagcttatttttaatttatgtttactaattagcagaagttatcttgttctcttcctcttcttcattttttttttaaaaaaataaataaatcatgttctcttctattttataggtgagtctctattaacttaggcggcgtttggttgtgagcaataaaaatataggaataaggatgaaaattagaataaaaattgaataacatttaaaatgtaataaaaagttaataaattttttctaaaatcttgtattgagatggttttccctttatttcaaaataaaagtcattctactaaaatagttgaaaaagatgattctatttagatgata

SEQ ID NO: 226278 - DNA, 2835 bp, Cannabis indica
tcgacgacatctttgtgtactcttagacagaagaggagcatgaataacatctctgaatggttttacaatgactcagggatcataagttgtatgcaaattttaaaaagtgtgaattctggttgtttgaaatgtcctttttagggcatattgtcaaaaaggatggaataatagttgatccgggaaagattgagacagttaaaagttggccgaggccaagaacagttaggaagtatgaagttttctcgggttcgaagggtattatcaacgttttgtcaaagttttttctaagatttcgatgccataggcggaattgactaagaagaaccaacattttttgtatggtccgacaagtgtgaaacgagttttcaagaattgaagtagcggttgatcacaacaccggtgttagctttgccataagactaggaagcttgttgtttattgtgatgcatccacactgggtctgggatgtattttgatgcaagttgacagggttatagtgtatgcttcccgatagttgaaagaatatgaacaatgttatccaacacatgatttagagctttctactgttgtgttttctctaaagatatggcgacattacctgtatagaaaaaaatgcgagatctacatagaccacaagagcctaaagtatttcattactcagaaggatttaaatatgaaaagccaatgtagtggggggacgctttgagcagaaaaggttccagacaagtctttagtaccgtaatgatagcatcttagttggatttggatatggttaaggctagaattgagttggtggttggaaaattacataacctgacacttcagtcagatttgtggaaagaattagaaggacactattggaagacgctgagctggttaagatttgggatgagatattggtaggttggcctaaggatttctcgatgtcgaatagtagaatgctactttataaagttcaagtttttgttccaaatagcaatgagttcaaaaaagagatacttgatgaagctcataccacaccttattcgttgcacccggaaactaccaaaatgtatcaagacctaaaactctattattggtggagtggaatgaagaaatatgtagtggaatacgtgtctacatgtttaacatgttagcaaataaaggcagaacatcaaaggctggcaaggttactacaaccattaacaattcctaaatggaagtggggagatattacgatagactttgtggttggtttgcctagaaccacgggaatgtatgactcagtatggtcatagtagactgtttcacgaagtcagcacattttctaccggtaaaaaccacctatacaatggatcaatatgcagagctgtatgtgaaggagatagttcatctccatggagctccaaaattcattgtttcagatagggattcaaagtttacatcgaaattctaggtaagttttcagagagctatgggtacgaaactaaagttcactatagcttttcaccctcagactgatgggaaatcagagagaataatacagatactagaagacttactgcgagcttgtgtcatggactttgagggttcatagagtaaatacttgcctttgatagaattttcctacaataataactatcaaagtacaatagggatgactccctatgaaatgctatatggtaggaaataccccaattcattgggacgaaacagaggaaaggaagtatttgggtcctgagttaattcaaaagaccaatgaagcgatagacaagatcaaggctcggatgcttgcttcgcaaagcaggcaaaaaagttacgctaatccgaagcgcagggacattgcatttcaggtaagagagcatgttttcttgcgagtttcaccaatgagaggtaacagtcgctttggaaagaggggtgaattaagccctaggtttatagggccatttgagatactcgagaaggtcgggcaggtagcgtatgagctagccttaccaccagcattatcttctgttcataatgtatgtcatatttcaatacagaggaaatatgttttagacccaactcatgtcttgagttatgaagccctaaaactccagtcggacttaccctatgaggaacagccaggtcaaatccttgataggaaaaaaaaagttcttcaaaacaagaccatagttttggtcaaggtactttggaagaacagtaaggtggaagaagccacctgggaactagagtccgacatgagggctcaatatcaagagttattcaggttagatttcgaggataaaatccttttaacggggggataattgtaatgaccgcatgttagattatgaattagcaaaagcagttagcattaattattggtattttataattatatatataattttatatttgttgtgggtcccatttttagaaatagacattagagttataatttctcaattttggagattttattaaactctaagggtattatttatgctaaatatgaaatatgtaatttttatgattttttctcggcaacgatagaaaatgcgatggatggtcgttagagtcacatgggtaagtttagaatctaattcttagagggagaaacataggagatattaagaatgttggatttaagcaaagttatgtttttggaccattttaaccctaggcttataattgcttaagttggaagaaagaggggtatttttggtattttgcattagggattaggtggcatgcccctaggttggaagcttgccactttttacttcatcctatgtttgttaattttggagttaatcaattaggaaaaatcaagaaacaattagaaattcctaccccctctctctctctctctct

SEQ ID NO: 226279 - DNA, 1923 bp, Cannabis indica
gtggattagaggaatcaaagtttgcaggcaagctcctgttatctctcatatattttttttatttgattgatagttatatcttttgcaaagctttctctgagatgctacgagagttttgcagttgcttcataagtttgaggaggcatcaagtcagcaagttaattagtaaaaatactaatagtcttttttagtgtgtggcggggacgaagtcaattggatctttgcaatactctacaaaaggcagaagcttctgaacacattacttatcttagtttacctaataccttgggtcggtctaagtctgtgattctgggtttcttgaaggatagaattcagaaagggtttaagattaggatggaaagcttctttcttatgctgagaaagagattctgattaaaacggttactcagtcattgcctacatatgtcatgagtgttttcttgctctcaattgatgtgtctaaagatttgcaaagaattatgagtaagttttggtggcattcaaattcttcttatggtggcagtattcattggatgagttgggaaagaactaagtgccctccaccgcaaccaacataacataaagaaagaaggaatcggtccgccttcatggtcgccttcgttcgtaaggtaagaacgaataaaaattcttgtcttggaccaggttatgcacatgaacaaaagtgattcttttgtgatcttgcagagtagacataaaactatgggtggagtgggctttcgtaattttcgtgactttaatttgacaatgttggaaaagtaagggtgacgtaaactgacaaaaccaaactctttggtgagtaggttatataaggctcgttatttttccaggggtaattttctttcagcatcccttgggaataatccaaattttgtgtggaagagtgtcttcgaaatcgcagaagattttcatgtctggggtttgttgggcaataggttatagtgtgaagtttgatattttgcatcagccatgacttctagatgatatgtgtccttttgttactttagatgcccaatatttggtgggccataaagtgaggtcgttgatgtatactgataagagtgaatgaaatttagatattattaaagatcttttaatgagcacgatcaacaatatattttggcagttccattgagtccgaatgtagccgatgatcgttttgttttaatctaaggagcatcatggtttctactcggtgtgtagtacatacaagttgatacaagctcagaaagaaaattggattgtagctgagtcttctgggttctggcgcaagctatagaatttgaaggtaccaccaaaagctcttaatttagtatggcgggctgcttcaaattatttgcccaccttgactcaattaagtagtaaaagggtcttagttcaaattatgtgacctgtttgtcaaaaaagtgagaaaactatttttcatgtgcttatttcctgtttcatttgctgctcaatgctgggagaggcgtttggctgaagttaggttgattgttactgctaattttagcacgtggtttgattaaattttgcaaaggtggagtaaggacaagtgtggggaggctgttattttgtgttgggggttatggaaggctcgaaacaagttggtttagaaccaaaagtatgttgcggtagatggtgttctcatctcatctatgaattgtctcgtgcaataaaagttagcccaaaatagaggtttaaaagtttcttttttagtttttgaagttggtaatggagcagaatttcgagttaaactacataaaaatacaatcaaaggtaactattgatggtgtcattttttgtgatcaagcagcgtttggtatgcaatagcatttgctcatttttaaaaaacttaaaaattctaacttttcaaaaagaaaaaggaaaaaaaagaaaaaaaagtaa

SEQ ID NO: 226280 - DNA, 1785 bp, Cannabis indica
aaaaattcaccacttttctaaaaatcttttcttaataaaaattgtaggattaaacacgagtgtagttataactatatccttatgccctcaagtaactaagctttaattattatccttggttacttgtttttgaggttggcaatataaatgtaactattttttaataaataaatactattattcaaactttaaaaataaaaaaaatattaatagtctctaacaatatttggaataaaaaaataaaataaattgcccaatactacttgatttgaactatacaaatgaagttgttggccaaaagcttactgacttcttctttcaaggctatagatctggcttcatcatgtaacctcctcttttgttgctcaatgggaacatccttgtttgagtttagtacgcaagtcattacatttggacttatacccaccatatcagaatgtgcccatgcaaataatttttagttttcatggaggaattgaacaatagccttcttaatctccttatttaagtgattcccaaccttcacaatttttgttggttcatttggattgagagaaacttcttcaagtttctcaatggaacccaggtctccccggtcatcgcccacacgagggtctatctcttcaacttcaggaacttctcttgcttccatgtttttcacttcattaactttgtttacaaccaacatctgggcccctagttggggtctcccactcatggccacattataacagtcacgtgcagctagtttatctcctttgactatttcattctcggcattagttaggaactttaaggctagatgatatgcttaataaatgtaacttcccctagtgagtacaatgatagtctcgcaaaaatggcattgtatgaagacgattaatctactaccacaaacttagtcattcaggtggttatctttagggcttccctaagtgttaatgggagagtgattcttctagtactagctatgctatctccgatgaacccaacaaaattggtggtgcatggttgtagatcttggaaaatgaaccccattttctctaagattgtcttgtataataggttcatgttgctaccattatcgaccaggattctccttaccccttgttggcaatttgagatgttttcacctggggtcgttaggagctattagaatttataacatgtatgtttcattaacaccctaaatatgaattctctaatacgatgaaattaaacacataagagtttagaaaaccttacattgatggcagcggaataatatgactccttccgctcatatctccaacccttgttcctttgtatcatagagtaataacaagatctgagcctggatatccttcgggtaccactgtcttctgcactatgattgagtacttgacttgctatgtgtggacatggtactttatcactatggctcaaattgatgaagaacaatgaataaggtgcaaaatcgctatgaaaggagtctctcttatctagttgtcagagaataaaaactaggtttattttagttgaagtgagttggatgagaatgagagcaccatgttccttttatagtatttcaactagggtttaggatataattatatggatcaaaaaaagaataaaataattgcaaaactagttatttaataattataattatttatcaaatgaaattgctatttatattatttattaatttagacttaacaaaaactcctaattaacaaataaaccccaaaatatatttcttcacaattaagcccttgcttagtgaaaattcataaataagacata

SEQ ID NO: 226281 - DNA, 1672 bp, Cannabis indica
ggacagatacaagttcgtaaaaatacaaaatcttagccgggctaggcgaagcccagcctcttgcagcataaaaaataaataagcttgaaagtaggcgatatacttgaggcatgagttggtaaggtgcaaggccaatgaaaactaaaaaattaatgaagtaatcttgtagcagcagcaatgccccaaacatgagatgagtctggctccaagctccaaagccgttgtaattatggttggagtctcctcgtctctaggaagacggtgaaagactccggaagcggagggctgatcccagccacagtgacaatcttctccagcaggtgggcgcaggttagggtcaagtgcaactcgtctgcctcccagccgttggatcgacaagtatacttctcctgggcgacatgccccttcatcacctcttccaaggtggccaggatagtagatcctttgcttgaggatttcgctccggtcgtggggacagacatttctcgagaataatgagattctgaaaaaggaaaatctagcagttagcccccaaaccaaaccctaatatgaaaagagagaatgggggtcccctaactgctggacagaggccccctccagatgtttgccaaaaatgaaaaatctagggattctcctaggcaaatatcgggtgcaaatatctcaaaggcagcgaaagcagaggaaagagaaagaaaaaacaagagaaagggaacataagtatgaaaaccattccatactctactccatgcaaaaaggtggattacaaaacgaaagagaaagaaagcaacagaacacaaaaaaaaatatatacgccatgcaacggtcctcgccaaaatcattccacagaaatcaaatactttgccaaaagctctactctaacatgcaagaggacagaaagtaaaaagtgctcaggaaacttacgtaagggttatgagctagaagttgatgatgatcggtgatagaatgcagattggtaacgacggagaaacaacagtaggaaatctatggtttctgaaattttctcaaaggactttcttgggacgaaatggagaaatagtgaaagtaacccaatgaagaaaaaaggctgccttttatagaccagaaagggtgcaaggcatctgtgatcagacaccatcgtacggtgggaatcgtaatagattcttattctacaaatccaatggctgagataaatgggtgctagggcggttgaaaacgtttgagtacctttctgacacacgaattaaatgcgcccgtttctcaatgaacgggaagcaaatcgttgcctgcaaaaggaaataaatatcaatgatgaccatcataaatgcagctcacgcgcttagagcacgtgccattatacccataagctaaccggaggcatcaagaaagcctcacttacccttcactaaatgaggcttgggggtaaatgttgcccttgatttttccctaaatacgtggacgcagataagaacgacatgtggatatgtaagagccatcattaatgaaaatcaactaagtcttaggcgaaaaaggaatatctcaaagaaggtgcctcccggatgagggcataagaagtgtctttactctccgcgaggccaaaggcatgctaaggcaattccgggaggtatagagatctcctgaacagtcacttcgcatttaatgccgcatgggggaa

SEQ ID NO: 226282 - DNA, 1471 bp, Cannabis indica
attaaaataaaaatatttcatatgatcactaatttgtaatcgccattgctgtaccctttttcttcttaaatcctttttttagttttggaaattttaatcttttgagtcgtgtggttggttttgagcagttttcttacaagttgcgtgttgatcggtttttttattttgtttgaaacccatttttcctctcattttttttcctattaatcgttttccctttttttctataaattttcattttatttttctttagcatgtttgtcactcgttctatgttttcatcccatatatttaaaaaatctcaaaacactcataaatctaagttaccccaatcttcaatgtggaaacaaaaatttaaagatcattctccaagtcctacttcccctgctccttccaaacgtaagttagatgttcattctccttctaagagagtttctaaacgtcatcaacctatggaggaggagtctaattccaattttaaatttgacgacgagttcattcaattagctaaagttgccaaggtcagtcgtttattttcgtatttttttagggttgtgttttattttaaatttttatgttattgtgttttaattttttcatttataatttaatagtattttattttaaatttatattttgtatgttttgttattttgagttgatttataccttctataacagttgtattcttcgtttttttttgtaggggaaggggaaatcccctattcagaatattccttctaaatctgggtatgaagagccttctgctaatattgttgttgagatttgtggacctttttttaattatttttttttattttttctggttgttttggtgttatttttgagttgttttgaaatagatttgcttatttttttacccaggagtggacatgtaaatataggcgttcacaatattatcattctaaagtaaaaacttctagttttattgagtcattaacgatattaaaactattctaaccccaacccagttgaaaatcttttcccaaactgttattaatcacattattcatttccaagtcatgcatggtctattgttgagggaagttcaacaacctaatgagagagaattctgggtatctcttgctgggaagattcttaaatttagtgtagaggaatttgtcttagtgacaggtctagattgccacattgaatctaatatttttcagttcaaacacaataaaattatgctagttgaacattgttttaagggtaataaaaaaacttaccaagatttcaattcaagttgcctttactgctaacaaccttaaggataatgatgatctcgcagtcaagttcgctgttttatattttgttcagtgttacttgctcggaggtcctcctggaaagattgtctctattcaaaaacttgatactgtggatagtagccgttataatgagtatggctgggggaaggagtgttttgagatgactattgaatctcttaagg

SEQ ID NO: 226283 - DNA, 1499 bp, Cannabis indica
ttaaacattatatcatatgtcaatttattgtgctatttttaaaattaaattgcttggcttcccaactaatccaatatgccattattaggagtgagccgtttatccccaatcatcaaatatacatatcactatagaaatgcattaaatttaaatatatggaataaaaatgcatttatatctatttaatataaaatatagttatataacgaaatttttgatttaatagtattaaatttttatgttaactttaacgaaatatactattgttataagatatcagtggtgttaagcacacttagagataatgtcttgtagttatttatgatattttataaaaattaatacattaaattatatagaacttgatacataaataaactaatagtgatatatataacacgttagagcctgaaaatccactgttaatgtcttctaatatttctttttataataattttatagaatatcactaatcatagtattttatttatagatacaagtatataggtttaatagttaatatttaataacaatattcattatatatgtataattttgccaatttgacacacatatagtttagtgcatttagtaacattaaagtttatatctgtattttctttttcaaaataaaatatataaactattgataaatatttttagtattttcaatatataaaaactataattttatgccccaatacctcaaggtgccatctccaataaattatgtaaattttgtgctaaatttaacttaaaaataaatcgatgttatagttgacttaaattttacaattaagccccaatacatcagggattaaaaaaactttattttaataggaaggtataaaaatgtcaacaaaaatattaaatttttattaaaaatatataaaaactatattaaatttataaataaaaataaaaaaaacttattttacattattaagtggcaaaaaactaaataaaaaataacatttattatggtgtaaaatttggttcatgctatattttatgttaaatttagcgtaacttatattatacaccaacattacaatttaattttatgaacatgggctaaaaaatatatatacaccaaaattggaatttaatttatagtactccattggagatactcttagcattttttttaaacaaatttaacaataaactatttgaactctattttgaatattgtaaattatatttagaattttcaaaaagttaaagaagtctttatataactacaataagagaaatgctaaaaggcactaatgatgtctagcattttccatgatgtcatattgctattggtgcaattattggatcccatgtaattgtatgtaaataatttttataaaatacatactactaactaattataagtacgctacttctagatggtgctagacatcactgataccactaacttttatgattgcttatattgattgtttatttggtaaaaaataaggatgttaaactagggatgttcatcaaac

SEQ ID NO: 226284 - DNA, 1644 bp, Cannabis indica
gactcggttcggcccaaaaacaaacactcaaaaccctaagattgagttacataactcaaatttctcgagattcaatcttgaagcttcgtctctctcactgagagaaatcctagggttcccaaaccaaaattcgcttagaatcaaacacgaaatccacatcaaccttaaatcaagaatacgaacacacacaataaacacaaagagctagggttaaaaagaaacaaacaaaaattagaatcaaacacaaggatttgatctcagagtttacctatcagaacatgtgttacgtctccatcaagctcgcctcagagcaacttgattatccactagaaataacatgcattacaaagtgtgatttcaagattttaaccagtgaacatttagttaataatctctaaagatttttctctactttttttctctctcttttctttttcctctaatgagcttctctctctaatttggctcgtaagagaagaagaattcatgcttgtaatttagatagggtagttagagtcacgagctgtaattttttgatcttgtttttgttaattatttgttgtaactgaaaaatagttagaatcttgtatttgagtgtttgtacacttgcaatttgttgtcatttaatgttaaccttgagcttattataagaagatttacacagcagttacttaattatttttttattccttttatttataacatttccttgcaattgtattgttgaaactaacaatgtgaaatattaaaatttgtaaaataattgcacttaatttactttatacaactaaatagcacaatgtaaatttatagtcgttttgcgaccatataataatcgttgacagttgcgtagtgtaattcatgatcatttctgcgaccatacaaagttagtttgctaataaaatttttgcaaaattattttactaataaaagttattattatttttttattttaagtacgtttcactaaatattcttttattatctttatataatttaattatacttttaaattaagagtgaaattaagaaaaaaaaaacaactgtgcaaaaatgggcgaagttactatttggtagcataaaatttaaataaaattttctaagtttattaataatttatttattaatatagttgtttggtataattataaacaccttatgacacgtttactatactaatattgaataaataaaaaataatcagaactaatctttgcaaatatgttgtttaataaaattatttgaaaataaaataataattatttatcttatttactttatcaaaaaaacgtaatcggaatgtttaaattgattaaattgtcatttatagtgaaactataatgtaaagtaattattttataagacatattttaaatgataaattaattaatttagtattggttttcgtgtcgtgaacataattttttttttttttttaagagaaaattcattcaaagataaaccaagataaacccaacattatcagggataaatagagcgataaatctcatagagatgatcaaacaaataattaattaaccacactaattacaaaaagagcaaagagctcgaaacacaaacaaacaatccgagggaagaaccctacaaaaaaagggcacacatgccaaaatatatattcgaaat

SEQ ID NO: 226285 - DNA, 3663 bp, Cannabis indica
tttcagcatcaaagattcagagaaagatatccaggttcagatattgataatgtaaaataatttccaacatacttttcccacatccgggagcttgctcttggactagttgttgatccctttagaggggatttgggtaagtgccctgggtaatgggtcttagtttgccatgtgtcctatgctgagattgccacatatattgagaaaaacttggggcaacatttatccccaagtcttatttagtcatagataaataagacttctacgttgtctccggcctcaatgaatgttgtgacacgtgccttgagcgtgtgggccctagttatgatcgtcctcattcttccttgtctcttaacaggcaacgattagttccccgcctattcacagacccctccatcaatgctgatgtcagaaagatactcaaacgtttcaaccgccctttcttctcttcatgctttttcatcatgtgcgttggatcaagggatttgaaccattgtgaacccccaccgtacgatggtacttatttgatgttgtttcatgcacaaatggcctataaaaaccagcacttctattgactgggttacttttactgcccttcaatttttagattttcaaaccctctcaacaaaattccagaggttcccgatttcctcctacttttcctctgtcgttgttaggcgaagcactaccatcatacgacattctctgcccctgccttgccctcattgtgtaagtcctttctatataaatacctcttctttgtttgctagggcaagtagtggtagtagcttttccttggggaaataatgtacatgtttgtctgttttgtttttttttttgaatgacggccatggttgccgcctgtgtaacacctccttcagtggatgtctgatgatgcgtttatttttcttttgtcattatatttttaaggggcgaagtcaaagaatttctggcttttgttccccatgtgccccttttgggcagtttgacactgccattgcacgtcttctgttcttttcctttaatttcccacgatgcttggatagtcttcacccgatttcattgcgaatcgtttgattcctcataacattcatccgaaggggcctctttccagcggttaggggacccccattctcctttttgacttaaggtttgatgtgggggctaactgctggattttttacctttcagatgagtgaagttctccaagaccttcacaatcatgatttcttcgggttcgaccaggagattctcgagcttcaccaagccaatcctatgtcaaccctagctgccactggcgcaaagtcttctaagaaagagccaaagaagttggccaccttggaggaagttatgaagggtcttgtcgcttacaaaatgttttcttatcgttccaatggctgggaagctgacgaactctacttgacgctgacttatgcctaccacttggagaagatagtgaccgtggttgggatcaagccatctagctccagagtttatcaccatctctcgagggatgaggagacgccaaaccgcaactacaatggttttggagcctggagcgaaacccatctcatgtccggggccatgctacctctccaagattacttcatcgactttctagttttcgttagacttttaccataccagttgatacctcaagcctatcgcctgttgtcaggccttttcatcttttatgctgccaggggttgggccgctcccaaccccgatgaaattttgtatttttatgaactactttttgtccccaaaaagggggacaagtttaaagacaatttttataaattacaagctcacccgcccaacgagacccctgataccctttaattttcaaaagaacgttaaagaatattgccgtaggtttttcttttcctccgggttcaaagcttttaagcgttcgaacttttgtcgagtgaatttcgcaacaccagattatatgatattattagtaacaagaagaaatttacgtggagaacaagtgcgagtattcaacctagaatggcgagtactcaaactgggaatgagaaatgattaacaaaaactggaaataacaaagagacaaagaaatatagtggttcagtcagatcacggtctgcttagtccactgtagcaagagtttcgtaggtgccatttcacggtggatcacccctttatatacaaagcaggtgtccaattagttatacaaggattgcattcattgtcaatccgtttttacatattgaattacaataattaactaaacaacgttaacattaataaatgaacaacagttactaagttcatcaacgcatgcatcttccaaatctgcgagttgactgttcatattctgatgataaactcgcgggtttatcgtttatgtttaggatgtctgcacccttaggtagtcaccttttgtggacatcgcatgacgggctgataggacctagacacgctagtctatattactttataaaggctgcagggttcttaggaccaactcgcatttacagagagtcgttctcctgggttatacatggacatggggaggatactcgcatatagtttgatatatgcgagctactctcttgtctcggatgcgattagacttcggtcatgctcgctacctctcgctgattctatcttaagcgaggtttaaaacttcgaggagtccctcagggacatctcagctttctttgggaaacctgaatatacgtgtcctctaaataggggtctggtctcgagtttctaggtgagagaaatctcactataacacatgcccctagtttcgcgatgtgacaggtgcggtcacgaagggaaactatattcgagagacaggtgaaaggttgtcacgaggaggtgacctttggttgtcccttcgagggtttcgaaaaatgacggctgtaatcattactttttattgcatttatgatgccacgtcacagaactcttcggtttctgtgtaagcgtggccatctttggccgttggattgggcgactctaggccttctaattgccacgtgtcgcgatcccaattaatgagggatttgggtatttaaaccccctgattcgaaccaaaaatcccattttccctcattttctttaacttcctcaaacttccttgtttcttctctctcagagaaaactttccaaaaataccttcataaattacccagttttttttgcctttctccgtgggtttttccttgattctacagtgttgtcaaggacgaatcgtgggaacagatttttcagaagtaaaggttagttttcgaaaattcactgcatttctttttctgctcgagtgggaacactgttttctgggtttttaatatgcatgagagggtttaagaatgaatgttcgtaggggatatgtatgaggctatgtttttaggtgaaaaactggataatttcataaaaaatgacctgtaaattggcataaccgcatgctgtataagaaatacttgaataggcactctttcatgctttgaatactcgcgggtattcggatgaacactttgaatactcgcataattgtgagatttacctagatctttaggattttgtatactgtgaatttagtcgcgagaacattaactgagtctcccaaatggtggatgtgtcacagcattctaatggtcatatatgcggttatatgtcccttgagatactgtg

SEQ ID NO: 226286 - DNA, 1612 bp, Cannabis indica
agccgccatagagtcagtttcaacaattccccctccaacacccccgaaactatagcattgtcaacagctatccacgaatctccagggatctgctgattcaagttaactaccgcaaccccggcttcctccttaactactgaggcatcgactctacattgccagaagccagccttatttggagctttgaaccttgctaagtttggtggagcaacaacatcaaactgtccaccacccaactcgcgcctgctaaattccgcaagtctcgccattatattcttccacacctgattgacatcccaaggaactcctttaaaaatgtatgcatttctcgtattccagatggctttgcacatgcacgctataaacataatcaactcttcatccgcaatcattgtccaccacattccaaagtccgataaattctgccaattaagattatccacccttattccccagcgattcgtaaaccataaaagcacgagtaaaaggacactggcaaaaaagatggaaggccgtttcagtgtcctcattatagaaaacacaattcccatcctgtatggcaccaagtcgagctttggtagggaggatatcatatacaattttccaggagaagaacttaagtcaaggatgcattttaaatttccataagcgaacccacataacgtttggaggagagaaacgttgttgattgattatccaataggcacttttgacagaaaattcacccgattttgcagcattccaaaacacaatatcccggccttcctgaatcggtttaattctgattatatcccttgctacctcattcacaaaacactttttaatcaattcttcattccagcttcgggtgccttcgataaacaggtcattgactttccaaagggcctggttgtttacaaactgaaatttgtccttaatctccgaaggctgtctgtcagggatccacggtctgtcccaaatctcacactccccatcaactatcagaattccatccccttggaggaagatttcccttgccgcaagcaaacttttccagccacgggaatcctcacctttcttatccactgtccaagccgaagtagtacgacaatacttatccaagaacatctttacccaaaatttctccttcccctgcagaaccagccagaaaagcttgacgaggagagccacgttcatgtccgcaaatcgcctgaatcccagcccaccggagagtttcggttggcaaatgtctccccaactcttcaaagcacaataatgttttttgtcaatgtttccaatccaccaaaatttagcaatcactctgtctagctccatgcaaagagtctttagaatttgaacagtggacataaagtagttaggtatgctctcaagtactaaatttaccaaaacagttctgcccgcttgagataagtggcgagctttccaaccctccaatcttcccagcattttctccttgagaaagaaataatcctcccttttcctagcagtgtaaaagaaagggtttcccaaatacttttcgttattgctcaggcaattcattcccaacagagctttaatctcattgcggctacatgaaggtgtgttaggatagaaaatgatcccacttttcgct

SEQ ID NO: 226287 - DNA, 1322 bp, Cannabis indica
taatgcaactgcaatgcaactacatagaaacttaaaaactataataatatttctatgtatgtggctttagataaatttaatttttttttttctattcgtgttgtcatgaataaatccaccattgaaaatttaaaaaacaacgttaatgtaacgggagaaatattagctagtgtattgatacattttttttatacctgatttgaattggtcaagaactctaggtctatttcagacagatccacattttatgaatttaaaattgatattaggaggattaattttctttaattttaatcgtaattcagggttaaattttagtttcgaactagtttttctgttcgatttttcataaatccaaaattatgtgtttagatttcttacggttttcttctcatgtaaagtcaccggaatttatggtgattcttcgtctggcttggtttctttacggttggcctactagtttgcttgctggaagctgttgttgttaaagaatgtggttcgtgcggctgaatggttagaacaagaggtatttttcgtatatttttattgttgggcttataaatgtttatagggctggtctaatgtatttgtgtaatacttttgctattttaatatatacatgaaaaaaagtcatttttaaaataaaaattattaatatacagtgtctttattaatttaaaatataattaaaactctcatttttatattaatcataaaagtgtgtcaaattgtatatagtttaaaaaattatattgcaattagtataatttaatattaaaattatatttttagtgtaaccatcataatgttggtacttgtgctaaatggaagtggaagtgtaactcttttttttttttttagtgtagcgtagtggtattttacaatcatttaatagcttaatagcttcaaggtcctaagttcgaacccatgacctctccttttttcccatccctccctccctcaccactaactcttacactatattattaattcctacaattttttttaatattttaattgatactaaatttcataaataggtaagttaatactagtatattaaaaattaaattaaataggaaatttgatataaatgtattttttaaaataaaaaagaaaataagcactactcataacaaaatgaaaaatagcaagcggagtttgacgaaacgagcccctaccagagaaattgcacgctcttgtataggattccaaccctgtgcacccctaaactacaagctttgaaactcctacttttttatgggatatttaaagattttttacaaacctttctataatataaggttatctgatagtctttg

SEQ ID NO: 226288 - DNA, 2085 bp, Cannabis indica
gtattattgctgccaaaaattaaacttatgtatttatttacaaccaagagttaaacttaagaatttacgccgtaaattactcttaagaaattgatagctctaggaggaaggtaccctcctaaagggttgcatcaacctaaagaaatgtttggataaagcatgagaaagaagaaacatctaggaggatcgatacctcccacgaatccccctatcgcgtttcgtcccaactcatgcaacatatatctaggaaaaacaatgtagcttgtcacctccatacaagtggcaaaacaagtttccaacaaaagcaaataaatttagggatttcccccactccttttctaacacgcatagcagctcacaagttcagtggtccctttagtcacggacagaccatgtcctttctcaccaaacacctagcgagcctagacaacaagcccatgaaggcaaaagcaaccttctacattaaggaaacaatccttaaccactagaacgtagagataaattaaagaggcctctatttcactaaaaaaacccacttttccccctataatcagattactgtgatggtttaatatgatgatgaagattatctggttaacctaattagaagaaaaagataatatatcagtaatttaatactgactttacaattctaaaagcagagggttttttcagcgtcttcgtcgtttcggtcatctatcttcagaatttgtctccgttcgaaggtgtgatgttcgccgtcgattagctaaagctgagggtggtgatggtgagccattttggcatccaattaataaatcagattattagcgttcatgactgagtcgaactggaaagttacgaacgattaaaaaaaatggtatattgaatctgatctgacggtatcgattaccttggtctgccattggacttgctcgtcgaaaccctaatttacaatcggagaaaagcaaattctaaaccggtttccttgcttgagaatgatacgattgtgagaagccatacacggtttgaatttccttgcttgttattcattgatctataatttataaactaatttaataataataataatcatttttgtcttgtcatattgacatgtttggtatgtgatttttgctgttgagtggtgtgtaatttttgtgagttatgagtttgttgagttggaattgtagtgggcttgggaaccctcggatcgttcaattccttaaagaaatagtttctcaaaagagacccaatttaatttttttgtgtgagacaatttgcaagaaatacaaagttgattgtgttagagctttattgggctatgatggaaattttgttgttgggaaagacaaacctgttatcaacatacacactaacaaagactcggcggccttctctactttcgttacttcagcattaaaacgtttaaagtaatcttgtaaagactcaccgatatcctgtttaatattagccagagtggtatagggtggtctatacatcatggtggcctgaaagtgcgtgagaaagaggtcgacgaaggtctcccaagtcgatacagatgcttcaggcaattggctgaaccagtcgtgagcattgtcctccagggttgccacaagaatgcgacatttcgcaagctggggtacatggtccacttccataatagtattaaatttttctaaatagtctataggattagtggtacctttatatttcagagactcggataaacgaaatcccttaggtaaacgagcttgtcgcacttccgtggtaaagggagaagtcccatgcagcttgcatatgtgctttctctgttgttcgattatcttcaaagcttgtagaagcataccctaatcgatacctccagctagggcggtgttgccttgggtcgtcgcaggtgcacttactactgcggcgatatcttcagggataacaactccagtagtcgcagctggtgcagtaggcgggttggtgtggttgtttatgccttgatcgcccaggcagggatcacgaggctcttctgttgggttttgtgccctaaataaaacccatgtcaatataatcagatttacttattaataaagatcagaaataacattttatgtt

SEQ ID NO: 226289 - DNA, 2688 bp, Cannabis indica
ttttttttttttttaaatatattgaaatcgcgtcgaataagatccgatccagaaaaaaattaggcagagcagagcggatctgatccaagatccaataagtatcctaaggtttcgaatcagaggtgatccgtcggtatcggagttccaatccactctaactaaatggatgtttttgacatgtttattcagaaacatggcagatcaaaagttcaaagagtgctaatttaagttgtgaatgcaatcgcaacagactttactttaaagaatttaaaggggtaagtaatgatgaacaaagatggatttggtggactaatgaagtgcttgatgttagacatgatatgactaaagtatgcacatgcgtagtatgcatgtaagaactctcaaatatggagttcaggctttgagcaaaaaacagaaagaaacagaggaaaatatggaagtgaattaaatggaaaatgaaagctcaatctgaaacatagattgagtgtgcctttatttatattagtttcagtacaatacattgaatcaagattacaactaacttaagcctaactacctctaactgacttaaccgaaagtaactgataacagaataactaactaattgttatattccaacatcctccctcaagttacacttggttggccaagtgttaacttgtcaaatagataatgaaaagtggttgttgggagaggtttggtgaacaagtctgctatttgttgttcggtttcaacatatttgacatccaaatgttgagccaaaactctgtctcggacaaaatgtaagtcaacttctatatgttttgtgcgagcgtggaacacgggattggatgcaagagatcctgccccgaggttgtcacaccagagaatggggcattgaggtagttttatggagagttcagtgagaagagattcaagcgaaatcagttcggaagtggccaaagctaaggcacgatactcggattctatactagaccgagccacaacagtttgctttttggagcaccaactaaccaaattgcctccaaagaatatgcaataacctgaggtggattttctgtcgtcataacaccctgcccaatcagcgtctgaaaaccgtgaagataagtcttgaagaagcttggaatgtgagaacaatgtgagttgtaccggctagatatctcaagactcttttgcaagctccccaatgttcagaggtgggattttgcataaattggctgagtctatttactgcaaatgagatgtcaggtcgtgtcattgtgaggtattgtagagctccaatgatgcttctatattgagttggatttgtcataggagtgccattgtgagctgttattttagtggatgagcacataggggtggattgaggcttggagtccaacagttgagtttttgccaaaagatctttgatatatttgtgttgagagagcaatatgatgtcatcggttctgtgacttcaaaacccagaaaatagtttactggtccgagggctttaagggcaaatgtgttgtttagagcagtaatgacttgttgaacttgtgtggagttggctccagtaattaagatatcatttacgtaaactaaaatgagaagtaactgaccatttgaggttgtgaagaaaagacttgtgtctgatttgctgttggtgtagccccagctgatcaaggtggattttagggtgtcaaaccaagcccttggggcttgttttagtccataaattgctttgttgagcttgcatacatgattggggtattgagggtcaataaaaccttgtggttgagccatgtagacatcttcttgaaggtttccattcaagaatgcattattgatgtctatttgctaaatttcccaaccatgtgtgatagcataagtgaacataatccgtatagtgcatggtttgataactgggctatatgtttcaaaataatcaattcctgcagtaacttcagatttatttttcataggaaatatccaaagaaatttagtatagtcatccatgaagctaacataatattcgaaggcatcattagatggatagaaagaaggaccccatacatcagttaaaagaagttgaaatggctgacttgttttattagaagtagttttgaaactaaattgatgtaatttgcctatttgacaggcattacaaaaatcaagtttcttacatttaatattgagaacaagctggggtaacattttatctagaatggcttgagatggatgaccaagtcgactatgccaaatgttggtgagttgtgacttgtcatggaccgggttgcttgtagttgtgtgattataggcactaggtggatttgtgaaagatgcagtggcttgctgtacagaatcttgagacttggggttatgaacttggagtttgtaaagaccctcactgagatggccctgcagaagggttttgctggttttcttgtccttaataaggcaacaaatatcatcaaattcaagagtgacattgttatctttagtaaacttagaaatgctaagaagattttttgtaacatttggtacatgtagaatatcttgtaaaacaagagagtgattggggtgagaggtgggaacagaattgttgcctaagtgatgaattgaaagagtagaaccattacctacaacaaccttagctttccctttgtagtcagctgctgtggttagattgtcagcatcattggtcat

SEQ ID NO: 226290 - DNA, 1417 bp, Cannabis indica
atacttccttcttggtcatacaattaattcactatgaccagtgaaagaatatattataagctctctaatttaaatcaaagaaaatataacactgtgtaaataaatatacattttatttataaatataaatagagaggggtctatttagaaaatgaaatccaaattatcatatttatacaatgaggagtaggaagcattctctgacagggtcctccttgtggaggttgaggaggtattagtagtggtggaactttgaagcaaaaatttcaaataaagtttagaattaaatctcatatcttattcccagagaaagaaaataaaaaaattggttaaaccaatctcataaaacattctcttttcaataaccattaattcattataactgttcctttttcacaaattcaagaatacaacatcaaacaaaaaaggagggatttttaagggcttatcataccagcacgataagcattgacattggccccaagttcaatcaaagtttttgctacattgaatagctccggattcattgaagcaagaatgagaggggtttttccatctctatcaacccactgagcacacacccaatccaaaattcatcgttaataaaaaacaagctttgatcgttcttcctcaacatatgaattgaatttagtggtttacctcgaggcgtgcaccttctcggcaaagggatttgatccctttggtgtttccatagctaacttgctgatatagaagctcatccttggattgttgttgtcctcatataatcaaaatttacctatatattactctcgaataaagaaggaaaaagggttgtgactctcgaataattagcataaaatatcagttcaaatattaatggctatataatcaaaacttacctatatattactctcgaataaagaaggaaaaagggttgtgactctcgaataattagcatcaaatatcacttcaaatattaatgggatttgttttatttttattttattattttattatatataaataatattttattattttattaaatataaataaaaagttaccatgaatttctcataaaccaagaattcagttatataggcacactttatatagaataaatatatatatttatatatacaatggcattattgttttttaaataaaacatatttatttataaattgtagagtgaaggtctctacaaatgtataaataaaatacatgaaaagctaaaaaattgttccattgcgttcacttattttgattattttatatattattcatttgtctttgtatttttaagattttgtgtccatttttacattttattttgttgatcttacaaatattaaaagcatgtttggtattgttttctgttttttatttttaaaaaagtatttttagaaataagaacaaaaaataatttttgaag

SEQ ID NO: 226291 - DNA, 1771 bp, Cannabis indica
aaagggcgattaagaaaccatttatagcctcagcaccagagtgaagaaggaatttcattttatatggatatgtcacttgctagataactagaggtatttggtaacagcccaaaaaggagagaaaatgagcactagtatcactgtcgtcgaagccacaaaggacgcatcttccaattggattgccaaaaatcgtcgccaatcgagagccaaaaggaagacaatccttatacaaattcaaaataaatactttcaatctttcatgtagagaagtcttccacagagtagagcaaatttcatcattagagaaacgaccatgattaaagtcgtgtggtaagccgctttgagggtgaaggagccatcaggggcagatttccaaagtaaatgatctttaccaagaaaaaaatataatgttgctagaaatgatagcaatggctgtaacaggttcaaaaatctcagagatggtatgggaattccaggacttgccccttcctccaaaatatcttctacaacttgacccctatagacttttgcattgacatcactagggccaataatgtagtcatcaccaaggaccaaacactgttccaaaaatcgacattagaatccttgccaataatataaatactgtgatccttaatgaaatctccagtcatccaaatgccttttccaccggggaagcattcctcgagagtttgttgctccaaaattcaaatgtgtacagtatttctccaataacaaattaacccagagcttatcctacttcaaagccaacatgcaacctagtttagtaagaagatagaaattgatatccgagaagcaacgcaagcttaatctgccacaagttttaggcatgcatatctaataccaactcaaaagagagagatatctcccaccttaagttgatcatgtccaccagaacttcttgaccaaggcatctagagaccggttgatctttttggggacattgaacacatacataatatataggggaatagaggagattatattcttaatgagcgtggtgcgagtggcttgagaaagtgatttggctctccatccctccattgtgttcctcacactctcaaggacaaaattaaaatccttgccctattccctttagcgaataacaggtttccaaaaaaagattcctcaccattcatcaactcaaagccgaggaagttaaaaatctcagtaaccctattggcattacagtttctcgaagccatcattttggatttattttggttgatctgctgcccagaccaatagcaatacttatccagaaccttacgcatctgatccaagcacccaagatcagcctaaataaagaaaattgagtcatttgcgtacattaagtgtgaaataggtatactagatctagttagcttgtacccattaatcagacccaacttctccttttcaagcatcaatcgagaaagaacttctgcacaaagaataaagagatatggggagagggggtccctttgtctgagacctctaaatgggtaaaatgtcttagagataccaccattgagtaggagttgataccagacagtagaaatgcacagagagataaggccacaaacttgatcattgaacccataagccttaagcacacactctataaagcaccattccagcctatcataggctttcgacatgtcgaattttacccccacgaagccatgactcccctattttttgcccatatcatgcacaatcccatgggcaaggataaagtttttagcaatccatcctcctttaacaaacg

SEQ ID NO: 226292 - DNA, 3789 bp, Cannabis indica
atagatggaacaaccacagagaattcgatttctctgagtaaggactcaatccaagatatttcatcagctatacatgagcaagagccctgtattcaaactctatacttgatttggacacgacatgctgcttctttgatgatcatgactgtaatgccctactagctgaaggattaattattgtgctatcatttgctaatcaaagggtttagtataaaatcatgattaataaaaactttctaatacataaaaacttatacaaaatacagcataactaaagtgtcgcccaacgactaacaaaattgaacttatgctgtcctgaaggtctaaacactccatgcctaaccattcatatatgtacaatcttcattgagctccactctcactgctgttcagcctttgcttaatttgcctttacctacacatgaacaatatatctgtgagttgacagattcagtaagaaagcataaaatctaatcatataaccgacttgtaattagccgcccataaacctaattacgatgagtctataaccctcatccaacacgtaaaatttagtctcaaacgttcttaactatagtacgattgaccataacatcaacctatagtcagcaatcttgtcgtacagatgtgataggatcaatccgtactataagtacaacaaaccataataccacatggtactctaggtatactagtgttggtagcattagttcgtactttctgaaaattaccaaacatatatctgttaatatttaggtgcaactctatgtcatcaaaaccttcttactaatatgttatctaattggaaaacataaaatatgtacgctaaacatgtacatatgtacacctattatactaatcttaccttaatttcataatcaggtgtgactgccaacctgagtggaaaacctgctcgacgattagagaccctacgtcacattaacgtaaagctagtaagtctctcactaaaacacttttaaggttttaaactcttaatctaaagttttcctatagataaaaaaattgacaataccctaaatatcgaaaaaatataaaaattgacgtacccgaaaactaccctaaatattatacggtgattaagcgatttgttataacctctcactattgattccatgtgaatcatgcatgccaaaatatagtgttcactttgtgaccacttttctccttaagtacttaagctttgaaaattcaatcataaaagattaattttcacacaactcaaattctcaattaattttgataccaaacatatcaaaattaaacactaatttagacaccaaacatttctaaattgcactttattttaggtcaaaacatatcttttttcagtaataccattttctagtcttaagtttttaaatgttaattattttatctatttaataattatgataaattgtcaaataaaattcccatttaacttatttattaattagactttccaaagtctcttaattaaaaaataaatcctgaatttaatttgttttctaaaatttacccttgcttaatggaactcatagtcttacttagaattattgattaactaaaagttattacttgagtctacaagacaacattatcttaggtagtgtggggaccatgagtctatataatcaagctcccaataagtagttccgtaataaactgagtaaattctctattttattaattcctcctgattgtactatagattcagagttgtactcttaattacatagaacactctattcaccaagaatagatacgttattaattatacattatctaaataatcaatgatcctctatagatgatttacattgagtacggactaaaattaccatttgaactttaaatttattttatccttaaaatacttagcttcttataaataatatttaagtaaactaatataattactgaaataagagctcttctatttatgtctgttagctaagctctaaggaaatcattatttcacttctaagtaattatagaagctttagatttgatttctataattagaactcccactcaattgcactacagtgttcccaagatgtaagtattaggtcgatcctactggttaactgtaaagaacaagtcaaagagcacatgtaatatatttaagacaaaatctaaccatctaaggattaagatctttgatataagatcaactaagtcatatttacttagaaaagatattacagtaagtttacgatatcttttctactatgaatatcggtctagtccaatgtatagcaattacatctgatgctagtttactttactaatgccttgagaaagacattctacttatctaagtgtaagcaaaacccatcgcttattatcacatcagtataaatccagtgcattgataaatcatgagactaaatatttgaagcataatgatcataaatatttttcactatgtagaaaacataataatcatgcttatccatatgtttagaatttaatagaatttatatattaaaactataatcatgaatatatcgtgtgaactaggtaatataaaatttatcttctatatcattcattgataagctaataagattatattgagatatgttatatttagggcataaaattccaacatataattactctcaaaaaaggttaaagaatcactacacccccaagggtgtcaaattagtttggaggtatatactactacccctaccgcgaagctaacttatctaccaaagggtaatggattattctaaagggtctacccttacccccaacactcctatggtccaagtatcacattctacctacataagacaatgtgtcatcctagtatatagactacataatattcaagagcaagtgaaatgggtcttaggggtacaccccgaggtagtgactactaccactcgaatagagttgaacgaccgtgtcacatcccaggaagtaccctcaccataaccagctcattcaacattcaaattgcgcaataagctcaatggtggttacaaattcacagaaaatagtgggatattatcacgagaattagactacaaccacctctaaaagccaagaagatggttgagatactttcgtaacagtcacatctctagaagagagaaacattgactattcccctatataaggggtcaaacatgacctaggaaggaaaggaaaaattcataacttagagagtagaaactctacccaatttaattcttgcactcaagagcatgttcttgactttacgactccgattaataaaacacaagtggagtaggctaataccaacacttgcggtcgaacctctttaaattttggtgttctttatttttacttattatgattttgctttaattgctcattaattacgacttcgcgtcaattggctaaaaatcttgtgaacaatgggttagagagagaggggttgtcacatgtaagatctgccttttcagatttttttatgcatatatataataaataagggtcacgtctagcaatattggtagactcgctctgaataccgcgtccagctttgttcgacatagaaacgacaccaattttttttttaaaaaaataataaataataataattattatttatcacatcccctcccatttttcatgtccaacattgttgggaaaatgaaatttttttcatgtctatcattgccggacatgaaatctctccaaaacttgttcattctaataatatttttgttagacataaaaaagagacgtaaaggagattttttatagtatgattttcttttatattgtcacatttaatataagaaagat

SEQ ID NO: 226293 - DNA, 1662 bp, Cannabis indica
tatgagattgagattgagatgatgagataaagttagtgcaccgcaccaggagcttgctttggaatggaaaactgacagaggtaaaaaaaataccactgaacccgaaagagagagacaaagagcaagttgagagagtatatatatacagataaactaattttttttacatttataatattattaatattaatataataatcatataacttttatatacattatatatacatacataaacttttaaattaaatagcatatatataaatttatttatattttctataaatttggtcggtttcagttttttcggtcggtttgctaccaaaataaaaaccgaccatttaagggcagttttaaccgttaacagtttttttggttttcggtttgaacggtttcagttttagcggtgttcggtaggttagttaaaatggtttgaactattttctggattttatgctcatccttagttcacgacacctttgttcatagttgcttacagatcgggtctttgagtagctttcaaactgataacttcatgagttacttataatctcttggtctacataataatgttgagatctacttccatctcgcgtttgtctacttgatctactatgcatgcgggatcacgattgttctgtgcttgagcttgcttcatctcgtgttggtcttcttctttggaagagattagacacacgtcctctactcaagaacgagtgcacgttttctctatccgtgcgagaaagacattgaggatgtctcagaggaagactattggaccttggtttgtttccagggtttctcttattatcacgagaaaatccatgattccctggtcgaggctgcctcgcctctttattatgcgagatgattctggcatgttagttcattcattcccttggttttcaaatccatgggaagtttgtggaacatctcatcgatgttcttgattccttgtattattaggattcagttgattatccattgggacatcccttgtattcttaggttgttcctcttgggtatttgggggattcccttggtttgtttcttgtctcctggtcttggagcctcgaggtcttcctcgcggtctccttacagtaggatcaagttggttttgaggaactatcccttgtgtagccctggttgctgcagctctctctccaactcagtgtttcgtatgtttgattcagtcaagcattgttgaagttacatgttctctaactctaccaatggtacatatctagtagaatcataggcgtcttcactcctcctttctaggattcgatcaccatcagcattgaaattactctcgtttcttcctgaacgtggtgtttcaaatgtgttaggtctttgagatcctataggttctttgccaggttgatgtgttgtttcctcaggacgattatcgttgtattgatcgttatcagccattttaatatgggtagattgtgtttatgaggatggcttttcgagttttttatcaccaagactctcaatgaaagcaccaaactgttaacgctaatttttgttaactaaataaaaggccttttttgcaataaatatactatagaattaaataataataaataacaccatatattttacgtagttttgtagttaaaatctacatactctacgagtccttattattagggatat

SEQ ID NO: 226294 - DNA, 2204 bp, Cannabis indica
atatctttgaaacccaagccaccttctttcttaggcttacaagatcatcctaggcaacatttccattaccatttctcgtgtccactcccttccaaagataagcacgacaaatctgtgtaatatttttgaaattacaacttttggtaaaataacaatttgggaccaataagtgttaatatacatcaaacagagatgatgaggaccattcttcctgcataagaaaggttcctcgaactccaagttttgattctggttatcattttctccaccaaaccttaacagtctcctttagaaattctttttgagctaattgccattccaagatatttatagggtaaagagctttttttaaaactagacatatcaatagtcctatccaaagaaagagagtccaaacctgctccataaacaaaagattttgcttcattagctttgagcccaaaagtgttcgaaaataactgaaagcctttaagtagtagaagagcagacttgaaatcacccttgtaaaagagaagcaagtcatctgcaaaacataaatggttaagttttaagctcttacatctcgggtgacaagcaaagtcacaaatcttggcaattttagccatgattcttgataagtactccatgcctatcacaaagaggagttgcaacattgggtccccttgacgaagacccttcttagactggagatacccatgtaaagaaccattcaccataaaagagaagcgaggggttgtgacacaaaccataataagctcaacaaacttcttagaaaacataagagcttctagcatttccttaagaaactcccaatccactgtatcataagccttctgcaaatcagttttgaaaagacaagcagatttagccgctttcctctcatagcctctaaccatatcttgacacaccatgatgttgtgaacaatttgccttcctttgataaaaccacactggttttcagaaataatgtcaggatccacttctctcaatctgttgcaaatcatttttgtcgccactttatagatcacattgcaacaagcaattggtctataatcattcacagactcagggcacacagtcttaggagcaagagtaatagtggtaacattaatttccttcaatagcttaccagaattgaggaaagagataacgtcattcgaaacatccttcccggttatatcccaagtgtctttaaagaaggcactattaaaaccatcagggccaagagatttttcatttaggattgagaaaagagcatgcttaacatctgcttctatgtaatcttcaatcattttggcagcttgaaagtcagaaataatagccccttctctcacaatcttcttgttcaccttggttctactagcattccttgaaccaagcagagtctggtagaaatcaagaaaggcatgtatcactttatcttgctcctctacccaattgcctctcatatctttgattgagtatatggtgttttgaactcttcttttctgaatactagcatgacaaaatttggtattatcatcaccattctctatccaagctaacttcgctttttggcttaagaagagtaagtagttccggtgagtctcattgtatcgcaatctagcctctttctcattcttcaataactcctcattaccatgatggttttgaagagcttcttgaaccgaaatacactccttcaaggcaatgctatccaatgtctcaatattcccctttccatcttgaataagagctctcaacccaactttcatcctttttagcttggaaaccaaattaaacatgggagttccggtaacatttgtcttccaatagtcactaacagttgcattaaattggtttaagtttttccagaaattaaaatacctaaaaggcttgtgggtattcttaatttaaggataaaccgaaaccaacataggacaatgatcaaagtctccacaaagtctcttaattaacaaataagccctaaaattctatttcttcacaatcaagtcatatcttagtgaaaaattcataaactagacatagtctaattttagaattataattgattaattaaaatcaattaactgagtcttacaagcagtttatctcaactagtatgggaccatgggcctatataatcgagcttctaataagtagatctataattcaccaagcaaattctctaacttattaattcatccttgcaccactatagattt

SEQ ID NO: 226295 - DNA, 2039 bp, Cannabis indica
tccaatactttaaaataaaatcaaacaaaaaaatggaataacctttctatttcattacctctaaccaaacgccactttagagagtattgctaatcaataacaaaaagtaacacatttagaaggtgctaggcatcattagtgcccaatatcaatactcttttataatgagaaatgttaaaatacatcactggtgcctagcaccctactacatgtcaatatcgctattagtacaattaagtattgagtcccatataatttaatatagtaacttttagagagtattgcttaccaatcgtaaggcaacacatctagaaggtactaggcactattggtgttcaatagcaatgctctagtacctttcaacatttctcttatgatatatataaattatgacactttggagagtattagacactactaatacgttttaatatttttctaatgatatatatatatatatatttatatatatttgtatggtggctccatgggtagttagatagtagtagataaataattaaaaaacttctaatcttaattcttactcaatattctacaaaattattgatattctttgtgatgaactattattgagtattataccaatgatattatgctaatcatcattaattttataaatctaacaaaataagctaatatttttattgaatacaatattgtttttgtaatttcccaaaaatcaataattattcaatattgatagacaaaaatgcagtaaataatcttctaacctaaactatcctatactaaacctataactattttttttctttctaaagtttagaaagaaaaataaaataagattttccaaaatagaaaataaatgaattttaatttatatagaggattgaaggagcttggagttttgccatttgtgcaaaacatttccaaatacatcatagaaagcaatgtgagcctcttttggtgttaattgcatagacataaaaccttgtccatcatagaagaacttcaacccttctttgtttaacccttttatgtctcctctccaagcctttgatccagctccacttgtcaaaaattgtatgggactacacaaatatattacttaattagtaatatatatttatatattttttaattattttctagtgttaaataaaaatttaataatatttgtaattttttcttacctgtttgtgtcactaacatgttcgaggcaatgatcgtgtccattcatgtaaaaatcaacttcgttggcctgtgattatcgcacatcaaaagtgagttactttagtagtagagggcaacataaagaacattcctattaggcatcagtaaaccgaacactagcacaaggtgatccattgtaaatggttaatcattttctataataatgattacattaaaatatatggacccaatacataattacactaatagtaacatgacatcttgtagtgatgttgtatcctatccgaaacttttgttaggatttctagacattcgatcaagaattttagacatatttcgaacaatttccatttcctaaaatattatcgaaacaaaatatttagtaagttttgtatgtttcaaataattttgaaaattgatgtaatgaactcttaatattacatacctcaagaataggaagaagttgctctatgagttcttttgtatcaccatgatgtccaacacttctaatcgcatgatgaccaaccactatcctccacgtggcatgtgattcctttaaaatcttctcaacatccttttaaaatttacaagaatgctgtcgattagggcaagatgaaaaaagaatgcagttccgaagatatttgtaacgaaatttattttattatttatctttgttatattttataattataaattagggttttttggaaaaatatctttcttttttcgacaatttttgttttgataatttttggtataattgtcttataaccactctaacattcctcgatactctatcgaaattttacgatacttggtagagaattccaaacatcatgtcgaaaattcttcacattctatccgat

SEQ ID NO: 226296 - DNA, 2154 bp, Cannabis indica
gattcccaattaccatttgatagtttacagttaaaaatggagtaatagagtaaaatgcaattgaagtttgggttgaggtctacttaccattgttgaagcttgagtagaggaggaagagagacagagaaagaaagaggaggagagagagcggctcaagaatgaggagtgaggcctttatatatataaaccctaacccctctcagatcgacggctgtgattgaggtttctaagggcacggctagggttttgtatttctcccttaatttgcgaattgagttagttgggcttctctgtattcattacttgggccactattgtacgggcttgcggcccattaaagattgcgtatagtgaaggcaaatttttgtttgctttttatgaaagttcgaacttttgaggggtgtttttgtagaaataacattaaaatttttgttatcaaaataattttacaaaattttttatgtaaaataatcttttatggttatgaaaatgaccataaattatactgtacgactattatggtcacaaaacgattatagatttacactgtacaactatcacggtcgcatagaataaattaagtgagatatcttataaattttaatgtttaaaatgattaatttagcaaattcatgcaaatattttggttaaccatgataagattgaaaataacaaatattttggttagccatgcaaatattttctttaaatatatatatatatatatattctaattaaccatgattagatttttttcttcttttaaatcctattaaccatgataagattgacagtaacaaatgttttctctagccaattagaaatttttgtcccttgaacttttaaggtcattaaaactctctcctgaactattgagattgttggatttaataacttttgtccaattttagtaaggaaatttaacatggatgaaagtttagaagcatgatttggtacatgtcaaaatttgagatacataatttggtagatatcaatgtctagggagtataatttagtacataaacaatcactaaaaaaaaagaaacaatgtaaaaaatttattgtaaaaataaatataaacaattttttacttttttttacattgtatgccttatttttgtttatatatgcatttcacttttttttttaattttaaattaatttatagtgttaaaaatataattttaaatattttaattataggaagaaattaactagtaattccattaaccacattgattgacaataacaaatgttgtgtctagtcaattttagttcttttaaaatgaggcactatatttaggtataatgaccaaactactaagagtatttattggatcacatttaatatttttaggttttattcacattcaatctaattatatgtatatatattttgtttttgaatgaaatacataattcattaagataaattcaatgttacagaacaactcaaaaatcgtggataagcatccgaccaaacacaattcccctaaactagttacacagagattgtcagtgtatgggcattcgttgaatgcgaatgacgcaacaaaaaccaccaccaataacaactaataaagaatagatatataataaaatagactcaaaactaaaatttatgtgaagcttattaataaaatcaattgccactgaagaatcattattaataatggagatactgaaaccgaattgatgcgcaagaagcagacccaaaccaatgacaagcagctccaccacattaacagataaatcatataactcaccagatgaccacaccacctaaaccacacccgcaacataccgtatcacttcccccaatccgacaaagcccttccccggtacgaccaaagtatcagtcgtcagagcaaaagaatcaggaggtggtagtatccatcgagtacgacggtttgtaattgggtttgcaaggcctaatcccaaatgaagaccccgtcgaccatactccttaaactccgacagatgattatggactaaatttgggacaacatctaatctcgactgcttttaccaaataatactaagtttcgatcacactaaagccaccaaaaaagttgacatcatcaatttaaaagcttcacgagataacttgtcaatgagaataagagaatttcctacattggtccatatacacat

SEQ ID NO: 226297 - DNA, 1914 bp, Cannabis indica
atttccatgttatagtcgcgggcggctatgaactgcttttgaaaggtagattacaatttcttccaggaatggattgatccggaagccagtctttaccaccaatcttcaacagacttgatgagggtgagaaagatgcacaagcacttgacatcctcacttactcttgctacttgcatcatttcgttatacttggccaggtggattttcagatctgtgcgcccatcatacaactcgatctggggcattttgaagttttttgggagcaaggcttttgcctcctaacgcaagattctgggtcctcatctttagaattagtgaggaccccacttttcttctggacgagctttgttagagcagctatttgttcttctagcctttttgtgtcattgttcgggagatcttgtctacagactttatcgttcaaatgatttctgaggtcgttctctcctggccttgccttcttactttttgatttttcatattttccatcaagacaccttcggagatctattgtggaccaattgtcatcagaatattattccctggtcccaccatcctggcttacaaaatcactggggtggtttttccttcccctgggcatgggtacttttgtaccagtccttttttgcgcagtatgacctttcaaagtagaagggcgtccaagcttggaggcgtgggtggccttctgcgcctgagtaggtctactggctagatttgcatttttccaaggagttacaggagttgaacggttctaaccctacttttgcttttcccttgtcttgtacaggagcagaggctccatcatcagcaggattttccttgttattttctttgacacattccactgaagggtcatcatcggaatctcccccgtctagatctccaaacttagctcaaaggcgagcaatcactctccattctctgagaaaatttatcttgatgggccaacttctatttagtcttgagcaactctctaaacactcgaaccacttcggggtcctgcttgtagtggtattcatctttgtaatatccatctttatgtatttaccatcattatctttcccctcatttcaacatcttggttttcgtcgatgcggttgtgttggttgttcaggtcaccctctcgattgtcagtgttcgatgcatcccctccccttgcatcactcgactgggtgtgctctggtgagagagggtttacatcttccataatagcgtcgaaggcgcccagagggatctttttgggaactatttttctagtaattaccatggtcacagtagcattatgggtttaggtctttctttagctctcaatgaaagtaccaaaatatttatcgagatttttgaaaactaaatatttacgagctgaagaaatgataaaaaaaaaaacagtaataaatgagatagaaatttttgtgtggttcaggtgttgattaatattagtccacgaatcagtctattcacctcaaagagcacattcgatatttttacagtgcttatgcaagaaaaccctaactttgtttctctaagtttctcttgaagaagatgaaaggttagagagtattttagcagagcttcgactaagtagttttttcgattccctcttcatatgaaatatagaagggtatttataggctaaggggcgggtatggacatgccaatgactcgcctagggtttttgcaaaaagtccactaatggggtaaaatacatgcaaaaatagcgactattatgcccatttgaagggtttatgcttgtgcgttgctgcagctagacaataagggaccacaaatggtgcaggacatgtgttgccaaaaggtttcaccttgcagaataaacattcggacaagacacgtgtcgccaaaatgtttcaccttgtaaaggagatgcttagacaaaccgtcaggcaaaaaggtatg

SEQ ID NO: 226298 - DNA, 3649 bp, Cannabis indica
agtagtaattaatccaattcattgtggttcgacctcacttgcgtgagtatactacttgattgcgtgcacttgcgtagtaattaataattttcgcaacacctacttcctcagaggttaacgcaagaactactcctttcaaaaagagaaagtttgaggaggcctctgcatcactttgttcacgcccttggaagctccttcctccacatccttgggctatccgtgatttcccgtgggatatggagggacgagctaatgttactaaggatgcggaggaagagccctccgaggaggtctctctatccaatgacaacttcaatggcccggatgagtggaggtctaaaggaaagaatgtgatctcgtcgaggccaatggagggcacttttgtgattgaagaatcttgttcttttgggtcggcacgttctcatacccctgtggacgagattactactcctccacaggagccatgagaggtatcgcttggaactgtagagggttagggcagacctctacagttcgtgagttgaagtccctgattcggtcgcgctctccggatttcatctttctgaccgagctcaaagttgatactacttttttggtacgtattattaactccctccattttcattttcatattacttttccggctgtgggtactgcgggaggtattattttggcttggaaaattggatttgagtttgaatgtattgagtcctcccaaaaccatatctctggctttgtgttttcggacccccctctcacccttggctcctgtcatgtgtgtacggccccccgtatttccacgcaaaaaaagctttctgggaaaaactaatgtcgttaggggataggtttggtgggccgtggctggtcttaggtgatactaactttgtccttagtgcttctgaacgggttagctcaaaaggtagggaccagtttattcctataatctcaagtttggtgaatgcccgggggcttatttctttgcccatccagggtgacaggttgacctgggacaaccatcgctctgggcccaaccacgttaagtcggccctggataaaggtctagctaatggtgattgggttaggcttttcccgaaggctgttctctgctctttccagactgccaactcggatcaccgccctttgtgtctgtattctggtggtttgggggagaccatcagaaggaacttcaagtttgaggaagcttggactagggatgagcgaagcaaacttgtggttgattatgcttggaagtctatttctttcccttgggccccggccaggattttcaagaagatcggggctacacgggttgctcttatgcattggaatagatcccagtttggtaactttgacacccaaatctgggatctggaaagaaggttggactgttttcagaagctgcctgtgggatctagagattgggaattagaaatggagcttcgcaattctctaaacgaggctcgggctaggaaagaggtgtattggaaacaaagggctagaatttcctggctgaaggaaggggacaaatgctctaaatttttcttcctttctgcttctatcagaggtagaagaaatgccattgagagcatcctcaataaagacaatgtgtggataaccaaaagggagctcattgggaatgaattcttggagtttttccaaggcatcttcaggggacctgaaattgatgttgattttaattgtaatggccttgtccaggatagactgtctttggatgatcaagctgatcttattagaaggccttcccatgaggaaattcggaaaaccctatttgccatgagtagtaacaaagctccaggacctgatggtatgtcagtgctcttctttaaacactattgggattcggttgggtacgacttctgtgatgcagtttcaaacttcttcattactgggcgaatgcataaaggagttaatgccactaatattgtcctaattcccaaggtccagaacccgaaaagacctaatcactttcgtcctctttgcaatgtggtctacaaggtcatctctaaaatcattgctaataggatcaagcctttgttacctaagcttatctgccccacccaagctgcgttcgtgctaggaagggctatacaggataataatgtgatagcccaggaaatagtccactttttcaatcgaaagaaaggcagagaaggtttgtttgcaatcaagatcgatctaatgaaagcttatgatagactgagctggggttttatagatcatgtgctggattgttttgttgttccccaagagttccgaacttgggtttctcagtgcatttctaccacctcccttaatgttttcctgaatgggggatcagttggcaagatctttccctcgtgtggtctccggcaaggtgaccccttatccccttatttatttatctgggttgcggaaatattatctaggattctggaggatgcccagagttcgaagaccataagtgggatcaggctgagtaggggaggcccgatcttatctcatatcttctttgcggatgacctgattcttgttggtaaagccaacttagaggaagccaagggttactgggactgccttgaaaaattttgcacctggtcgggtcaaaaggttaataaaatgaagacctcaattttcttcagtaagaacactcccaatgttatgaaacagaggatcaaggatttgctgggaatcggatcgccagaaggaaaagttaaatatttagggctccctctattcagatctagacaaaaagatgctgattttcttttattctggataacctgactgagaaattgcatggttggaaggccaagacactctcgaaagcggggcgagctactctaataaagtctgtgggattggctcttcctctgtacgctatgcaaactactaaactatccaaccggcttgcgactaaaattgatggattggtgcgtgatttctggtggggctcggagaagggaaaccatggtctgtacctaaaagcctgggataaactatgcctccctaagtctttaggaggtttaggattccggaaatataaagaaatgaaccaggctttcctcgctaaatgggggtggaacctcctaacaggcaaccaatctttatgctgtcgtattcttgaagccaaatacctgaagggtaagtcttttctagattgtgttccgaaggcttcagactcgtggttttggaaaaatgtgactaaggctagaactatcatttgtaagggtgcctgtaagcgtgtggctgatggtcaggagacgaacatatggtctgacccttggattgcgcacctaaagggatttacccccatttctaatgggcggattatgaatagggagtcaaaggttgctgaattacttcagactaatggcggatggaacatccaaaaacttaatagttatttcgaccaggaaactgtctctgctattctgaaagggggtagccctaccggcatgggcaaggatatctagttctggactttggaaagtaacagccatttctcctgcaaatctgcttatagagccctggttgaggatagagtgagtccaggcgaggtggccccctctttatggaataagctatggaatagtaaaatccctgagagactcaagtttctttggtggtgtattctatccaaagctcttcc

SEQ ID NO: 226299 - DNA, 3158 bp, Cannabis indica
attattttagtatgttttgtatgagtttttttctaaactacttgaggctagttcaagtggcatagggggtgcgtgtgtattggaggtcctagttcgagtcccaacttatgctgatgtaatatataaacacttaaataaaaaaaaaagaatatgtagtttttttattttaaggatagaaattttattactttcaatcttaaataagattaacttcttataagataatcttaaataaaatggggttcttcaatcttcgtactatgattttttatttttttgagattcctactatgaatttaatatgttattatttttatataacttttttcaacaatttatttgattgtgtgttaaaccaaataatgcaatttaattaacagcaatttaattagattttcacatgcataactaaacacagttataaattttcaaataattatattctcttttttattattccagttaattaaattattttgaacaactcataccaaacatctccttaagctaaaacttacaaattataattaatttataattaactaaatattgaactttgaaaaataaaaatacccttaaatattatacttttgttattaaactaattggggaccgaaacaatgttaaaatagtatgtagggaacttgatcgcaatgatcaaatggatagggatctttttctcttcatacaatgttcgttcgtatgtaatcttttctatattttttggccctccaatggcttagggttaatttgttaccctgtgtctttgtatacgccgccctcctatagttcttacactagttgtggttgttgttttgagtctctctttggataacaaagggaaacttgtatgactaactcagagaaagttgctctagtcatgaactccaaaggtaatgagcttggaaaagacctcaatgagtgaattgtggtggcacgattgatatctacgaatgttatttttaatggcttactttagtcaattttattttggaaatagaagcttaaatcgggttggcaaatgcaggaggtggctaagagcacctttgttttacatttcatgctacaaatagagtgtcaataggtggttaagcatggaccgtggattgcttgtgatggtttcttaattgtcaagcctatgccaaatgatggagcttgggcttcggctgacctccaatcgatgccactatgggtttgtgcttatgagatcctcgcatgattttaaacctcgaaaaatgctacaagattacaaacaagatttgggacagtggttaacattgataaactgtggaaaaatgggttcccaaccactaaatacataaaatttcaggttcaagttcaactcttaaaatctctcttggttggcctcttctttcccctagaggaagggtcagcttatggaactatttcaagtatggaatcttccatgtatttactataaatgtggtattattggtcatgagaaatatagatgcaggtttcggaaacgtatgatctcggataactttgacagaacggtacctatgtacggtccacgaatacgattgttaaggtttatgccctaaaaagcctataaagatatttctaattatgaataagaactggatattttgctatatgcatgaatgcattaatgtttaatattaaataattcatatatgaatattaaaaaattccttatgcatacataaggttgtgacttgtattgtatagagaattaagatcacttagccatgaataaaaatagttagcaatatattaaattttaggaatctttaatcaatggttgctaatgcggttcactgatgcccgttatttggtgtaagtaatcttgattcgaattagtaatgtagcatgacatctaagtgaaggtgttgtatataatagagaatatataagataagaaccgatatgtaattaagttgtctttatcaaatatgaaatttactataaagacctgattcatatcataatcatgatcaatggtagatcagcctaaattcggagtaattatgaagtcttattcatgttattagtttttttgattcactcgttaaagtttcttagagaagatgattcttacaacttctattttgtgaatctaataatgtggatgactgaaacatgatctataattatagaattttgacttttctaacggatcgaatgttagtttcttttatgtgttaattctggaaagttgcacgtaaatttaaattagatctaaattatactttcactagtgaattaacgatactaaaagataaagaagtaatgagaagggtaaaacggtaatttgactaaaactaattacgaaccgacacaaggagggctaattattggaattgattgtatcaatggatactttagtaaagctcaataagtataactctataattactaagagttcaattccatattttagtggagtaatcatgaaattaataaataagatgatttggttaatgagattcaataaataatttagtttagtagagcttagaattataggtccatggtcctaggatcgccaccttgaaacaatgtcatggagagggataaaagttgtacgtaaaacttagaaataatctatttgtatttgcaaaatagaaataatttattttctaataaataatttatttttcaaattaattaaattgggaaaaaataaaagttattaggaaaaaagatacatcccttgtcttaaccaagacaagggaggcgccacatgcactgtgtctcatgcaccacctatataaattgtccccattaattttgtctttggattaattaattaatttattaattgaagacataagtatttgaatttaaaaagtagttgagatattctctcacgtggttgagaaattccatcaattggttatagaatataaatatctataacagaatttagttatgttattattcaaataattaaatatgatttaataaaagatttgaatttaaatatttaattaaataaaaaatttattgggtttacttctgttggaaatttttttaccaggatcttagatctactcacaagtatgttgattagcaccctaaatatgaacttctaaaacgattatgaaataaacacatataatgtatgagaaaccttatattgggtgcagcggaatattatgtatccttccgtt

SEQ ID NO: 226300 - DNA, 1559 bp, Cannabis indica
tgggttgcacttaaattttagcaacccgaactttagattgggttagaaaatatataggataaaccgcccaaaccgaccgatgtacagccctagtatacaatataatttcttcaagaaaatcgtgtcttcttctttactattttgttttggagtttttacaaaaatactttttttttgttaattttacatttgtaatgtccctatttttttcttacttttaaagtttcaaaactacacaaatattgtgttttagtacaaaaaaaaactaaaaaacaattgacagcaattataaaatacatagacaacaacaaaaaaacaattaaaacacaacaaaacgtcaactacacaacaatcaaatatcaatctcattgtaatacacaaatcaatatcaactcctcaatttatttttgtatttgaaacttttatatttaataagttttgacaacttaattctctttttgtactattactttattattttcatgaatgattcgacattgtagcaacccgtcgaagaattgtgccaaataagagcatcatccgtaggaaaaatattcagaggtattttaggtatacaaccaacacctgcttgacataaattggcttgcaaagccaccaaattccattatatgagtaatgaggatttgatcctttgaaaagattaggcataaagcaagtgtggcttggaatctgtggatcaaaattacaaacaatattaagacttgtacctactcgccatcacaatccttgttgcagcaactccttacccaaaacaatgcgtcgccaaattaatgatcgtgaagtgccaagactagtagtaagaaattggtgaccattaaaataatacatgtgacaaagaactttgctaaaaagggaattaggaaattctaataaccaccaagcttgcttagccaaaagagcttggttaaattgtatgaagttctaaaaccaaaaccaccttaaacttttgttttgcaaagaaaattccaatttttacaatgaattgattacccgaagttgttgagccccactgaaattcgggcatcatactctttatttgtcgacattaagtaattagcaatctgaaacaatatatattataggttgtaatggcctatagtatcgtctttaaaagaacatccttatctttaatggaaaataattgttctttccaaagagttgagtagcttccaactttatcagtaattccaccaaagagttcgatcttatcacgattagcaaatgagggtaagcctaagtagcactcatggcatggttaaattggcattctgaaagtatgtccgaaaaaatgttgatcttgatccctaaaattagacgagaaggagagaacacatttgttaacctaaaaactttccctggtgacatggacattagtatttgacatgtgtcaagaaagataacatctcggagttgagtattcctgagtcatagcgatcgacctaagaggggtctctagccatgcgcccaggttgactacgggaactctagaatgggtgttcagattctgttaaattgttttcaactcactatctcttagt

SEQ ID NO: 226301 - DNA, 1368 bp, Cannabis indica
ctaacgtgatatatatatatatatatatatatatatatttatcaataatattcattttattgataatttagaatacattgacattatttagtgatatcctcagttagagcacataaatattaaatatatactatgacatttttttttatttcatgtgtttgagttgtaactactttatatttttttttatgtccaaattatatatatggattcattaatgtctacacactatacttataatttctatagtttaagattaataaaaatttcaaatatatttctttttttcttgctgtaccaatttttcttggtctatatttattttattgctttataaattaataaatagtaattctaaccacatgcttagagtcatagtggttttggagtgttttctaattgatacattttagaatctatatatctataatacagagtatgaaatggtgacatgacactctaaaatcactccaaatatttttatttagataaaaaatctataagtaaaaacataattataaaatcactccaaatacttttatttagataaaaaaaattattattatattttcttcttttactattctaccttaaatattatctatttatgacttatatatatgacatttaaatgttaaattacaaaatctaaataaaaaaaaatatttaatgcacgtaacttctaaaccaaaccaaactaaaccacacaaattttcttaaaaaaaaatactgtaaattatctatctttttcttttttctctcttttcaattttcatccatatttgtttttttaaataattttttttaactagatttcaaagtaatgattttttttaatagaatgtgaacaatttatatgttaatagttctatttttactatgtttttaaattattagtatgatttttaatttattgttatcataacaactatgattagttagtccaaaattattcaattttttaaaaaaattatgattattaattagtttaaattaaattcgataatttatataaaaaaaattatttaattaaattataaaataagactatggatcattaactactaagatgaacatgtaaatatgacaaccctattattttcaacttaaagcttctacaattggaatagcccgtagtgctttttttgaaaaatattaaaataaattgttactaataattttcttaaagtaataaaaaaaaaagaggaaattacacttattatgggattttaaaagtttttatgataaatatgacacatttaagtttgaccaatttatatggtatttttttgttgttaggtcttttttatggtatttgatataccatatatatgtaattaggtttttcaaatcccatatttaatgttt

SEQ ID NO: 226302 - DNA, 1118 bp, Cannabis indica
atatcttttaacatttttcttttgtaaaagagcccgttaggttttaatcattttgtttgatgggtgtaattttttttttagtattattattggtttggattacacatgttgggattcgatctcaggatcctacacacaagcaccctctaataattttttattgtctcaaataattagtatttatcatctttatttcttgtgacaaatgcttgggctacttttctctcaatttctttcttactaacaacattttctcataggctaatttgcattgtaaatgttcttgaatctatatcacgatcagattgttatagagcatttagtatgagatttaggcttgttgggaatgtgaatgtcaaacttagcccatgtttaataaattaaattttcataatcaatgggtgtgttttctaaataagtcttattttttaaattaaaatagtagtaatcttagtctcctctaatatttttatattctctctaagtctactatctttaactcaaactcacgtaacaaagactttcgacaattatgaatctattttttttttggttggtaaatactatcttggactttgtattttgtaaaagttacagttagatcatctgttttgttaaatgataaaatagatcctgtattttttaaattgatacaaataggaccgtaagctcaatttttgattttttttttaatataactaacttgaagacaattcctaacacgaatagatgcaaaaaatttaatcaattttgtcacaacacttctaggccagattattattaagttttatcttgacaaaaaatcagttcaggatcctatttgtactattttagaaaatacatgattcattttatcataaagtccaatctataacttttataatacacaaagtctaaaataatactcttcattttttgtttggtaaagctttgtagttcattattgcttctttgactattattcatgataatcctttttcttttcctcaatggattataattctatgttttcattattggtgtatgaccaatgagttgagatatttttgatgaaatgtcaaagaggggtattttatttacttctttcgttccacgcctctaagttatggtctaagaac

SEQ ID NO: 226303 - DNA, 1336 bp, Cannabis indica
agagctttttagcacttctcattgtgattggtctaaagtgatcagctgcattccctgttctatcacacatgaggacaatatggaacttcttaaacctgtgacagaggacaaggtgaaaaaggcagtatttcagatgcatccggataagtcccccaggccggatggtatgacccctgcatttttttagaaaagttgggcggttgttaggtgggatgtggtaactttggttcaacattttgttacggatggagtgttacaagatgggctgaatagaaccaacattgtgctaattccaaagaagaagagtccagttttacttggtgatttgcgtcttatatctctttgtaatgttttgatgaaaattgttacaaaagtattggccaataggatgaaagttttttttgaaaacggtggtggcggatactcaaagtgcttttgtgccaggacgtcttatttctgacaacattatggtctcttatgaagttatgcattacttgaaaagaagaggcgaggcaacaatggctatatggctcttaaactcaacatgagcaaggcatatgatagaattgagtaggcttatctggaggctgttatgagaaaaatggggctccatgagtggtgggttcacttagtcatgaagtgtgtatctacaatgtcttatcaagtcattcatgatggtcatgagatgggtctgattgttccaagacgtggtattagacaaggtgacctctttctccatacttatttattatttgtgcggaaggcttctcagcgctaattaaaaagtatgagattaagaagtggatccacggaatcaaagtttgtcgtcgggcacctatcattcacatgttttttgcagatgacaactacctttattgtaaagccaataccgccgaggcacttaaggtgttggagatgcttaaaaaatatgaggatgcttcaggacagaaagttaatctctcaaaatcctcaatatttttcatcacaaatgttggagggcctgtgcgacaactcctatgccatactcttcaaatggttgaagcagatgaacacaatacttatcttggtcttcctaacactttgggtcgcaacaaaacatcgattctgggttttctaaaggataaaatcagaaagagagttcagattgggatggaaaattactatctcgagctagaaagaaagtactcataaaaatagtagtgcaatctctcccaacttttgctatgggtgtctttcttcttcctatggaggtgactaaggatctggagcggtccattactaaattttggtggcatacaaataactctcaaggtaaaggtattcattggatgcgttg

SEQ ID NO: 226304 - DNA, 2920 bp, Cannabis indica
aaagaaaaagaaagaaaaaaaagcctagttcctattttttaaaaaaggaacatattatgcaacctgataaaaaataagtgtcgattttactaattcatgaaaagggaagcaatatccaaaaatttgtttttctcaataaagaagaaaccaaattttaagtagttattttatacatttcaatattaataatctcattccatcaatttgctcagaaccacaagcaataacaaatcaaatatgattatgtgtaaattgtcaatcaatattcaaatcactcatgccaatggactttccctcgatctctatttcgaaataaactttgtgggtcactttttctaaatcaaaacctatccctgttaaacactcaaaaaataaaataataaaccattctttgaataccaaaacaaagggaccaattacaaaaacaaaggcatagaaattacctcataaggctccttttcgacaacaacttgcacaaaagctttgcttaatctgctttgatatcagttacccaaacatcaaacttagaacaattaccatggatcataataaaaaaggggatctttcacaaacccattatcctctcaaattaatatagctaagaaattacaattctgcattttcttcttcaaggcagccttcaattatattatgagcaactaattttgaattatcttttttctatacaacatcatcatagagaatcacaattgaatcgtaccaacaataaatgtacagagatataaaaaggctagtttaccccattataggtgctaaaaacgcttaacattcgaattgataagacaataaagctcatccaactctgtagaagataaaatggccatatcaaactgtacgatatcctgaggaaagccatctaagaattgcaaatcagggtatgtttccacaagaccatcaatgaactcagtcaccacaagaacatcataacattatataatttaaacttgcatcactcaaccctttaaagaacattaatcaacaaaaaattatcaatctttaaaatcaacaaataatagcaataacatttatataatatcaacaaaattattctagttttattttgattttcccataattcaaaacaaaaacaataatgattgaaaatccaaacaataaaattctaattacacaagatgagaaattcgtgcatgtatattagaatcaaaaacagtatttatttgagtttacgggcaatgcatttagagaagaatattgaaaaggatttagttgaggaagggagaaagagcgttgtagtggtaccattaggatcattcatgagcttcttgccctgaaaagccacgacgaacgaaggaatcagagttagaaaaagagagaggttggtgaagcaataagtcaaaaaagatatatctattggctcaactgttgcttacctatcgagaagcgcatgataggagccgagacacggtatccctttatcgagaaattagttttttccctcctgatggctttaagaaaactaagaccctactttcaggcccatccgattaaggtacttacaaatcacccgctttggcaagtcttgcagaaacctgaagcctcagactccttaaatgggccatggaattgagctagtttgatatacactatgtcccgcacatctctataaaaggacatgccctagcagaattcataacggaatgtaatgaagtagaggcctgctctagtaggccagcccagcagatgccggtatggaaactgttcgtcgatggggtgtcaaatgaaaatggattcggtgctgggataacaatgatatcgccagacagactccgactccaggccgccatacgctttgcatttccagcttccaacaacaaggccgaatacgaagcgctaattgtagaactaagactggccaaagccgtaggggctgcaagggtagaagtcttcagtgattctcagttagtggttagccaggcatcaagaaaataccaaacacgtggacaaaaaatggccgcttacgtagcaattgtcagagacttgctgcacgagtttatagaatacaaagtggaaagaatctcacgagaaaagaacgctcatggagactgtctggctaagctagcctcacagcgaaatagaaagactgggggtagaacctgtcgaacacctcgcggagccaagcatcaaagccaaagagatggtagctactaatgaggaaagaccgagttggatggactccatcatcaaatgcataacgcaaggagagttgcctcatgaaagggctgtatctaggaggttacagtaccaggcgcatcgatacataatgatggataatgtcctttatcggagagggctcaacataccgtactcaaggtgtgtgtcggaccctgaagctagacggatcatgcaagaagtccatgaagggtttttgtggagaccacacaggaggtccgagtctctggaagaatatactgagacaaggatgcttttggccaacaatgaagaaggattgtgtagactatgtcctaaaatgggattcatgccaatgatttgcaagcataccgagagccccgcccaaagaaattaccttgatgactagcccctggccctttgcagtgtgggggatagatcttattggatccttaccaacgggaaagggaggggtaaagtatgctatagtggttgtagactatttcacaaaatgaacagaggccgagcctatgaagatcataaccgctaagaaagcattagactttgttatcaaaaacatcgtgtgtcgatacgacttgcctcacaaaatagtctcagacaatggaaagcagtttgactgcgaagaattcacaaacttctgcaaccaacacggagtcgtcaaaagcttctctgcggttacaaggccgcaaacaaatggacaggcggaggccgtcaacaaaatactaaaagt

SEQ ID NO: 226305 - DNA, 1536 bp, Cannabis indica
ttacaagaatggtgggctgtaatcctgccagacagatctggaaagctcttgagcagcactacacactaaagatttcctccaagattcttgaattttgaacaaaactgcagaaactaaagaaaggcaccctgagtttgaatgattatcttctcaaggtcaagcaacatgtcgacttgttggcctctgttggagaaattctttcagatcgtgatcatattgctgctattttcaaaggcctacccagcgaatatgacacttttatcatctccattattttcttgttctcacatccctgaggatggcacaagacatattttacatgaatcaggttctccaacatactgtcctattcctactgctcctcctctacaacagcagccatctgacatccctggttgtgttcttgagcagcaaaatatcagctctgttgttcccgactcacctgctgcagttgattctggttgtgttgttgctgatcatggagttgttcacaataacaatgctgatgtttcatctactgcaccttcaattcctagtacttctgccactggtgcagctcctgttgcagcaagcaatactcactcaatgcaaactcgtgcaaagaatgggatcaaaaagccaaaagcttatcttgccactcagcttcctacctctctcaaacaagctttacagcaactaaagtggaataaagccatggccgatgaagttcttgctctcaaaaagaacaaaacttacactcttgtcaaacttccacttggtaggattgtaataggctgcaaatgggtctatcggattaaagaaaatcctgatggcagtgtaaacaagctcaaagctcgattagttgccaaggggtttcaccaacaaccgggtttcgatttcacagaaacttttagtcccgttgtcaaaccagtcaccatacgtgttgtcctcactcttgctctctcaaaaggatgggatttaaggcaagttgatgttaataatgccttcctaaatggtgaattacaagaggaagtatatatggttcaaccccttggttttgaagaccctaataatcctgaccttgtttgcaagttacacaaagctctatatggcctcaaacaagctcctcgagcttggtttgagaaactccacagctgctttctaaatttaggctttatttgtctcctccaaatctgatcatagtctctttattagacacacaccattgtcaatgacaatcatccttgtctatgtggatgatattattattactggcagtgactcccatttgatatctcattacacagcagcctctaatgcccaattctctctcaaagaccttggcaagcttcagctctttcttggtattgaagttaccaatactgaagcaggtcttcatttatctcaggccaaatatattagagactttcttcataaagcagatatggatgaggcaaagccatccaacacccccatgatcagtagccttaagctctctgcctatggaagtccatgttggatatgattttaccaagatcttagatctactcacaagta

SEQ ID NO: 226306 - DNA, 1568 bp, Cannabis indica
ataattataaaaaaaaatgaaaaattatttgtaattatatttaaataaagaaacactagtatttatcttaactatatttccataaatatactttcatcacattcaaatgtagtaattaagttgctaaatatacgtgtgtgtgtgtatatatatataatctcattttattatatattcaaatatatatatgtttataatagttaattaaaaaatagctatacatatatactataaattcattatcttcaaaatttcaggggaggccagggccatcccaacctttaaagtgcctccgccactgcccacaccggccataaccaaaatttaaaaaaatgaactaaccccaatataaaataaataaaaaaaacaagatctaacaatttttttacaaatttaaaatttacaaatataaaaatacaaactgttgctttcatgttgttttcaaaataaaattatttttacgctaattatacattatatattgtgttgtcacacaacataaaaacaattatttttcctaaaaatataactaataaatttgtaagaaaaaaatataaaaaaaatattattttaaatactttgtgtataattttctaatttattagcttgtgttattgttaaatgagaaaaataaaaaataagtactaatagtagcaccattaaaggcataatcttcatctatacaatggtatttttatctctttccaaagctatctaccaaactttatccttttttcacctttttttatggaattttttcatttttttatggaattttttttcaccttcatgaccataatcatcatattttgaatatcttgatatcatatttccaattcttccaattcgactttggtgatctctaacccagcccaatataaagttgattaaaaaaatagaaaattaaatatccaattataataacattcaaatttgattaaaattatacacataattgtcatattttttctttaaaaatatgtaagaaaataataaagtaacaatcaaatatgtgaagagtgttcattaaattaaaagagtgattgtcttgtgggatgtgtaaagtgcttccgagttaaaaatctatttttcattgtctctagggtcggctctgaggtgagatgaaggaggcagctgctttaggccccctactgctcaggcccccatttcaaacaaatattaaaatataattagtaataaaataaataataatactcataatactaaatatgttttgcagcttagtagtaatttaattagtttatcaattaaaaggtttaaagttcaaatcccaacaacttcacttttttattaaatttttattttttcctatagggtcagccttgattgtctcgtggggtgttcgtttgcttttgcttgttggcagatggtaggtattttggtgatatagattgatgacaactctttttggggatgacttcgtgatagattttagtgttggaattctgtgataagatatagagttgttatgctttgctaggctttgtggtgtgtgcgcaatgacaaggtctggaatggtaaggataagaatgttaatcaggtggttt

SEQ ID NO: 226307 - DNA, 2393 bp, Cannabis indica
aatatatattaggtggggtaattgtattggtaagtaaaaggacagtcaagcttataatatgtatcataagtcaaatatatattatggttatgataaaaatataatagacaacaagcttgtaaagctggttgctgcttgagattgtcaagcttgtaaacaagtaacaaactgcttaagaaagaataacttataatgtatcctagactatgttcattcaaattaatgggaacttgagaaaacactaacctttggaggtagtgtctattttttgtgtattatggacatttattctagaaaattttaggttttcttgttaaaacataaaaatgaagcctttcaaaagtttgtccattggaaattgctcgttgaaatctaagtaacagaaaactgaaaaacataaagaacagataatggcctagaattttgtaatgagaaatttacagagtattgtttaagacaatagaattataaggcattggacagtgaggaaaatcccttaacaaaatggagtttctgagagaatgaacaagactttactaaataaagccagctgcttgctattcaatactggcctttccaatgatttctatagaaaagaagtggtaactgtaatttacctaatcaatagatgccactccagtacaatagaagggaaggccccagaggaaattcggtttggtaaaccactatacatttctcatataaggtctttggctgtgcaacatatgcccaccaaagtgttggtaagttggagcctaaggctctaaaatgtatcttttgggctacccagaaggagttaaaagttacaggttgtgggttaaaggaaaaggagggttcaaaactcttataactagggatgtaattttttaagaaaataatttttcttgtaaacattctaatgagcttaatgcaggtactacataagataaccctataggtacaactattgatttacaacctgaaacaaaacctaatccagatgatgtggaaccaactcaggaggaaccacaggctacactagatcaggtggaacctgaaataaaaaatgagagatatataaaccaggaacacctggcagatgaccagcttgccagggacagaacaaggaggccacttaaacctaattaaagatacaaatacaacatatgggatgagaatattgcatatgcctacatgtgcaagctagaagtaaaaatctataaaacaaagtagcctggttggaagcaatgaaggaagaatgtactccttgattaagaacaaaacctaaagagttggtcttagacctgaaggtaagagtgtagtgtcctataaatcgctctttaaggtgaaagagggaagaaataaggttgaacctgtgatgtttaaagctaggttagtggcaaaagagtttacacaagtggagggagtagatttcaaaaagatattttatccagtggttaagtataaaactataagactcatgctatctttagaaacacagtttgacatggaggttgaccagatggatgtgactacaactttcctacacggggacctaaaaaaagacatctacatgaacaagctaagggatttgaggtcaaaggtaaggaagggtatgtgtgcaagctagaaaaatctttgtatggattgaagaagtctccaagataatgggacaaaaggtttgatacctttatgaattaagaagggttctacagaagctattatgatcattgtttgtacttcaaaggatttgaagtaaacaaagtcatctacctatcactctatgtggatgacatgctgataatcaacaagaatatggctaatgttgacaaggttaaaagaatcctcaagttaaaatttgagatgaaggacattggggtagcaaacaagattttagggattaacatcctaagggacaaagagaaactgatgctacactaggaagattacaatgtcaaaatcatagaaaaattttctatgaaggttgtcaaggctgttacacagccaattgcccaccaatatcttatgtctaataccatgtgctctaaaattacaatggaacaagaaaaaatgatagaagtaccctacttaaatgtagtaggctctataatgtatttatgattagcaataaacctgatcttgcttatgcaatcaacgtgctaagcaggttcatgtctaactcaggaaaaaatcattggaaattagccatgaaatggcttatcagatacttaaaaggcacaactaaagtaggattgatgtattaggcacttcaaagcacaacagaatattgaggaatttacatatgctgactatgcaagtaaaagggaaagagacacaaggagatctacatcagcctattttttcttaagaggaggtaattgcacgagttgaaaagtcaaattacaacaagtagt

SEQ ID NO: 226308 - DNA, 3513 bp, Cannabis indica
ataaataacaatgataaattatttaaatagctataaataatttcctgattaatcataaataactgctaatttccaaattaactaagcgggctttacatatatgtagacggtctttctcgattttatcaaccctccttgtatttttcgtttaggaagacgacttaatggtttgcccctagtggcctttttgtaaagacaagtttttaaaccacttgggttttctcttatcttaaatgccttgtactttttcgttagaagttaatataattgcgtgtccttgcatttttatttacaatgtaaacaattatattttgatcaaatgtaaagtactctaaggttttttcattgctcgtaatcttcctgtttaagtagttagttatctaccaaactttttgattttcgagcagttgtcaattctgcctcgctattgcagttataatctgccttaagcaaacttgaatatacttttaatcattttatcagtttgtatatttttgatttcttgtgtgaaaagttaggttatctatctatttactaggtttaagtactttatcaagacgtctcgacgtctcgtttagtactttccgggctcgtgcgaaccgttaatattcagctttatacgcgagttatgagttatatgtcatttatagcttttgattttcctttcctatcaaataggtttttaataaaaaattatagttgtttgatcccttcttcgtcaaaatggtttgatcaggatgctataacaattcgacccctctcttatgaaaaaggttttgtcatgaagttataacagttcgacccctctttcatcaaaaaggtttactcgagaaccaaaattaaaaaaaatatatttttgactattatctaaaataaatttataccggacaaattcaaattataattgagtgtcattggtgatgccagtaataatatagaattatttaacattatactttgagtgtaaacattaaaggacatatccatttgagcaaagaaatacaatatgaatatatttattcactcgaggtccatttttcaccattatgtcacattattgtattattggtaatatggacaggtaatctttttgggaacataatgggtgagttacacgaaaagtttgatttttggcgtcattaatgtcacattaattatgatatctcattggaaacttaatgggtgggttacgtctatttcttggaattattacttaattaatttataagtaatgagtaagatttttcttcattaatatccacataatctattggctttctcaatgtgtttctcacattatatttaagtggaacaacttttctttcatttaacaagtttacaattggagaaaataacattacatcaaagattgaagaagtaattcgtgcgagatctatattctcaaacaaaaaagaaatatacttaagtggagagatggaagttctacagggtgaaatagtacatcggcttagaacaatagaccgagacttgttcgcaatgaaagaggtggttattcgtaattctttctgtccaaattggaagcatccatctcgagagattctagaagtccgtgatcttcaacgagaatatgataaaaaatacattgaaacgattgaggaggaatggagctattggacgttcgaagaagtggatattgcacgaaaacttggttatcatgataacttgttgttatcgttcctaggatataacgtgcacactaataaatttattaacccttctcgctaagcttctaactttgtcttatttttacagtttgaataaatattgtattaaaactttttttaaaatgaaaagttcttttgaaagtatttgtatatcatttgtttaaaaacttgcatataaaattttaaagaaagtttaaatgtctcatcactattgccataagaatgaaaataagaataaatatggaatgaaataaaatttaggcgggcagtaaaaaaaattgatcaaaaaagtattaattgtagaatgatattcctaaacttcaatatgcaaccaaacaaaagaattgaatgaagattgtttttctcttcattccagtccattccattcaattacctccaaacaaatgtcaccttaattggtgggttacacgataagtttgtttttggcctcattaatgtcacattaagaaatgttattgggaacttaattggagggttacatgaaaagtttatttttttgacatttttatttaattaatttatattcaatgactaagatttatcttcattaatctgacagaaattgatttttgggaaactaatttgatactcaattttttcggtaattatattttatagcaccaatatattatggggaactactatatttaaaaaaaaaattatatatgacactcttacaccaataaattaaatactcattaatgactcacagaagggtctagagatttaaaatattaggcataaaaaaaatagcattaattatattatgtagacaatattaaataattaaatatattttcttggaatgataaagaaaatttcaaattgttctatattaattgacaaatattttcttttctttttactcaatgtaatcattataaattactaaaacctaatcctaacatctccattgtataagttttacttacatatcaatgtcattacattgttttcttgtcaacaacaaaaaattagagttgaagatgaagcataacatcatgcaatgtgagggtaagtattgttaattagttttctcctttaaaagtgaaaacacaattcttgaatacagaattacatgcttttcgtgaagatatcaatggtcgactcatcaaaactcaatatgaaagacagactttaagaatgagctttttagaccataacactcgaccctacaaggaaacatcacagtatcttgctggcttgttacaagttcaaggtgatttatgcaaatcatttatcaaagattcggaggaggaagacttaatgtggagtaaaaaattattccttgtagacagtgaaatcaattatcataagacgttacttttcgttcacatgaacaagtagttggttataaagctttcatctaaacgtttatggtacaacattgtatgtctttgttaatgttttttttgaaaatcggctacttttgtcttaaaaatatttgactaaaaagcttgtgcgtgatatcctatttatttaacatataaatcttattaaatgatccttcagcttgtaacttctaccaatattactttcttctaaattaaattcccttatgaattggcccaagttacaaagtattaggaatatatattacgataattaaatcattactaaagaaacacctaacattacatttatatataaccgtaaaataattacgaaagaaccgcctctctttttatctgtgtatcctctttcctatctcctctcttattttttttttacattttcgtagccatggctgatgtattcgaagaatatttgaagactatagacatggttatttgtaaactccaattcc

SEQ ID NO: 226309 - DNA, 3297 bp, Cannabis indica
atttagagattgatttttaattttctttttatcttcccccatttaagtaatgtttctttaagtattggaacatcaatttttagtttatttttggattaacttaagaacatatttaaatcattaagctttcttaaacactaatatattgcattcagtattcaataataatctcactttcaaataacatagaaaaaacctagcataaaatttaatatacgtatatatatatatatatgaatgtgggttgtcctcttcttcctccgcctctcaattctccctctaattctcaaagtaatagtaaacatagatgagcaacgtattcataatcaacgccacgctggagtgccatttgttaagaaaatagattagttaatcattgttaattaattagttaattgtgcttttactggtttattaagtttgttgcattgtattctgcaattgcctttttctgttttgagttggtctcctctttaccaacattagggccacttgtctttcatctattggtgcttgtatttctctctcaaagtatataaagaaaatgttgtctcagcctccattttagctgagaattccaattaccatttctgtgtgtaattcaacttggtatcagagccaagaaaaagccttccccgatgtcgtcgcaatctcagactcctcaggcaactactacggctgcagcaggtgctgcaagtccacctatacttgtttctcaacaaaactatacccaaccattcagtactttgaatcaaccattccctttgaagctcgacaggaaaaactatgttctctggaaaacaatggtgtctacagtgatacgtggtcatcgccttgatggttttgtcaatggaactcgtccatgcccaccggagtttgttccagctccaatcaccactgaaggagaagcaggttttggtgtaaccatcaacccagatttcgaacactggattgtgagtgatcaacttctaatgggttggttatacagctcaatgacagaaggaattgctaccgaggttatgggctgtgctacagcagcagcactgtggaaagcacttgaaaacttgtatggtgctcactcaaagtcgagaatggacgatacacgcaccctgattcagaccacaagaaaaggatcaacatccatggaagactatctgaagcaaaagaaagcctgggctgactctctggcccttgctggagaaccctatccagaaaaccagctcatatccaacgttacctctggcttggatatcgaatatctaccaatagtgctacaaatcgaagctcgacagtcaacaacttggcaggaattgcagggaatacttcttgcatttgataacaagatggagagacttcaaggtttgagtcttaatagtagtactaaacctacccatcctcctgtgtcacctaatgctaactttgcaaatcgaccaaacaacaacaacagaggccgtgggggttatcagaatcaaggaaatggcagaggaaactttaaccgtggtggtggaaacaactcaggcagaggtcgtggaggtagatcgaatggatctaagcccacttgccaagtttgtggtcgttatggtcattcagcagctatttgctacaatcggtatgatgaagcttacatgggttcagatccaaaaacagggggccaaaacagtcagaaaaacaaccaaggagctgctgcctacactgctgcaccagaagccattgacagtgaagcttggtttgtggacagtggagctagtaatcatgttactgctgatgaaaacaacatgattcagaagaatgagtatggtggtaaggaaaaactcactataggtgatggtaatagccttaacatttcacattttggctatggcaaattgcaaacaaacaatgaatcgaattctctgttgctgaataacatgttgttagttcctgatattgcaaaaaacccgttaagtgtatcaagtttagttgctgacaatgaaatatttgttgaatttcatcctaaatgttattttgtgaaggacaaacacacaaagagggtgctgctggaaggagtacttagagatggtctctaccaattcagcaacaagttttctcacaaacaaaaacagccaaagtgtttttctaggtgtctctaatgtgtctaagtctaaagtagtctcaactactagtgttaatctttccaagaaggatatatggcataggcgtttaggccatccatccactagagttcttaaactcatttgtccaacaatgtaaaaattcccaaagatgaaatagaaaatttttgtgaagcttgtcaacttggaaaatctcatgccttgccatttaaactgtcttctttcagagcctctaaagtacttgagttaattcacactgatttgtggggtcctgccccgattgcatcaaatactaatttcaagttttacatacatttcattgatgacttcagcagatttacttggatttatcctttgaaaaacaaatctgatgcactcaatgcttttgttgaatttaaagcttttgctgaaaaccaatttgaaaataaaattaaaagtattaaatgcgattggggtggagagtatcaagcatttgaaagtttagtcaaaaccagtggtattcattttcaacactcatgtcctcacacttcagcacaaaatgggagagctgaaaggaagcacagacacattgttgaaatgggtctgacattgcttgctcaagctaacatgcccttaaaatattgggttgatgcctttcaaacctctgtatatctgataaatagactcccaactcccattttgcataacaaaactccatttgaaattctgttctgtaagcagccagattataagcaaataaaaacttttggggctgcttgctacccttgtattcgaccctatcaacaacacaaatttcagtttcactcaccgaaatgtgtgaatctaaggtacaatgaatcctacagaggctacaagtgcttaagcactacaggccgagtctatgtgtctcgaaatgtagtttttaatgaaagtgaatttcctttccaaacagggttcttgaacacttatgcaccagaaaaacaagtggtcattcaaaatgaatcatggtctcaacttccaaatgttcactttgaacaacatagccaaatatcacagcccacaaccaattctggaccatctcgaggtagttcaactcctacaccagcagcatcttcatcacagcaggttagtgaatcaaattcatcaaatattaatcttgatacacttgatcatggctttattgtacctgaaatcatcactgagatat

SEQ ID NO: 226310 - DNA, 1221 bp, Cannabis indica
caaagcctcgcctggatgacggcagttctgccactattgcctccttagtgacgcccactgggggtccctcaattggtgttggcattgttcggttgtcgggttcctatgcggtggagtgtagtggagtttcacttctcctcctccagcctccggtggtctctgttgctggtggtaagtaactaaatagataatataacttgaagtggccgcctatggataacatgtatgtttggctgaggtctggtatttaattattgaattgcctaggcacttgctttagtttcttgcctgtttcctaaacacctgggtatatttttagggcacggttacgaactaaagtttgcaaaagtatgttttggtgatttcggtgataagaaagaaagaaacccataagcaaccatattatgttcttgttttctaagtagtttcatgttgtaattcaatcactctactgctttttccattgcttctcaattctaattactttcttattctcttgtggttttgatgttgatgcaggatgagaaaatttatgtgcagccaattcctgtatctatgtaagctctattttaatttcataatacatatatatgaatatattatttcttctaaatttcttgttcagaagaaatgatagtagtattagtggaagtagaagaaaagtttcagaagttgataaagttattatctccagctatagaagataaatgctcttaaattacattaagagattctaaactcttagtaattcagaaaaagataaaacaataatatccttagtaaatcagctctattttaatgtattgggattattatatttacagaattcagaacaaaatgattagtataggatgttgaagttaattagttggctagtgattgtcattggtgctctagctttgctgatcaaagggaaaaaaaagcagaattgctaatcatattatgtcactaccgtttgttaagggctgcaattttctatcctatctttgaatattcgatttctgtatattacaggattaacttgcctggaactgattgggtattggtcaggacaagtgatggaaagaaataccattacaacaataaaactgaggtagccctcgcttaaagtttttattaattattatggtctttcttttttatatattcttttcctttcaatttctttggttcactattttttaattcagtacagaacaaaaagagagagagaaatgagat

SEQ ID NO: 226311 - DNA, 1621 bp, Cannabis indica
cataaaacccaacattaatatcaacatgaccatcgtagggagacagtaagatcctcctttccacaccagattcttgcatttaggaaggatcttcaatctccataggttgttcctaaagctcgaaatagccacatggttccaagagccattcattttctacaacaaattgaatgcactcttcactgtgtattcccctgaaatcttagaagaccagtaaaaagaatctggccctgcattagcttgaatcggtatgccacatattagtgctttgtctctagcattgaacagatcattcacaatatccaaatgccagccaacactatcaacttgtaagagattttcaaccaaaatgccattaagagctagatgaaaggatgtaacacaaggattattctcatctggtagccaacggtcacccaaaacagtcactgatttataatcacctattttctaatgcaccccattagttaccacactttgagcctcccaaatgctacgtcaaacaaagctcggattgtgactaagttgagtcgtgagataagtgccatgaggaaaataccttgccttgaaaattctaatggctaacgaagttggacgagtaaggaaacgccaaccttgctttccaagaagagataaattgtgatgacagagattacgaaatcccataccccctgtgcttttatgtttacttaatctttctcatgacatccagtgaatactcttgtctttagcattagaacttattctattaaagaaggaacttaaaaatttcaaaaaaaatattcaaatgcttaaccctggatcttttatttttgaggaagttcagaatgtaggtcaaaaaggctttgttggtcttggatcaaatggtactgaaacttctggaaaaacaaaatttgtaagatctagtgttccagcgaattaacctgctgctgcaaatttaagatctgctgctacaaaaatgtcgtctccagtaagttcaaaaaggataagatctcaagtaagaaggtttgttccaatctatcatttttgtggtattaaggggcatattcgacctaaatatttcaccatcaaaatttgtacaaaacaaattattttggtaatttgaaaatttttcaaaagaaacatagtgctttgaaacaaaaatggattgaaaaagaaaaatgtctagctggtttttctgataaaagtgttgattctcaaatgtggtattttgacagtggttgttctagacatatgacaggtgacaaggattttttagtgaatatcagaccaatgcaatgtggtgaggtcacgttaggtaatggtttaacaggaaatgtcattggtatgggaactctcaattttgaagggttaccaaggttgaaaaatgttatgattgttgagggactaaaagctaatttacttagcattagtcagatttgtaatcaagggtataccgtcaattttgacaatgatcaatgttttgttcttaatagtgataaataatgcattttacaaggatttagatctgttgataattgctacactctcacatctgtttttacttgtcattctgcatgtgaaaataccaatgctgtatatatttcgaaaaattttgttcaacattctcgtacaaaacaca

SEQ ID NO: 226312 - DNA, 2215 bp, Cannabis indica
aaaatttgaataataagaatttaattaattaatttatttttaactgaaaaaaatcaataaatcttgataaaattgataattttgtcaaaaaggcctaatttaattttctcataaacttttgtttcagcttgagacgacccttgcctaggttgacataagtcaactggggacactctggtatacttttccgaaggcaccacgaatctggccactaaagttggccaggatgatacaagcatcccggtggatctaaacagtcgacccctgtctccgaggaccttccacatgcacctctaactgaaggaagaatccttaggggccacccccaagaacaataaccaggtttttctcctggtactatgtaggagagacgagaccaagaattggcgagccccatgtggacttgggagaagttctcaagttagccagacttagagaggtcgtctgccaagccaacctaattgaagaactatgcgctgctgactatgatgtattcgttcagcatagacgcaaattccatgaagaaccacgcgttgttgattacgatgtacttgctcagtatagatgcaaattcttgagatggatggatggccaagagtgcatcattcgatctcaccaagcagggttagatcatcgcaatagagaggctagcaatctgataagacgcttcaaccagagaactgatagaagaggccaggatctcatcaaagatccacttcaaggaagattttttgatagatcacatgctgatcaacccagttctttaggaacaatgacatatgttcccttgagagggggaggacaaaccttgtctcaaaggtctaacagcgagaacaaccaaatcccgacaaccagcggcatggagggccagccaggaatctcaggctcaacaacagcccccactatcaatcctatggtcagccaaccacctctaggagtccccatggctggcctgattcctccagaagtccccatggccgacgagactcttctagaagtccccatggccagctagactcttccagaagtccccatggttggccaagcttttccgaaaatccttatggatggccagagaagagcactgcctccctaagaggagcgagtcacttgaagattaattttcaaccaatgaggatcgagagcgggtcgaaacacccaaaacaataatttgtgaagtgaaattaatcacttcagacagttggatccaccaaactccagcaattgttgtgatctaccctatgtcaacgtacaagctccactagccagacagagaagtgtgggggctggccaaccatgtacaagcaccagactcagggctagtcaaccttgagtataccctctcccatggtatggccaactaggctctggccaatcaaggcctgcagtccaaccaagaagggacaatcaagtacgcccctgcagcaacagatccttctgtgcaagcatagttggatcaaatatgagacatgctcaagggcttggctggcccaaaaccatcagaccttgagatggatatgttaaggggctcacctttcttggcatatattaatgccttacccttacccaagtttaagatgctaaattagaagatgtacacatggaaagaagatccccaagtacaccttaaatactttgagatccaaatagatctccaacaagtatctagagatgtgcaatgctgaatctttctggcaaccctagctgaaatagcccaacaattgtatttcaagctggccccaggaagatttaattcttaggaagaattctcccgagagttctatatctagttctctgcctcaagataaatacatacccgactggaggatcttgtcgaaataaagcaaagacaagatgaacccttaaaggactacattcaacggttcatgggtgaagcaaccaaggtcacaaacctaacaaaagaaggccgatatacaaccatactcagaggcatcctaccgttgagtgacttctggaaagatataaggaggatctcaatgaataacatggaggagttccttgagctagttgatggcttcataaagttggaagagctgtctggaaagcctagaaaagaggataggacaatgataaacaaataagcagtcctgttgaatttttatgaaacaagcattggcttctgggaaggaaggctgaagtggtataaaaattcaagcttagacttcacttggaaagatcaacgggaaagcatcac

SEQ ID NO: 226313 - DNA, 2274 bp, Cannabis indica
aattatttatgatatatttagacaatgaataatacttggaattctggttctgatcatgagtaaccacagtcaaaggatcttccttcctattactatttgttgtcaattattacaatgactgttaattattatttataatatatcttactccaaggacatattcaaatgatataaacacattgtatttttttttttttatgtgtttgagagtttataagatcaatgaaagaaaatcaaccaatatagaacataaggatcaacacaagagatattatatataaaaatggtagaagatgaagattacaacatttattatataaacacataatataagagaagaatataattactcactaacaacattgagttagattagtgaggaacattataacttgaaagttgtataacacttttgttcaaaaacttagttctctcaatctctaagcactaagagaattattgattatagttacaagttttgccatgtgaaaaggaagttgtgaatttggagagttgatacgggaagcttggtgagtatccgaaaagtcttgtgcaaaagacttcgtagaaactggagggtgtttctagataagcttgtaccgtgtatgtattgtcactccagatagcttgtcatttgtctgcaggttcacttctggatagatactgtcggtcttggtagttcatctgggaatgagcgcttgtatgtatccagattgtctgtctatatcaaaactttcaaattgtatgtactgaaagtgtgttatcaaagctgacgaggattattgttgctagagatcaatgggatcatttaaggcagtataaatgagccatgatactcttggagatagtttaattaggcaacattctaaatctataaatacctatcaatctttataatatgtgtgaattagaccaatatagcttgagtgtaaatcgttatagtgtagggttgagagagagagtctaaactagagagagaaacttcttctcgtactctctgagaagtttgtgaagattattgtaaccttgtaaacactgatataaataaagatatgactgttactgttccaaccgagatgtagagcattacacatggctcgaactcgttaaacctggtcttcttttctattttcctacttgatttattacttgatttctcaaatctcttagtttattagttcttgattgtcttgcttgtttgttagtccgacatactaaatggtaagtcattgaatgttttcattcatacaattaactagtattagaacaaggtttgtaatcatgacagtcgcaaaatatgatgttgaaaagttattggtacggatgactttggattatggagaatgaggatgaaggctttgttggttcaacaagggttctatgagataagaaaagagactcttgcaaaggctcgtagtgcgatcattttgaattaatcttggagataaggttttgagaaaagttacaaaagaagatacagccgcaggtgtgcgactgaaacttgaaagtccgtatatgactaaatcgttggtgagtagattatatctgaaacagaccatgtattcattcatgatggtagaagacaaatctgttggagaatatattgatgagtttaacaagttgattctcgatcttgaaaacattggtgtcaccattgaagacaaagatcaagccttgttgttgctcaattattcaccaaagtcttttgcacacactttggataaaatgttctatggaagagagtcgatcacactcgatgatgtgcaatcaaccttgaattcgaaagagctaaattagaggagtgagtaaagaattctggaagtagtgatagattttatacaaggggcaaaagcgagaaaagataaagccccaaaggttaaaagtaaaatcaagatctaaatcacagtatgatagccaaaagaatcttagaagctggattgataagaaattagggcatctcaaaaaggcgtgcctagagaggcataagacgggtgattcaaaatctaaaggggatgtagcagtgagtagagatagttatgactcaacttgtgctttgctggtaacttctaagaattcatattctaaatggatcttggattttgggtgttcattccatataatacagaataaatcatgttttgaagaatttacatctagaaattatagaattgtatatgtgtatcttggagataacaagtcttgtaagatggtgagaattagaaccataaggttgaaacatcattgcaatattccaataagcttaataattaataa

SEQ ID NO: 226314 - DNA, 2398 bp, Cannabis indica
aactccaagggtaaaatggtaatcttaccaaaatcctcaaaagagatctgaagtggattccaagactcagggaacttaagacaagacttcatgaaggtttatttacatttcctagtcttgtatagtgattttgaagtccatacttaaaaaaggttagtataaattttggcctattaatttgtgcgacaagttatttcaccaagtaatatgtaaaaattttaaattgactttttaaattatcggttgtaagggttaagtcaagcctgttaacttggctcgatagtggaactcaaagctaggtctatagctttgaaaatcaaggacgtaggtggcttagttctaccaaaccttgtaaaaattgagagtttgtaatttcttacccttaaactctttacttacaagtttgatcattttctatatattattgcttgccatattgcttttatttatttgattaagagattaactggatagttttgtgtttaaagttttaatttaccgaaattagtttaaatttctaattcactcctcttggaaacatatcttggattaacatatacatggaattactctttgcaaggatcaatattcaaagactcctcaagacgaagaggacatgagaaagtacacttatgcatcaacggtgtggagcttaaggattgttagtcgttatcaatctaatccaggtttggaacactagatagttataaagcacattctcaagtattttcagagaatgagagatctcatgcttgtatatttcggtggagagttaaatcctactggatatactgattctaattttcaatgagataaagattgttgaaagtcaatatatgggtcagtatttactcttggaggaggagctatagtctggagaagcattaagaaaactattattgcagatttaaccatggaagttgaatatatagcatcttgtgaagcagcttaggaagcagtttggttgaagaaattctacaaagctctggaagtagttctagaagttgaaaaatcactagtgctctaccgtgacaacagtggagttgtggtcaactccaaggaaccaaggaaccacaagattagcaagcatatagagagaaagtaccatatactaaggaatatagtagagaaatgtgatgtgacgatcttaaagattgcttcggaacataacctagtagatccattcaataagacgctaccagtaaaatcttttatgggtcctattgctaatatgggactaagggagatgcccaatgcgcttttagggtaagttggagattgttagggtttatgccttgaaattcttgtaaagacatttctgattatcaaataaagagtaaatatttgatatatgtgtgaatattaagttattaatatttattattgaataatttatattaaatatcaaaaaatttcttatttatatatgaggttgtggcttgtagctgtatagagaactaagaccacttagctatgaatcaaatagtctaaaaacatattaaagttatggaatctttaatcaatgtttgctagtatggttcaccgatgtctgctctaaacagagcaagtaatctcggttcatattactgatgtagttagacatctaagtgaaggtgttgtatataataaagattatatatgataaggaccgatatgaataaagttggctttattaacatgtcatttgtcataaaaaccaaattcatatcataacgattgtcaatagtagatcgacctaaattttgagttatcatgaactcatgttgatgttattagtttctttgattcactcgttaaagtttctagagaagttgattcttaaacttttgttttgggaatctaataatatggatggcttagaatatgatttacaattatataatcatgattttcataatggatcgaatgttggttccctttaagtgttaattttggaattgtaatgttgtgcgaaaattcaaatgggatcttgaattatacttccactagtgaattaatggaactaaaggataaagaagtaattataaaggtaacatgatattttgactaagagggataatcactggaattgattatatcaatggacagtgcagttaaactctaaaatataattctagaattactatgagtgcgattctatatttatagtggagtaatcatagaattaataaaaaatgaattatttggttgatgagactcaataaataatctaatttattagaccttacaattatagttccatggtccccgagtttccaccttaaaatactattaagggtcgggataagagtagtataataaagtttagaaaaatctattttgaattggcaaaatagtaattaatttttttttaataaataaataattttcaaataaattaaatagggaaaagacaaaa

SEQ ID NO: 226315 - DNA, 1971 bp, Cannabis indica
taaccttttatcaattggtcaaaaaccataaaatgtacaggtggtctctgcttagtccatgctcactcagtactactatacatataatactattgtgattttgcttcccttgtttgaatattctatgattttgaaagtcacccattttctcttgttttttttgttttaataggatgcccactgttcctgtgtcccaagaggagttcaggaggttccacaccatagaccgtgacctgtacagtcttttggtgttcgtcctctttagggacccagccgagtcaatgcgagtgttgggtctgtggctatggctagagcaaaaggggttccacagcataatcaaaagaatgttaaccttaccccattttctcataaacgagctggctgacgaggctgtgacttgcttcacgcttctcaccacacccgataaccttttggcctcactcgacctcaacatcaccagcctcaacgactccccactcatacaatgcctcatgaaaaacgacatcacgttccaattcttcaaggccaataatcgccaaaactcagctcaagagttcaccaacatcgtagaagacgtctgttatagagccttcagtgacttaatgcaccaggcaatacttctcgaaacaagtagtcagaaccataacatggtgctgcccaccatgtcgtttcactccaattttcgtcgtgctgggctacacttcggcggcggtagcagcagtggcagtagtggtggtaccactgagctaaatgggtcatcattatcatcctcatcctcgtcctcgtcctcagtaccagcagtagtagtacccccagatgatcgaaccatgttcgtgactttttctaaaggataccatgtttatgagtgggaagtaagggagtttttcacaaggacttatggggattgcattgagtcactgcatatgcaagaagttcagcctactgagcagtctctgtttgctcggattgtgttttactcggctgccaccattgatgtcatactcgatggacataataaagccaagtttaccattaatgggaagcacgtttggatgaggaagttcgtcccaaaacgcaccaaatctcaattgctgccgccgctacccaatttgccagcttcattgttggatgattaggcccaacctacagtaccttatattttcttctctttggaataaatctaatcaatggaactagtcttgttatttagaacactcaatcatgatcaacacacacaagttatagacagtataacgtttaattttcactcttcaattgtattggcatagcccatttaccagcaactatccacttaattagcttgttttccaaatgaaaatgttcctcatgggatagatattcaataaaagttttcattataattgaatcctgagtaatttatgtttgttagattttttttttgttttaagattttttatttatttttataattgaattgtatgtgaatccactctaacttgaatacattgaaatttaagaaagttttattattgatattatcgttattattttgttgaaaaaagaaaaacataaaattagttaagctagtggataacgataccatgccaaaaataagagactagttccaatacttattttgaaaacttaattttacttttaattttataacaataaatgttcacgtgctatgtgctaccaaaatttgagaacaaaaataaaattagtgaatttagttttctactcattctaagagtctcatttttttaagaaacaaatcctaaatctagttaatgcaaaaaaaataaaatatatgtagttgttgataaatttgtaaactatatttagttgtgtatgtagaaatttttaaaattaattttttgtagaagttatattatttggttgaatgtgaaaagtataattttttattgttgaatattgaatttttttttttaaaatcctattgaatattgtatttgaaatggaaaaatt

SEQ ID NO: 226316 - DNA, 3439 bp, Cannabis indica
ctctctctctctccccctctttctcgacgtctctttgctcacagtcggacggagcaactccggcgtctatggcccaaacagactttactataccttgaaaacttctagatctggatcccttcctctgtttgtctctgtgcgaagtctgattgagatctggacaaggcgtcgacgagacacttggtcttggcagagatctcgacatcgacgagatctattgtttgattaaatatggttttttttacagtgtataattttatcagttttctttgtttactatgatgatttttttaaaaaaaaaaaatgtaaaaagaaaatattatgaattttgagaatttttctttttaagttttgggtgagaaaatatttaagttttgaaaaagtttttcaaattaggatgcgaaggtgaaattttagaattttttttcttttcttttttctaattatattgttcagttattttaattgatcactttttacttttttctatagaatattttttaaaattttaaaataattatttttattattttaaataaaaaatcaaaactaaatcacttggactaattagaagttaccaagtatttatctagttagcatttaactgagaagttaacatcaggtaccttatttgcaacaaaatattaacggaaggtatttttaccactaaaaaattaacttaggtattaatctgcgaccagaagataaagttattagatatttacgctgcaaataactcattctgcccagaagaagtttcactcgaggatgtctaccttgtacttgggatgaagaaaaacttactatcagtggcgtaacttacgacatcaggccaccatgtcatattcggtctttaagatgtaaagatctaccaagatcttgaaatctctagaacaccgatgatgagagaatggcgtttagagtctgtctatgtaatgtcagtagaatcagcttatgtagataggactcaaaagaacgaaacgaaaaatttgtggaatgcaaggctaggacatgtcagttatcacaaactcaaggtgatgatgaagaagtctatgctgaagggtcttcctcaactcgaggtcagaatagaaactgactaccaatatggtaaggcacatcaattaccatatgaagattcaaagttcaaagcgaaagcaccattggagctggtccattctgacgtgtttgggtgagttaaataaacatcaatcagcagcatgcggtacatggttacattcaccgatgatttctcaaggtatgtatagatctttttaatgaaagaaaaatttgaaactttttcaaaatttaaagagtttaaggaaatagtggaaggagaagttaggaagaaaatttgatgcctctgaacagaaaacggtggtgaatatacctctgatgaattttttgagtatcttcaacatatttgcaaatacgccaccaattcacatatgcaaatactccacaacagaatggagtagttgagaggaagaatcgccaccttgcagagacatgtcgaagcatgctacatgcgaagaacgttccaaggaggttttaggcagaaggaatgaaaacaacagctcatgtcatcaatagacttccacaagcaaagttagggttcgttttaccttttgaaaaaatgtggggttgtaaacctgcagtaagtcgctttcgagtatttggctgtgtgtgctacgtattcgtgccaagccacctacatagaatttgataaaaaggcgctacgatgtatctttttgggatacgacaggcaacagaaagggtggagatgctgcgaccctacagctggaaagtgttatacatcaaggaatgtggtcttcgatgaggcatcatcatggtggttattgtaaaaggaagtattaccagattctaaagaaatggaagacgaattgtagaagaaaatgggtgagcaaattgttgatggccaattaaaacttcggagatctacacaagtgcaaaagccaaatcccaaatatttcaatgctgttgtagccaaggaagagaagttcagagagccagagtcatatgacgaggcataccagaactctaagtggttaaaagctatgaaagaagagataagcgcgttaaaaaagaattagacttgggagctggtgctaaacccgaaggaagtgaaactcatttcgtgcaaatgggtctataaggtaaaaactcgccccgacgattcaattgagagatacaaggctcgattagtagcttaaggattctctcaacagtatgggctagattatgacgagacatttagcacagccgctaagcttgcaacagtgggggttctgttagcatttgtagtcagtaaagacttgaggctatggtaaatggatgtgaagaacgcctttttacatggagaattagatcaagagatatacatggtgcaactaagagcatttgaggatagagctcatccaaactatatttgtaaactgaaaaaggcaatctatggtttgaagcaggctccgtgagcatggtacgataacattgttgagttcttagtgaagagtggttacgtcatggtacatgcagattcaagcttattcctcaaagtaagggaagaaaatattgcagttgttctattatatgtcgatgacctcatcattattggcgatgatgaagtagagattcgtcaaacaaaggagaacttgtcagttcgattccaaatgaaggagcttggaaaattagaacacttccttggattagaagttgatcgaactgaggaaggtttatttctcttcaacaaaagtatgctagagatttgctgcaaagatttggaatgctcgagtgcaagcccatatcaacacctatggaagctaatgctaagctatgtgctcatgctgagcacgacgtgtaagatggagcaatgtatcgacaactagtaggtagtctaccttacattaacaagaccagacatctcctatggagttcgagtagtaagtcgatatatgcagcaaccaaagaaaccacatttgtaagtagtatgacgaatactgaggtacgtgaaatataccattaactatggtctcttttataagaaaagtaatgaggttaagattgttgtctatagcaatgctgattatgctggagatcatgacgcacgacgatcaattactggatatgtcttcatgcttggatctgaaatagtatcttggtgtaataaaaggcaaccaacagtatccttataaaccatagaagcagagtatagagcagcaacaatgacaactcaagaaagtatgtggttgatatagttgatgaaggatgtacaccaccgcgcaaattatgccgtgccactttattgtgataattagtatgctatttgtctagttgaaaattcaatctttcatgcacaaaaaagtacaatctttcatgcacgaacaaagcatgtggaggtacattatcactttcttagagagaa

SEQ ID NO: 226317 - DNA, 1379 bp, Cannabis indica
caagataataaaccactagaaaaaacagtacaataacaccagaactacgacaaaaagacaaaaacaaagaaaagactaggtagtaaacaataaaaaaaaaccaacaataaattatagaaaagaaaaaaaaaataagtttaagaaaaaactaatttttttttaaaataaataccaataataaaaataattacaaagtaaactttaaaaaaaataataataattcaaaataaaattaataaaattttaattattgatatttttaaaaataaatattattataatatgtataaagttttaatcgtgtacaagcagtcctatcgtaagagtatacaccttacatcataataaccatatgatctaaaatcaatggtcaaaaaaagttccctaccggtaagaaattttgctagatcctaccataatcttgccctatatatatataatcttgaaacaaagagaggtgagatgtcttcatttcacctctttccttatactttatctaatttgtagttctttctattttatttttattttatttttttaactatttaaactatttttatcaattaaactttacctttaatataatttaataagaaaatctaaaagacatgcaatttgatatttattatttatgttatattaatattatgttcttaattgttaaaattatttgtattcttctaactatttatattctttatatatctcttactcatttatgtatatataatatctcaaatttaagttaaagttttgtgtccactctccactcttaattttaaagtttgtgttagtatttttttttttctaattcttaatcttctatttttaaattacatagccatgattgtgtcaaataaaaaattacttagcttcgactatttatatttgaagtttttgtttttgttattattattattttttttgtaattcttgatgttgtatatttttttgatcttcttcagattaccatgacaattacataattcattattcaaacatcaacatttatactcagacaatcagttgttccttgattatttttttttaaaaaactccaataacgactgtaatgccctaatattttataataatattataaaatattttataatattatagcattatatgattatatttttatatattattgtaaaatattttataataatttctaagctctatatttttataataatataaaaatatattattgttgatatttgtttgtattgatttactataaatatgtgtgtacagggtgttaatttaaaaattaaagagattattaatgtgatacttgtaggattagattattattatcttgcaacgaagttatagccttaaattattagcttatatttcatatatatatatat

SEQ ID NO: 226318 - DNA, 2063 bp, Cannabis indica
tttttcttaaaatttttagttaaaagtttaaactttaaaataatttccttatttaaaatttatatattttaataatttgccttattatttatgtgctaaaaaatcataaaaataattatacatagttgtttccttcaaatttttagctaaaaattataattttaaaataattttttatataaaatttaactatatattttatttttttgatagtttatattattattgtttcagataattaagatttttgctccgtaaacttttacatgtactaaattattttcctcgaacattttaggccataaaaatttcctccgaactagtgagattgttggattcaagaatttctgtaaaatttcattcaattttactaaggcaacgatttttttgtactaaacagtgcctcctgaagtttgatatctaccaaatagtcaggcaaattttaacatttaccaaattgtgcctcctgaactttcatccgcgtccgatttgttagacaaaagtcatcgagtccaacaatctaatagtttaaaggaaatttttaatatcctggaatgttgagagggtatgatttggtacacatcaaagtttggaggcaaaaattataagtagcctattattatttgtgtgctaattaaaaaatcataaaaaatagttatatattttggtgataagatagaaaattcatattaagtatgaagcattaattttatgtttcattttttttttacttattttgttatagagcattcttattggacaccgatggtgcctaataccatttaaagatgttgtctgatgattgattagtgatacactcaaaaagtaattaaatcaaattatatatgatacctggtatttaattgcaccaataataatatgacacttaagaaagtactagacactaatagtatttttagcgcccatttctctttattatataaataacgatgtagattataaaaaaataattaattaaattatatgcaattatttatgaaactataggcttttatattaaaatatatattatattaacacaaaattattactaatatatttatgttttttataaataaataataattaataaaagattataataaaaaaaatattatttttaattttaaaaagcaacatatttaaaaagaaaaaaaaacatactacactatttgtctataaaattaaaaaaaattaatatataaataaattttgattagtatacataatttttttggggatttttacacttggtgtccttttttgcctttttttttacttttttgtcaatactgggttatttaaacttttatacaagttttatttttcaattttacattttcaaaagtttcataattacaaatatacctatccctatgcttatgtcatggttttctctcttcttacactccaccacttccataactcctcctttcttttttttttcttttttttttttttattttctgtttctctttccttggttcttcattaccacaacccacgatcatcccgtccaaagccctaacccacgatttttcaacctctcatctatgtcactatctccattatcttccataagctctgtaagttgttcctcccacatattgtcttctcttcttctataaatggccaccactaagtcgggttcgaagttaccttccccagctaaaaaaatttctaaaatttctaagaaacctcctacaaattcatctaaagttgatcctaagatgagtttgaagcgcattgcgaagaaaggaatgagtgatgttgcagagccatctggttctaagaaaagacctattccaaataagattgagtctcgtaagacaaagagagcaaaatcttcgaaatctgccaaggatgtaagttgggttatgttgtttttcaatttttgtttagtttttttctggttgttgtgttttttcatatgatgttttgtgttttaaatttttcccccttcttgttttaggttatatcttattttgattttgaggatgaagtgcatgatggggaagtgaagcctaaagttaaatccaaggtattgttaccttgaattttct

SEQ ID NO: 226319 - DNA, 1321 bp, Cannabis indica
aaaaataaaaaatatatattgttaaaataaatggttggaagtatttgcatgaaaaaagaaaaagaataaacaaacggttattattatttgcgagccacgaatacctgtcattctcttgatactagttttgactagcgtttgagagccatttttggaaaattgtgttgagaaacatatatgttgtgaaagtgcttaactcatcaataaaatactcaggtttattaattatattattactccattataaatataaaattgtactctttgagaatatagaattgcactctttaataatatggaattatatttatagaattctttttagtagtctattgatttagtcaatataagtagtttgtcttcaaatcattaattcattattagagctggtcaaaattatcgttttactcttctaattatctccagaattccttatgtacccttaattcaatgtgaacaactaatctataactccaattatagatttggatctaattgttagcacttccagaattaacactataagagaactaatatttgatcttttcagaaagtttggattctaccattgtataacattctcagcctctcatgttattaagttcctaaacaaaatttgtaagaatcatcttctttaagaaactttaacaagtgaatcaaagaacttaataaacacaaatatgagttcatgaatactcaggattcagactgatctacttatgatcattgttgtgatatgaataactcttttatgaaaaacgacacgttgataaaagatgttagttcatatcggtccaatcatgcatatcaaattgtacacaatatatttattaaatatctattcacatttgcaatccgaatcaaaattacacacacactaaagtatagtacttagtaagtcgtacttggtaattccatattaaagatttcatattttaataaactatcaacttattttaataatatcatataatcttagttctcttgtattttcttactagatcatacattcttaatatgaatgcataatttttaaaatatttattaattaaatttttataattaacatatttatttttcatatattttttaatatatttttttattaaatatttgcttttaaagcataaattctaacatttttatacttagtttactaacaattttgataactagttttgcctatagtgttcgtaatttcaacccatgtactttaagggctcgtttggaacgccgtattaggttgtattgtattgtattgtattatattgaattggattatatatcatatttttatataatactatgttaaactttaatt

SEQ ID NO: 226320 - DNA, 1286 bp, Cannabis indica
tatatatatatatataattgaatgtgtccctttgcttaattataactagctatatatattaagagaattacttgattattggtttattaatcatattagatatatattatacatgattatagtaaatctcatagttaattttcttaaattaatggcatatatattcttatttcttatagggcttgactgaatcagagaaccctgagagatttacatcatcaatcatcatcatcatcaaagtgttggtattggaaatcataaattagtcacattatatatataatatatatttaagagtgtatatttgatgatgtaagattgtgcatctccattattgtgattattctctacaaagtagaaactgcaaaaatattgccattttcggaaaccaatgttttttttttctttatatatattatatatttatatatgcatgcctcattattacaatatattcttaatcactttcttggaaattatagatagaaaaaagcatgaagtacaatcattataaagccaggttagattatattacataataataatattaattaattcatatatatataatttattatagcaaattcacaataattaatcccatgcatgcatagtcattactaattgataaggattaatacaggattgtatgtatgtcgtttaattaattaatagcataaagaaatgtcatcatcctactaattatcccatgattaataacaaatcatccaaagaatatttgcagcctattatattgactcaattatgtctacatcaatatatatagcttagtttttaatatttacatagaaataaaatattacacacaatgacatgcatgtaacactagttttaaatctcaattttaataaatgatagattggataaaaaatgacttgctatatagtatgaacatattattttgatcatgatcactctactacaaaaggtttttttatattgtccgttaattataaattgatgcctataattactcaataaaataactctcactaacattaaatacactctaaataatttaatgtaatcaggcctcatcctaagcataaaggcctagacttgtgcctagggcccacttaatttaaggacctaaaaagtttctttttaaaattatatttttatactaatttaaaaatatcatattttttttgtttctaattttttttttctttatggacctactactatttcacgtaccagaattgtacttagcttagcggtgccgattaattacaaccctatcataatctaacacttattaaaat

SEQ ID NO: 226321 - DNA, 2915 bp, Cannabis indica
ctaaattaagccaagcaattcaagaaataacttatcatagtaaactaccatccaaatactcaatatatatatatatatatatatatattaactcagtacacactcatagacatttacacaaacagtttcaaaacagcaatataattcatttcaactattcacaatacaacacatttgatattttcaattcaatttaaagtttactccctcaacactaaaattagccaaccaaattcaaaaaacttatcaaatatcattaacaaccaaattcatgatgaactcatcgattacataacaataaatagcacatacacccttatatatatatatattagagaacagagaaaggatagagaaaatacacgtcggatacggcaaaggtgagagcaggtaagaggatgaggagctttaggaggagcaggttgaggaggaggaaggagttgaagcttttcgataaaagctccaaaatcttgcttgataactttcttgagttttctggtcatgaaaagaatcccagccaaacccaaaccgagcaaaacccataaattagatgagtgagaagccatgaatggggaaaaccctaatggaaaaatgtgttcttgagaagaaagagaaaggaaagagataatggagagagtagtgataacttcgccactctaacgaaacctaagctataagctcttttctttggtatatacagaaaatgactttgaggctaagacgcaacctttattatttattatttattatttaaaaaaaataaataaaattattacattgattgattcatagatatttaccattttgccatttactcaaagagcattggtattaagtactactggtgcccaacacgttttataggggtaagttgaaatatacttatttttcagttaacgctttatttcaaattcaattgaaatgtgcccatttttataactctattaccgattatactctcacaactacacaagttagagttgaatggagagtcagagtatccttaaatgataggggcacaattggtagagttgttgaaaaaaagggtagaaatgaaaaatatagaaaagaaggtaaaaattaaacacaacaacttaaaagaggtataccatctaattttctcccttctataggtggtgtctcatgattagttagtgatattccctaaaaaaatattttctcaagttatatggaactcgatacttaattacactaatagtagtataaactcgaaactcggtcaacccgcccccatattcacccctaggtaccttggtgcccaatatcaatgcttattatttaatgtaatagcttttatggaatattactaatcaattgcaatgcttcacttgaggctagatcaagtggccatagaagagtgtgtgtgttggaggtcctgggttcgagtcccaagttatgcatggttgtaatatataaacgcttaaaaaaaactggatgaaatgttattaattagtgtgatattcaaatagatgcatggatcattagtgttgtattcgaatagttacatgaattttctcgacagatgagatgatttaacttccattcatttctttattagttgcgattttgcacaaagctgttggatgaaagctttgggttttgttagagacaacattgaaggtatgtttgctacttggtttcaatatggtctcgctcattggttaagggaggatattgatctcatctcaatgttgtgttgggccttatggagatgctgaaatgaatagtatcaagccttcattagaaattattatctcgtctgcaaaacttactcttgatcaatggaaatgtgttcaagctttgtcacgtatcccttcattgaactctcagtctcttggtgaaggaaatgagcagtggtctaaactaaactactctatgatcaaggttaatgtagatgaggcaattttctctaatcagaatagctttggctttggttttgtggcaagagatcataatagcttattcattaaagcctttcaagctagtaaatttggagctgttgaagctgagattgctaaatcaaatggaataaaagaagcattaacattgtccactctattatagcatcttaattaatgagtctaaacaattattatttgttcttaatgtgtttgttatttttgttaaacaatctgcgaataaggtaacacatttccttgtgagggactcttattctaaaattaattatactattaagtaagaattccatctctgctaatttatcgttcttacttttcttacttttgaagaacttttgttgaatgaaatatctcttttcaaataaaagataaactacatcgattataatgagaaccaaactataaagtttagaaaaaaaaaaaaaaaaagaaagaatacaaagaaaatagagtaatttcttaaggggagacgcatggcaaccttttatacaagggtggctctattcttgcccataaacaaggtgataaacgctattattattattataactaaccgtgttaaaacactataaacaagcaactaaaaccctaataagttaaattttcttcttaaaaaaaaataaaataagctacgcggctgccatggaacttggcaaagaagaccaaacaccaacgctcggctcttgaatgagccatcatccacaaccctcactcatcctcttccgacaatccccaaccctcggcaccacaagtcaccacgctgcagaccccccgaactgcctaccctcgagacaccaatgccaccacctccgcaacaccaacttccaagaattcaaccacaactatttgtgtcatattcataaaccttaatgaccaaaaattttaaaacaagatctcgtaatatttacttttttctttttacaaaacaaaagcaacaatctcatttgtaaactattacaaatccaaaatgatata

SEQ ID NO: 226322 - DNA, 2876 bp, Cannabis indica
cacaatgtatatgagcagagcagcactctcacttgtgtttgttaaatagtttaatttactttaaaacgcctataaaataatattttttcagaaaagtaaaataggttgaattatagagtttagcctaaaattaacaaaatagcagtccatattttatatgtctcctctaaattgaatagcagtccatcatattattattattattattattattattattattattattattattattatatatatatatttggaactacaaacatgtttttaataatatctaaatcctctgttttctctcaacttttttgtctttgttattattttatatttaaaataataattattatattatttataaattatatgttattataagaataatatgtattgtagtgtttaattaataaattgtataacttgtaatttacataattaagaattcgaaacagtaattgttttataatttatgaatcataaactgtgtaatttaagtgagtaaattgcatatatattatagaaattaattgctaaataattataattgttggaagatgataaatacttataaatatcaaattgttatctagttttttgcacattgacgtggcaaaaggaccgagcggcacatgtctcacatttctggtacatgggcagaggtaaatgtcctgatcaacctctatataatacatcaacatttgcaattattgattactcgacaagagtggaagacagagcatcgtgaccgaggtagaagtctggcttgtcgagctacttacagggagttgagtacttcagcatgatctcgtaatacccagacacaaagacaatccctacaaacgtgggattgaatcagagaaatatggccacctgttctagtttcccattttatgtattgtaattatgtaatcactgtaatttcctattttacacgttgtaagcaaagaggaaaccatccctcatatattaactccctataaatagtgggctagcctcttatgagaaagatcgaaagaactgcttcaaagaaagattctagagagaaaatagtgatctaatagaattactcagagatcaattgtaagagctttcagagagggaaacacctcgatctctctctcaagttaatagaatataaggggagtaggctattaccacgctcacggggttgaacttcttcaaaatctggtgttctttattactttatcgtttttgctctctttttattatattattaatcgctttataatagactcattgtctctggctaaaatcgtggtcaatattttggtgctttcattgggagcagaaacccaagttttttctgtcttaagtgttaacgggcatacaggatggtagtacaaacttgtagaggccttgttgatcagggtgtgccccaaggactgttttctacttccaaggataaatcagctcgtggatgcaacagccgagcacgagatcctgagcttcatggacgccaattcggggtgtaattaaatcagaatgcatccaccagaccaagagcatacaagttttcaaacatatatatgtctgtactgttataaggtcatgccgtttggtctaaaaaatattggagctacctagcagaggttggtgaacaaaatgtttaaagaccagatcggacaaaatatggaggtatacgttgatgacatgctcgtcaaatccaggaaggctgggggcatatagaggacctggatgaatgcttcaaaatccttaaaaaagacaactcaatcccttaaagtcctgctttagagtcagctcgggtaagtttctttgttttattgttaatgctcggggtatcgaagacaatctagagaaaatacaagtcttcttggatatgaaatcaccaaaaaaaccaaagaagtccaaagcttaactggtcagatagccgcactcagtagatttgtttcaaagtcaatagacaagtgtgctcctttcttgaacatcctttgaggtaacaagaaatttgaatggacggaagaatacaaaagcgcctttcaagaactaaaaagacaacttgaaaagcctcacgtactctcaaaacccctggacggagaagaattaggaatatacttggctgctacagaatacactataagtgttgtactgataagagaagagaacaatgtccaacatctagtctactataacaacaaaagactcgttgaagctgaaggacgatatcctttgatagaaaagcttacttagtgcctaatcttagcaacaaggcaattaaggccttacttccaggctcaccctgatcccgtatatactgaccaaccattacgccaagtattgtagaaacccgacatttttggatggttacttaaatgggcgatagagttgggtcaacatgaaataatctttcaactctgaatagcagtcaaaggataggccctagctgactttgtagttgattgcacgggtaaagaagaaagaaactaaagggacaacctggagccagtacaagaatccctgccgaacaacaatgaagacagacctacctggaaattgcacgtagacgggtcagctataaatcaactgtctggtgcgggaattgccctcgtcacatctgggggcaacacctgcacggggcagtcaaatttggattcaaagcttccaacaataaagcagagtatgaaaccctcattgctggcttgaaactttctcgggagctccatgctgagtacattgaggtctctagtgattcacagttggtagtgaatcattttttagcagagtacgaggctcgtggagagaaaatttactatcatatagttcctcttcttgatcttaagatttacttgattgtcttccaatgttcctttcttggattaatctgatacctactcatt

SEQ ID NO: 226323 - DNA, 1551 bp, Cannabis indica
aatatcatgtgtgggataccgctgtttatagtccttcagtttcctagacgcataggcaatactttaccagattgcataaaaacacaacttaacccttattttgaagcattgcaataaatcaaaaatttctcatcattgattggcaaggttagcactagtgcagtatttaacctctgcttcaactcttggaagctactttcacatttattagtccaaacaaacttacattcctttcaggttaattccattaagggtgtagaagttttggcaaacccttcaacgaaccttttgtagtatcctactaatcccaggaaacttctaacttcagtggcagacttgggtcgaagccaatctcgaaccgcttcaatcttcacttgatccaccaggatagcatccttgttcacaacatgacctaggaagcttagttgaggcagccaaaactcgcatttcttaaatttagtataaagcttatgctcccgaagacgttgcaacaccattcgaagatgtttctcatgtgcctcttctgaatcagagaagatcaaaatgtcatcaatgaagacaattacaaaattgtctagaaaatatttgaaaacttagttcatcaggtccataaatgccgtcggagcattagttaatttaaaggacagcatcaagaattcatagtatccatattgggtacgaaaagctatcttgggaatatcctcctctcgaatcctcagctggtgataaccagatcaaatatcgatcttagaaaagacggtctttccttgtaactgatcaaacaaattatctatcattggcaaaggatacttgtccttcactgtcaacttattcaattcccgatagtcaatacacatcctcaatgttccatcctttttctttacaaacacaactggcgtaccccaaggtgaggtactctgtctagtagatttcaagtccaacatacctggtaattaaaccttcaactctttcagctctgcaggtgccatctgatatagagttttagatacaggttttccccctggtatcaaattaatttcaaagtcaatctcccgcttcggtggtaaccctagtagctcctctgaaaagacatctagaaactcttagaccactagaacatgttctgatcccatcaatacttccttcgtggtgtccaccacactggctagaaaagcgacacatctattccacaacaaatctcttaccttaagcgctatgattattagaatttgggatccttgaaccctgcccacaaacacaaatgggtcctcacccttaggttcgaaagttaccatctttcgtttgcaattaatggtcttgtggtacttttctagccaatccattcccagtataacatcaaaattttctatatttgattcaattaaattgactgacaattctctaccttctacatacactggaaacaagctcgagcttgatattcaccctgatggcgtctcttgcacctcgggcactctggataggttctccaattttcgtttccacctcgtcgaaaaccttgattaccttagaatctcttgttaggacccg

SEQ ID NO: 226324 - DNA, 2780 bp, Cannabis indica
ttttattgaatttagttatttatatcttttattacttagtcttaaactaaacctagaaatcaagctcgaatccctcaaatctcatttcctaccggcgaaccagatccactgatgacgagaaagatgaggttgacgatgaaccagacggagatgaatatttggtggtagatgataacaaagatgacgattacgatggggcggtaatgatgatgaggaagaagtggtatgttaatcacccttgggatggaatggatataaaaataagaacgagttgtgtagatatggtgatatttttggttaacaggtttaataaccgagtgtgttcaactcagttgatttcacttaggagttcgatatacggtttgtgagtaactgtcaaataataaaaataaaaattaactgtacccacagaatctttgatcagcttcccacctctctctctatatgtcctcatattttctctctctacacacatatatatacgtaatcgacgaatggttcatattagttgcttcgtctggttcgtcgtcgaccttgtcattggtgggtctagttcgatggtggaagatgagatttgggaattcaagtaaagagggatggggattcgagttttgagttatgggtttgacgtaatattttttttattttaattcattaaagatattttaggaatattaattttaatttattagagattaagtttttaattatactaaacattctaaaaaaaacaaacaagatttaatcaaggtcttgcacgtgtacactttttcacacttaacataatggtagtgacaaaagggattaaaacacaatatttaatttgtcgaaaagaaatatggtatttaagtatataaaattgaaaatatatagtatttatgccacaaatttttctattataaaatattattaagactatatattttagttgattcaaaaataatttgtgttaattaagttaagaagaaaataatttaaattaaatcctaaaagtaatttgataaagatgaaataaaaattatatcttaaaactattttcccccttttgtgcttctctgcttaccactagatccatttcttcgccctttctacgtaaactggtatttagttgtaagtaaacatagtctttggtctttcaaaaaaaagaaaaaaaaaaaaacaaaacaaaacaaaaggaaaaagaaacatagtgtttgggcattttagccacagattttttggttgaaggtaacacttaaggattgctacgtaccaaatggaagaataagtaacgttttgttattttactgcaaaagaaaaagttaaaatattcatcaatacaaagtttaggtatattatagccgtaatttttcctaaatttattaatagaaagcaaactgctaacaaattgtggaacatgaagaacattacaaagagatattttgggaccaagttctgtgtttaatgtgccaaaatctggggatagaaatccattagcaattttaactcttattcataggactaaactataggaagggaattaaaagctatgttcgtaggacattttttagagcaagtcaagaagggctttgagtaaaaaagatatgatatttaattaaacaaataatccaataatgaagtacagccctctagaatccttttgtaaataagattgataggatagaccttattttaataggattgaaagaaagaataattcctaactataaaataatccttagataataacataattataaaattgcccttttgtctaacatctttaaatgcaaatttggatttacagccggatcaaatagactctaatttcatgtattatacttatctatcccaagtaacagcctcaggtttggaaaaatatgatcaactgattaattcatttgaaatatccaggtagaataatgcccattttgactttgtctacatgccttttgtttttcttggtgggcttttggtcctccaagattgtacttatttttatttcttctaaagttcacatggtacttcttgattgttttctgaagggatatcctggaaagttctattgcccaaggatgaacagtatgaataaaccagcgtatgctgcaatatgcacacattcttctacaaagccagttctaatatttgtttcatctcgtcgacagacaagacttactgccttggacctcattcaggtgagactcatttcaacaagggcgttgtaagaattccatcaccattaccaattacttttgtttgtgatttaagtttgcagcatcggatgagcaacccaggcagtttcttagtatggccgaagaagcactgcagatgatactatcacaggttactgatcagaacctgcgacacaccttacaatttggaattggattacaccatgctggtctgaatgacaaagatagatctctagttgaggagttgttttcaaacaataagattcaggcatttctctcccacctgcagttttgttaattgtccactgatgtcatcttttagacttttactatcattttgtgctgtaccactttacgctaatctggcattagcattgtattgtaggttttagtttgtaccagtactttggcttggggtgtaaatcttccggcacatctggttattatcaaggttagacaattttcttacaatcacaaacttattttcacgtgttatagagtgggaatttttcttgtagtgttgcctttgtttaattgtacatgcttggagatcatgtctgatttccttaagtttttatcttgttatttcttaatgcaaagtagttactt

SEQ ID NO: 226325 - DNA, 1573 bp, Cannabis indica
ttgcacagcttacccggtatttccccttacggatcacgggactactgactgtcacacttatatctcgacttacctatcactatgaatcgaaaataattgtgttcttaggctatttgaaagatagagtgcgtaaaagacttcagaattggaaagcaagtttctttcgcaggcgggtaaagaggtgttgatcaagatagtggcccaatctcttcctaactatgggatgagtgtcttccttctccttttggatatcagtagagatattgagcagatgatgtgcaaattttggtggcaatcgtccaaaggtcaaaaccatggtattcattggatgtcatgggaacggttaaccaaacataaacacatgggaggcaagggattcagataccttcatgactttaacttggcatttctcgaaaaataaggatggtgtcttctcacaaaacctgtggcattggcctctcaaattttcaaagtccgttactttccaagatgtaattttttaaatgctgagctaggtaataattcaagctttgtgtggaaaagtatttgggaggctcaggaagttgtcaaaaagggagtacggtagtgtattggcaatgggaatgacatcaatgtcctcaatgaaccttggttccacatgatgataaccctttggtcatctcgtctcactcggccctagagcatgccaaggtaggaagcctattatctgttgatggtagttcatgggacatggagatactttcggacatggttgaagaaagggatatactcctcattttaaaggtacctcttcacttgactcaagctaatgatcattttgtttggtctaaagagccatcaggggtatactcagttaaaagtgcatataatcttcttcaacatacccaaggaagatggaatgggaatgataaggagctggctagtttttggaagcatatgtggaagttaaaatccctccaaaagtcaaaaacttgatatggagggctggtatgaattgcttgccaacaatagtagaattgcattctaagcatgtgaatgtgagctctttatgccctgtttgccaaagtaaagatgagactatcctccatagactggtctcttgtccagaagctgtactttgttggaatcgggtgagaatcggcactaggagtacacgtggtaacacttttcttgactggtgtattacttcctttaaggctttggttgtggaaaaatattgtgtcttagccatgctttgttgggtcatttaggaaaagctagaaaggacctcatgtggaaagaaaaggtaatgcgggcaggagacattgttgtttctgcaaaaagatatcttgatcaatggagacatgctcaaaactctaatctagaggtatcatggcctggtatcaggggcgaagccacatccaaagtaagagtggccatggccccccaacaattttatatcccttttaatatatatatatatgtaaatatttataaacaaaaatacatatataaataaaaatatactaattaatatatataatataataaaagaaaagtgtatagacaattaataatatatatagtataaatt

SEQ ID NO: 226326 - DNA, 1335 bp, Cannabis indica
tttttttatttgtttttatgtttttggtaattactaaactatctagttaatggtgatgcttagtaagagtttggacctattaataatttctttatcaaagaaagatatctttcgtatattattatataaatagtataaataaacgtagaccataatctaatagtataaatacctcttttgatttaatttattaattaatggttatagtatatataatcaatgtgtataacatgttcaatatttggaacatgatccctcggcaaaatctcacaatggtaagcttgattatatattatataattaagttttcctattaagtcatctctctggactaattgataaacagcaaatatttaatctaaactctagattctgtgtgtcacctgaagcaatattaaataaagtagaaaacacttctctatcttattttcaaaatattttattaaaagtcaagtacgttacctatttttacattattttttatattttttaacaattataatattatattgaatactttttattattaaaataagtaaaaaataaataaaaagtaagaaagagaaaataataaacaattaattagtataaaataaaatataaatatataaataaaaaattgaagaaaaatatttgaaaaacccaaaaacttaaaaattcatcatctacatgtaatttgatgtaaaataaagaaaaattatgtagtactattgtattattttttagctaaaaatttaaaaataaactattttagctactctaatatatgatttccttgtgcgttttttacggggagaagttaaaaaatactttatttttttatccattaatcaaaaatattcttatattatattttattaaaatatatcaatttttttgagtggtttaccaatatactattactctttacttaagtctagcatataatttacattaacttaaggggtctaatggggacatcatctataaaagtgagtatatcttaaaagatataaaaatagaggtaaaaattaaaataaataaaataaaatgagtatacaatgtaatttcctcttttttaagagtagtaaaaataataagtttgaacacaccggatatattattgtgccttaactaatttctttgtagacctatttttctattctgtacaatacatgtttataaataaatttaccttaaattctaaaaatatttatgtttacaataattaacatttttttattaaatatatagggtggaaatttatgttaatttattatatattttgtaacaacatcatttaaaactaaaaagggatgtaaaaacaaaaaactgttggcaaaaaaaaaaaaaaac

SEQ ID NO: 226327 - DNA, 1474 bp, Cannabis indica
gcagttttaaaagttggatccacatgttcgatgtcgagtgactgatatatattctgggaaaatcttatgtgaagcatggagaccaccaataattatgaccaatgcataaataaaaatagataaaagcttgaaggaagccatcacaataaattaaactaaaaattaatttaaaaatcatcatcataagtgaaggttgagatattcttgctttcagttacagtattaaatatctcattcaatttaagtagttattagaatattgtttttttttctaattttattgggaaataaatgtaaaaaaactattcaaaactgtttagaaaaataggatttagttcaacggactagtatttttatttattattattttagaaaaaaaataaaatttgttaaaccaataaatatgattatataagcacttttaatatataaaaatataaataaaagaaatcagaatagatgttggggtggcactatatattcattccatcacattttttttatgaaaattttcatatttttattattttatattgatattcataacaagtataattaataataataataatgattaataattcaatgttataatttttctacttcttcataacatctttcattattgcatatttattattatatataaataaataaatataaaaaattaagttacaacatttttacttacctataacccctttaaatattattatatgttcatcactatatatacacatatagatttgaagaaatgataatcacaacaagttaagagtgggatacaaaatacaatagcttcattgaattttttttattacagtacaagttaagagtgggatacaccacacaagtgcatcttcatggaattggaaggtggcacaagtcacttggtcatttccgacgacacccatgaaatttagaattctctcaattactgtgagccactgctcgactttcatgacatctggacttcctaaaaaaactagaggcgcctgcttgcaaaatctttcatacaaaggctccatacggttgcaaataacaggttgttctgttggtactgctagaaccaaagcagcaagcacttgcggtggaggcactgtaggaggaccctgctgtcgggatcccacttttaaacttgtttacatgttcaaaataaatgttataactctgtcgcacaacgactacaaaattagcccaagtcgtcccaagaccgaactctccaggtcataccatcttgacatgtacaatcatccttgagctcaagactcattgctgcttagccttagtcttttctctacctacacatgcaagcaataaccgttatagtcgacaaactcaataagaaaagtatataaaatacgatataataccgacttgtatttagacgcccacacacttatccacaaggcttaacagatgattaagaacattcttaacaaaggtacaatctctgtaccacatgcactatgta

SEQ ID NO: 226328 - DNA, 1205 bp, Cannabis indica
atgtgcaagacaaccagacccagccgcaaggaagccaaaatggagatccaaggccaccacccatggcaggacatctggcggtcataataggcagcccccacattgctagtgaaaccagcaaaccagggtgtgctatgctcagaatctccgtcatgagcataaaggcaaagttctagctatcgaagatcggagctctaagaaacaaaagaccatagagtccacaatctcctttggcaaagaagatgcaacaccggtgagtttcccacataatgacccctggtcattactatgcaaatcgagattatggccgtggctagatgtatggtgaacgacggagcctcttccaacattattttcaaatcaacatattaaaagatgggctctaactcaccaacttggcaccttgcaaccaagtgatgtatggcttttttggccaaggcatcagatcacccctcacaactaaagagaatccaaccacaagcacactgatggcgtggttcatcgttattgatgtttccttggcttttaacgccatgattggccgactggccctcaacgacctgaaggcagtgacgtctatctaccacttgtgccttaaattcccaacaagaaatagagtggcatgtctgaggggagaccaatagtctgctcatcactgttataacctagccttatctaaggccaaaaagaagaagatgcccccatgtctccagaagatgagccttgccaggggaaataaagtctaggcaaaaggggggacatagacatagatcctcgctttggggatcctgcaggaagcttcagacctgtagaagatttggaggaagtggaggttgatcccattcatccaacaataagactaaaggtcggtaaagatttggctccagaaatcaagtcagtgttgacaaaatttctaaggaaaaatttggacctatttgcacggtcacatggagacatggtcggaatcgacccctccttgatacccatgcactcaacattgatcccaacattcggcctattcaacaaaaaaggcagttgctggacaaggagtgtgcatagggtgcttaaaggatgaaatcgaagtactgagggccaatgacttcataatagaagcattcaccttgagtgggtgtctaatccagtgtggtacctaaaccgacagaagtggaaagtctgcatcgacttcaccaacctgaactaaaaac

SEQ ID NO: 226329 - DNA, 1574 bp, Cannabis indica
tttcctatctaccacagttctgaaattactaaaatatgttttcaattcagctacttcaatttgatgaggagggagacctccaataaaaatcttgttcttgttgaaacacgccagactccataatgatagagttagcacttttaatttaatacttactagcacacaaactaagatgatctaatgagtaatttgtttttcatatatttttttttttttgagctaagatgtttgtgtttatacatagaggaggagtatctcactgctatatggaataggattatacaaaatattaaaaagataaaatataaatatatttatattttaattagtacttgagattcaaattcgaattaagaaaaaaaaatgtgtcgctgacatttagataaatatttaggatattgatttttttttttatttactttttgtaaaaaaaagagaaagatatcttctaatttcatatttttatattcatataaaacatttaatttgttctaaaaaaacatttaatttgtttatcataatgacgaaaaaattattattatttttgtattcatattatttatcataatatatttacatagcttaactaattatatgtataaaatctaaaatctctctagtagtctctagtatttattctgtaataatattttccttagaatcttaatagatgattaaagttgaattttccattaatactccaactaactataatttgtaaattatagttttgtctataactgttttattagttaagtttattctttattatgatatattatttcattttttacatactaatattatttgtcacgtagcattatgaagaaagtgaagtctacaaagtcaagagtggatattccctagcaatgaactctatgcccgattcaaattcttctttgttaccatgctttgtggtctctaaaaattctcagaaaaattaaggtcttcgcttggcatgtgtcacatgatattcttcccactggctcaacgcttctagctcatcatgttccggttttcggaagctgcttttttgtggctggcagtttgacgatgttttacatgctattttcctttgccctctctcaattcaagtttggaagcttttagatttttggaatttcgtcaaacctagcctctcttggaagatcatcgacattcttaattatctcatgtcagtattttccccacatcagttttgtgtcttcattactctggcttggtgcatttggattgaacgtaacaacgaaaaacatggtaccccaattaggaatgctcctgcaattttgagttgggcacttcaatattatgatagttggtttcaggctcagaaaacacataagtatacatctaagttttctctcccccccacgtgtttttctttgggttgcacctccagctggttcgttaaagttaaatgtggatgctgctattgatggtgaaaacggtactattggtttaggggccttggttgtgattctgatgcctttccgttgggatgttttgctaaatccctgactggttttttctcccctaaagaagctgaagcactggctatttcttatgctttaaaa

SEQ ID NO: 226330 - DNA, 1987 bp, Cannabis indica
tcccaacaaccagcggcatggggggtcggccagggatatcaagctcaacaacagccccctctatctatcctatggccggccaaccaccagtagcagtcccgatggtcagccagactcctctaaaagtccccatatatggccagccaaactccacttgtagtacccatggctggccagagaagagcactccagcggaggagcgggtggaaatacccaaaataacattttgagaagagaaattaatctcttcagatagttggatccaccaaactctagcaatcggtgtgatctactcatgtcaacgcacaaactccaccaaccagacagagaagtgtgggcaaccaagccctacacagcttagggctagtcagccatgtacaaccacaagactgagagttggctggccttgagtataccctcgcccaatgtatggtcggccaggctctagccaatatgaggctacaactcaatcaaagaaggccaatcaaccaggcccctgcccaagtttagaacatgagatagacaggtcaaggggatcaccgttctcagcatacattaatgctttgcccttacccaagtttaagatgctaacttggaagatgtacacgagaaaagaagatcccctagtacacatgaagtactttgagatccaaacaaatctccaacaagtatccaaagatgtacgctgttgaatctttccagcaactctaactgaaatagcccaacaatggtatttcaagttggccctaggatgatttaattcttgggaagagctctcccaagagttctatactcagttctttgtttcaagacaaatacctgcccgattggaggatcatttttcaaaataaagcaaagacaagatgaacctttgaaggactacattcaatagctcatggctaaggccaccaaggtcaaaggcctgacagaagatttctgatatacgaccatacttagaggcagcctattgttgagtgacttttggaaagaaatccagaggatctctacgaacaacatggaagagttccttgagcaagctgatggcttcataaagttggaagaagttgatcgacaagcccagacaagagagcaggacaatgatgaacaaacacatagcctcatagcgccccaaacattgtccagtatgccaaccagtgaagtgatctctatcaattctcaaataatgagaatggtggaggcaagcacaataatgatggcttttaccaatataatggcaaaatagggaaattcaacaattcctttaagccatgaagtccaagggaaaagaaggagaagtgtgtatatttcactcttctatcaaaactcccaaagaataacatgcgcagacataccaacatggagagtcagcaacaagcagtccgaaggctggcctctgcctccaaaggctagcttccacctttgaagtctggcctccatctctgaaagctggcctccatctctgaaggatggcctccaccttcgaaaactggcctccacctccgaaggttgtcctccacctccgaaggctggcctccaccttcgaagactggcgtccaccttcaaagattggcccccatctccaaaggctagcctccacctccaaaggcttgcctccatctatgaaggctagcctccatcttcaaaggctggcctccatctccgaagtctagcctctatctctgaagtctggcctttatctctgagggttggcctccatctttgaaggttggactccatctttgtccaggtgtacaggaaggtaccaccaattctgcctaaacctccggtggcaggaaaattaggggtcatcattgaggaccccatattgcatgcgagagcgacaaagctagagagcattatgctcgaacactccatcatgagccacaaactgatttcctattaggtgaagaacgagggtctaagaagccaaagcttggagagcccacaatctctttctcaaaaaggagatcctacccaagacagtttc

SEQ ID NO: 226331 - DNA, 1468 bp, Cannabis indica
taaaataatttccaacacattttcccaaggatgaagaaatgcgcaatcacaattataattgtcttggagcatggagccagacccatcttatgttaggagccatgttaccacttcaagaatattttattaactttttagttttggttggactagcctcgtatcaactaattcttctagcttacctcctgctctcaggccttttctttttctatgctccaaagccaacaaaattttgtatttttatgaactattatctatacccaaaaagggtgacaagtacaaggatgggttttataagctgcaagcccatccagccaatgaaactcttgttcccttctactcccaaaagaatgtcacggaataccatcatagatttttcctttcatcagggttcaaagccttcgaatgcccagacatcttgactaattgggctcgaatcccccctttgcacaaaatggctcccactcaactatttttaaatcatgtcaaagtattcgctggttatgaggagggagttgaacgtgggtgacttggtgactaccttcaatggccgtaaggctaaactcatcctaagccatcaaacaattgaggacttcaacttatccaaggtatcatgtcccaatgctaggatttcgagagtagagaagaagctctggccaaagatcatagcaatagatgaggataagtacaacatgtacaggtacaaaaaggagcaggagaaccattacgcccaccttcaaagttcttctgacaagacaaactaggagaagacaaggaaaaagtctatagccacgggccacgttttccctttctggtggccaactccaggacccctggagcaattacatttggtgtccgtaagcccctgttaaatttttaatatgttccttcatttcaagaatactctcactcatggccagtcggctttgacttgaggatatctaggttctgaatgccccatactcggtggggcaatagataaaaggatatttatttttcaaacatgagtggcttcctgggctgatctaaaatgagttctaatctcccaattcctatcttattgaatcactattgctacgtaacttcaagttgttttcttccctcagagagattttcggagatgacaacaccagctctttaatttatgaattttcaaggacaaatatatgacatcggggtaggactagccttccttgtttgctatgcctttatgtttacacttggtgcatttcttatgtttgacttttcctctccacattttcctattttttacatctaaacccatggatgatctctttgccatgctggactccacgcacacccctgaccaagtggttgttgatcctttgtcggtcgttgtcactcctggaggtccagacaagaaagtgcctgacggcaggaagttgtgttgataaaggaagaggaagaagtggttcccccactagaccagaacattggcaaagtatgc

SEQ ID NO: 226332 - DNA, 1395 bp, Cannabis indica
agacatcattaattatacaattaaaagatgcatcaccaaatattagataagataagtcgaatttcacaataattagcaaaatccacccaagaaaagtccaagaaatgggcataacaaacattgataaaatactgtacctttttcctatattcccttttcagtaaagaaacatccacattttcgtaccgtgccaagcccaacactgaataaagatcagtacagtttaacaaccgcacaacttcatcttcggaagttgtttcagaatccgttccacttgttgaaggtgctccagggctacgatcagcagaaaatcctggaccggtttcaaaggctgaagaatgtgtctgatcactgttgaagaacccttgttgaccttgcatcccgggtgtttgttcagtggatccttcagcacttctattctgatttatattattctttaggaagtaaatcagaatatcacttgagacaaaagccagattgaaagcaacaagtacaccaaaccatccgacgtatgtccaagcacaatacacagagtatacagtgcttataaacagtgcaacacgttcacggctgagagcaaatgccaaacctgagttgtaaagggtgttaaatctcagccatctcttataaaaagaaaaggaaaaaaaaacaaagcattacagagataaaaggaacacctccaaggacgataacaaacaatgttgtccaaaaacttccatagagccacaagaaaatagctccagaaattgcagccaccagaattccaagagtaaaaccaacaaaaagtccaattaaagcagcaaaggcctgaacagaattagttaaggtagcacgaatcagcaacagcaatggacccagcaataaggcgagattatggcatatgtaagccactcaagataaattgaaataatgcaaaaccatcatattgatcaacaaaaaataaagttataatcagcacaactcattgctatatcaaatgaaatgtagactcaccaaaacaagaaggaacttgaatattccaaccatagcaattagagaaaaaatgccacaccatataactgaaaagaaagatgtcgtccccaatcgtagaaaagaatccatgcccctaatagcacagtctaaccaaaccattaatatcaaaagcattatactcccgaaatgcattagccatttcaaaacaacaggatatgcctgcataatcttagttttgccataatcattagccttctgtgcttgattttttagtctaataaacaaaggtctctgtctctccagccattcatttgttgcctttatggtggataatgccaatgccttcaattttctcatgaccacattatctgggagctccatattttccagtgcattttggatacgaagtccactcaacgagta

SEQ ID NO: 226333 - DNA, 2385 bp, Cannabis indica
aagcggccattttttggctcactatccctgatcactagctcttttgcttactttttggatcgatatttttgaattttttggtggctctctctctttttttcttcgttcactatccccaaattacaagtgaaattttttgttgatttttggctgtttgatcaggttttttaagatttttggtagctcattttttttgggctcaacttcgatcggtttattttttggtcggatagtcgtgagttttttttttttcctctgatactatgttagaaattggaaataaggtgaatggggttccatctcaaaaccaattggccatgggaggagtagcccattcctcctattatctttccacacattaacaatgtgggactctgtaactgcccaatacatgaaaggaaatttctatactagggcattgctttatcttttatggtattttctttgtaatcaatttttatatgtatatatattagaaaaaattataagacaaatacaaaaagttacttttattataatttcacatttttacttttcttagtattttatttaccaaaatactttttacacacaatttacatgcaatgatgatgacatgttattattgacactcaacacaataaccctctatttttttttatacattttccaatttatattaagttttatttttatttttacatttatggaattaatttgattttttccccacgatcaaaattatttttctttataaaaaaaaaatttctccccatgatctccgatgtaaagcccttatttattaaaataaaatgccataaataaactagcgttaaggtactaatgttgcctttatttaaaaataacaattttcaaaatatgggtacccaattaaaaataaagtgttattatttaagtaaatgtaatagaaaactaaacgacaacatcaacaatatgttttataattttaaaagtgactttcagtagaagatggccaagaccacacgcagttacatgatctcacgagatacaccccatgctgcccaggctcaacttgccactgaaagtttacaggcttacttgtgtgaacatagagagtaaaataagggtgcaaagcccagtaaggaaaaaaataataccatgtacaagcactccatatcatagcacaatcatacacatcaaccatacaacaaatccatcatgagtataaatagaggcggccacacaaatacaataatatcacacactcacactccagcttccatacattaattctggagtatcttacgttcttaacctgaacgcagtaccaatggccagtgcacccttatgtacattgtcttacttaccacatcaccatacatgtgtggtttccaaccacgtccaagtacctggaacatgattaaatagccatatacaatccatcgacaaaagactatttcatcgaaactataatatttcacaattcaatacaatttattcaaccagtctcactaagtactcaaaccacatcaaaagtacaagtataaagtataactatttttccttaccttctgtaattaactcttacgatatcttctaggccctatcaacaattagtgaaaaccttagaccaccgataaactcaatatatttataaatcttattatacaacaaatttagtccagaatctgactcataaaacgtttgaattagaaataatcctactattcacaaagtttttagataatcaaaagacctttataacgttatagagatcataaaaatcagagttataaccaaggagttatgcatattttattaaagtagattatttaaaatcctagatcatgctaatttttggatacaacctaaaaataataattttaataatagttacatcccgttccaaacaatacttccttcataaaaaaatgtagctcttttcttaagatttaaaatgagataaagatctcttaaaattgatcaaaattgagagagatattgaatttttactaatgacattttttctgaaacaaaacttaaaacgatatatcctaactgagtaaatatactcatttttgacaagtaagaaccaaaaattaggaaaagatttcttcaaaggaaatatggattatcaaattatctttctaacggtgccagaattgctggaaaagaataaatattgagaatgatattgaacttttactaaggcaatattggaagaaaatctgcaaaactgtaattcgacagctagcatgaaaacatgaattttttgacaccgaaataatcagtgtgaggaaaaagtttcttcatgaaaaatgtagatcattaaattatcttgaaaatggtaccaagatatctgaaaacggacatatgaggatagagatatttttctgaaaatgaaaataaaaacacaactacgaa

SEQ ID NO: 226334 - DNA, 2071 bp, Cannabis indica
ccttgagctttttaaaagaatccaatacctcatgtgccatgatagcaaatccatcttcctggcacaaaggccaattacaaaaggcgagatgagctcttggaggaggggcctcaattgatttgccaaaatctctgagatgatcttaatacgtaaagttgcagaggctaatagggcaaaactcgttgaaggtattagctccgggctttttcgggatgagcacaaagaaggtctgattaactctttcacaaacttccccatctcaaaaaattggatcatcgtggcaaccgtatcactgtccaccgtcttccagtggttttaaaattttactcagcatttcatcaggccccgaggccttaagaggaggcatggcccatatcactttcgtgatctcctcagcagatggtatccgcactgtaactgattagcttcagctgagatcgagttagaaaaccagattgagaagctgaggttcagggggagagtcgaggactgaatcccctaaaagttattttattaaattatatggggtccgatacttaattgtattaataacgatatgacacattgatgctaggcaccactcaagagagaagctagaacaaaaattgaggtgggacatgcgttacataattttatattatgtggagactttaaatatttttaaaaaatttattgtatttttttttcttaacaaaaatttattgtattagatgtaataaaatgtaattaatatataattatgttaaaaaaaattacaacatatatgttgatgtttttgcaatgacatttttttttttattttttcattcaaatcctaccaactatattttagtcttttcttttaaaacaaaaataaagttgtgaagaatagaatttgtgacctccttaaatttaaaaaaatatctttactacactaaataaccatacttaatattatttgactagaaaagtatttgtataaaagactaaaaaaataatttaaatttgagctctaaatagtttaggaacgatcttaatttcacattagggtaactacccctcttagtccacacgtggcttcacccatggcgcaactgaaaccttttagtatttttcctgaataaataccctaaaagtagaggtatttattggactacatctaatctttttagacatatccagaaccgatctaattatatattagatgttaaattttaccatccaatctggtccaattaatttcagtcatttgatggatgttggattggatcggtattatccattgagtgtattttatgtatacttattgcattgattcagatttatctaatattttagatctagtattattttttggatcgaatcatatccatccaatttttattagagttagtctcacattgctaatgtgtgaaaataaattaccatatataagattaattaactactcctattactaattagttttgagatgaatcacattcaccttattccaaattctaataattttttagatacaatatctatttatctaaaaatgaaaaaaaaaatcatatatgcatatatataaatatatttatatatatatatttaaaggactcttctactatgggaaattttctaaataccctatttgtagggcatttaatagcttgttataattgggtaagtgcattgtaataccgtgggcttaaatgtaccatattaaaactaggattgattaaaatattttttttattcaactctattttctgacatttgctatttaattgagaaatactatttgtctcccacgtgtccatcatataatgtattatctaactaattttttataattgcttttttattaattcattatttaattttaggacatctgtcaaagatacagaaacagataaaatcctaatcaattttacggtgatatatttttagtgcaaaaatgtagaaactaaaacttttaaatcaaaaatacattctccattttaccggcaatcaaaagccagcgacatctatctttagcagcaatccaaaatgtgacctccatctttagcagctatccaaaattcggtgagctccatctttaccagccatc

SEQ ID NO: 226335 - DNA, 1952 bp, Cannabis indica
atagaccctgttttttgtagtgaattctgttttcgagtaattgatcaaatcaattctaaacacaagcaactttcaggtgatcaatcattcatcatttttgtttaatagagtaacttttaaagagaggcctttcatctaattatttgtattaattctcgtgtaattatgttacttttcagctgagaattggtttagaaaaggccgggattttcagaactttatgttacttgaagatcttcaccaatcttcaaatggttatattgtgaaggatactcttattgtggaagttgagttttttgtcatttcacaaactgtttctctcaaacagccaaaaataataaagccaaaaaggaagccttttttaaatagtttgactgactgtcttcagtgttcttaatttcttctataaaaatgttaatgaatagaatgtagttataatggaataagtgttctcaacttgtttttagaactatattatagcaattagcaaatgcattttgttgacaatctatttagttggtttttttagattccctttgtatcgatgattacatgctcaatcaaaatgaatggtgtgtaattaataatgcatcggcttattagtgatttgtaattgatatgtaaagcttataaatatgtaattggatagctagtcattagtggatatgggatgagattatagaattttgattcatttgaagtttaacactcgaagaatgcattttagagatttgtcttgtctcgaaaagaactattatctatcaatttcgtgtcgatgctctcaatgaaccaaaattctattatttcattccatatccactaaaggaaaaataatttggaatcgtactattaaaagtagttttttttgaatgcagtattaggtattagttttaatattcctacgtaaaaatacatatatatcaacaaatatctgttttataggctgataattaaaagtttgaatttatttggctatatatgtaaaataatttttttaaaacagaaatatacacgtacgaaagatatttaattacttattagctagaaggatcgaatctaaatcctaatcctaatagggtgcaaataaaccaatttaatttaatttaattaattttatacctatatataagtagatattttctatgaaaaagatatgtaagaatatctacacatacgaaagatatgtaattacttattaactagaaggttcgaatcctaaatcctaatcctaatagagtgcgaataaaccaatttaatttaatttaattaattttatacctatataaataccccgtgagacatcaaatgcattttcaatcttctttttaagttcataaactatatagctgaatacatttaccctaaaattgttcccttttactttcatcacccaaattaatctcactactttttcttttcaaaattaatcatttctacaactgtgattaattaattatgagctccccacaagtcattggtgatcccgattactttatatcaccctataattatactcaaccaaacacaatagaacaagaatcacatactggtcgtttttttatcattaatttaaatgccatgttcaatcttgattcaccatctactatagaagacgatgaacctttattcgatgatgaaacagaatatccaattactactatagaaaatactgtacaaatttcatacgaaacattgatgaatatcaataatactgaagccataattaccattaaagacatgtttgctgcggtctatcttccttctttctcttttattattgatgaaattattgattgcggtagaaaaatgatgaacaataataatttaaatgaagaagtcggtgttgatgtttacgttcatgtcgttgttaatgaactacctcaacttgattgggatgatgatgatgacgacgaagaggatgatgactacaatatggatgattttcctatttg

SEQ ID NO: 226336 - DNA, 1240 bp, Cannabis indica
tatattatgatttatttttttttaatgaagacatcaattccaaattgcagcgatttataaataaataaatacacataaataataagacacctatcccgaaatacatcaataagaaatgagaaatattaaagtgcactggtggtgcctagcatcttcctatgtgtcaatatcgttaagtatcgggtcccataaaatttaatataataggtttcaaggagtatcgctagtcaatcgcaacgcgacatgtcgagaaattgctaaacactactggtgcctaataacaatgctcatcaaaaatacatgtcaaattgtatcgatcaatataaaattacacaatgaaaccacaacacaaaaacaacgagagtacgtgacatatcacataaatgaatacaacaactccagaaagataaataagcttaaaaacaactataaattatttgtatagcaactcattgcattaataaagaaaatactcaattaaaaattaactattgcaattgaatagaagcaagtaattaaaaataaattagacattaatatacacaaaaaacatttatacactctgtaatattttctcatgccaccactaaaatgtgtacgtgtataaaaatcataactacgtgcaccaaagagagggaaaacaaaatttgttttaattttattttttgaaaacaaaaactctattaaggaggatgatgtgtactgatacatgtgttatcattattattgttaatgaaataatgaaggagcttgattcgtagttcgtataagagttatattgtatgaaatataaataactttatgtttagataaaataacatattatattaattattaatactacgtaaattgtattatgtaatacataacaaatcactcgtattaacttgtattataatatttagaaaggatccaggatcaaccctaatctccgacttgaatgcggggacttagactcataccaaacctggacccaaaattgggacccggacccatatctagggatgcagaccaagaactagacccgaacctagacccaggccgaacctggacccacgttggacccaaacctaggccgaacccagaccttggactcacacccagacccaatccggactcgggacctagaccgaacctcggacccagacaccgaacctgaactcagaactcattacaagaaaaaagaattttgtcgacgaaagtatgcatatgtttccggcattgttttgccagtgagctt

SEQ ID NO: 226337 - DNA, 1726 bp, Cannabis indica
gtttcccgagtcatcttcgacgactggttcgagatttgggttgggtttcaccgttgtcaaattaaattgtccttagaaggttgatgttgttctggatctagcagcatcaagcacaaagacatgaaacagagatcgagtgacgaagaaaagaagagagaggagagagagagtcggggttctagggttttcagaaagagagagagcaccgttactttactttaactttttttttaaaaaaaaaaaaattagttgtgtcaagccagatgtacgcatgcgtaacatactcaaacatgttttgtatttatttattttttaataaagtgtacaaaatacggtgtccggcaaaattggacatgaaataacactaactattgttacgtcctcactcacttttcacgtctagtgttggacatgaaatttttttaatgttcattaatgctggacataaaatctcctaaaactttttcatatcccacattttttgtggacaaaaagaaaatttttgtagcagtatagagttagacgttgtgtttccataaattaaacattgatagttaattattgtacgtacatatgcatgcattaatatatgtatcaattacttattgttaattaattcaattaaaatataatttttatttagttccaaatgtatattcttagatagatagagattctattatatcataaatgggatgataataaagttctatattaatcaaatttgaatggaagatatcaaatatttatgattttaataaagggcatagctaggtaataaatattattaaaaatgcatggtaacaatcctgttttttttttaaaaaaaaaaacgaaaaaaacaacacacacattattaaataggtattttattaaaattttattgattattgattattgaatgttaatattaaaattttattaaaaattaattcaatccaatcacaaattaataaattaaaatattatttatatatataataaaaaatattacaaaaacagttaaatatattttttttaggttatctttatttaccaatacatttaattaattggtcttcctgaaagataatttaatttccaccttaaactaaaggaatagtacgcttggcttattatgtttttccaaacaaatatataatcttaaatttttaggatattccttcattttcctttatttcaatatcaattagattttctataattttcatgtttttaagtttacataaataatctggtatgtaattggatatctaattataaaaccgatttaatttaattactaattgaattagattggattaaattttgcgtctaatatgacaattaaatttataaatccaattaataattagattagatcaaatgagtagaaaaataatagattagattggacatcgatccagccatagtatacaccctaaaaaaatcattaattaataataatagttatagtggatccaattaatacaagtgatctgcttaatataaatctcacaaggtaattcaaataattaagctcttcaaataaaaggtaaatgaagcctatatattaatattacacactgatagagcaagctatatagagacacacataattgtgagccagctgcagatcgataatcaatactaaatcaccgagccctatttgaagataccaaaacgtaaaatatatcttcagtcatgatctggaagggaaagatccccccaaaaaaaaaaaaaaaaa

SEQ ID NO: 226338 - DNA, 1346 bp, Cannabis indica
cagtaacattagaagtagatagaggaattgataggatgtactcaatgtcaacagctgagaaatctcgagtaagaagaggaagattccattctctatcggctgtaatgtaaaaagagactaaattttgaggatcacccgagtatcgaagaggggtgaactcagaatgccgaggtatccatggatcagaaagacatttgataccagaaccatccccaatttttaatcttaagcctttcacaagaagatcacgaccccaacaaataccttgccaagttaatgaagagcagccagatttttgagcagtcaagaaatcattatttgaaaaataccttccttttaaaacacagctgagaagagaattagggaattgaataatcctccaagcttgtttggcaagtaaggcttggttaaaatgtagaaaagatcgaaaacccattcctccatccatttttgttttgcaaagtagtttccatttccgccagtgagtttttttcttgtccttgtctgaaccccaccaaaagttagccatcatttgctcaagttggtgactgaaagtagagggcagcttaaaacaactcatcatataagtaggaatcgactgtacaattgcttttaaaagaacttctttccctccaatagaaaaaagtttatcattccaagagttcatgagcttccaaatgcgttctttaatattactaaacaaatgcttcttatcccgttcagaataggctgacaatcctaagtatttctcgtggcactcactaataggcattccaagaatattctgaaaagatctctgaattgtaccaggagtgttgggagaaaaagacatgaccgatttgtctaaattgagctcttgtcccgaagctcgatgataaatgtctaaagcacgtttaatagccccacaagagcgatcatcagcttgataaaacaggaggctatcatctgcgaagaacaaatgagatatgattggagctcttctagagacagcaaatccttttagtcgtccaatgctctcctcatattgtaataagcgagataaaccttctgaacaaatgagaaagagatatggggagagaggatctccttggcgaagaccacgttgaggagtaatggagccaacaaccgaaccattgatattaaaagagaatgatgttgtgtgtaagcatctcataataagggagatccatcgactattgaaacccatcttacccattacggcagccaagaaagaccattcaacacggtcaaaagctttgctcatatccagcttaatagcagcatatcccttcgaacccttcttgcgatgtttaagtgaatggatcatttcaaaagccacagcacat

SEQ ID NO: 226339 - DNA, 1886 bp, Cannabis indica
ttattattacattattacatgattattgatgataaaatatgatgaccattttccacaaaaaagtagcaatatattctaaatgtgacaatatatatttattcgtgagagtggaacctacgtactcttgtgatgtttgaagttgcaccgattgacaacaaatttcgatggaagttgaaagctgggttttgttgttggattgattggtagttccatagcttatcttcgtactttgaggaagaggtagcttccagtaccagtacgagtaaattaaacagtgaaatcaagaataatgctgaaatattgaatttcatttggtacctgccaatgctaggagagagatagagagagatctagagagagaaggagagcctttggtagcacaaaagagtttgttttacctctttcaaagcaaaatgggatagaccttgtctttcggatcttggtattgatgtcttcgatgatttttctctctttttaaggtatgttttgcaattgggagtcttattggcataactaactaaactaggagttctttaacttacttttattattatattattgacttcagtatttaattgtatatgtataaaaagaaaagagcaaaggtagagaaccgacaaaaaaaaatgtaataatatatatattttttcctaaaaagcgacaaaagtcaattgttgaagtcttcccaactaaaaattaccaaaaaaaaaagaagagacttttttaatatctaaataaaggtgcatgcaacggtggtttcgacctcaccataaggacacctttacacaatatcattttggtaaataatccaggtggcatggtatgaaatgtattttttaatatctacctggttagaaagtaaaaaaaaaaataattaccatttaatgaaggagcgaaagattcattactacaaatagcatttattttcggttttttcttttaaacattaaaaagcttaaaataaaaattttgacaggtttatctcattgcttttttttttcctgacaaaatctcattgcttttagcttcgggcctaataaatattaacttacgtgaactgtagcacacattacaggagatttggactatttgagccagttggaagctgatgatatagcttcatacaattaattaatagtcaatggggtatcataagaaaatatttcaaacgtaattaaataatgaaataaattaatatattcataaatttgagtgctttcacagttgagaaaaaaaaaaatgaaactagctaatttatgattattaggccacctaaggcaattcataaaaagcattaaacgttttttgtgataaccaaaagcattaaaagttaatgaaagcaactggtgaacatcttttccattcttatttgggacacttaaagcttctatctattctttttatgatcgtgggactgaaattgaatggtccctaagtgtattcaagaaaaattgtttgattgacaggtgataatctattttctttgtttagaatcattctcttcgattcggagaactatcagggtgattttccacaaacaacttattaggaccaccttaattattatataaaggagactttcatttaaaagctatacaatatttagatttttaaaaaaatataataaaaaatgtaatataacttagggctggataccgtatagttataatctattttgttattatcaggggcggagccatcatgaaaagttaagggagccaaactatattataaatttaagtataaaaaatctcaatatttttattaaattcataattaaaattaattgcagaatgtctttcttgcatatcacgaaaatcatcgataagtgaatctatactaaattttttggcaatttctctgtcaatatacacgagcaaacaatc

SEQ ID NO: 226340 - DNA, 1570 bp, Cannabis indica
atggtctcagcttttgagacgtgatcagtacgctaaatgtcaatttttcagtcatagggtatctagatttcgcacctagcaatctttggcttatgtcgcagaccgggtactagaccttttcttcctctcgcactagtgtggcacttatagcatgatcggacactaccaagtacaattacaattcttccctgtccacgggctttgacaaaattggagcttgggtcaaatgctccttcaacttctgaaaagcttctttgcactcttcagtccattcaaactttttgttgcctcgcaacacgttaaagaactaaatacacttatctatagattttaaaatgaacctactaagtgcaacaatttgaccagtaacactttgaacatctttgtgcctcttggtagaaggcatgtcgaggaaggccttgattttttttctgggtttgcttcaattctgtgagagctaacaatgaaacctagcaatttcttggaggaaaccccaaaggtgcactttttgggatttaacttcatcacatactttctgattactgtgaaggcttctttgagattaaggccatcccccttagaggttttggacttagccagcatatcatctatataaacctccatgtttctccctagttggttcttggatatttggttgaccatttgttgataagtggctccagaattcgtaagctcaaacgacatcaccctatacaatagacaccttcatcgatgaggaagcttgtgtgttcctcgtccacaacatgcatcttaatttagttatatcttgagtaggtatccatgaagctgagcaacttgtacctgaacatggcatctaccatttgatctaactgcggaagcaaaaaacaatctttaggggaggccttgttcaggtcagtaaagttggtacacatcctccatgtgccgttgggtttaggagccaagacaagattcgcaaaccagacagggcacaatgcttcccgaaggaagtcattggtggtcaacttttccagttctatcttcactatttctgtccttactggatccaaaggaattggtgttgcatcctctcaaatgttcaaggcatggaaaatggtgttacggtcaattccaattatgtcagaatggctccatgtcaacacatcctggttctttttggctgtgttcataatgttttattttatggatggaggtaggtttcttcccactctgatggtttttgtggggtcttcatcgttgatgcttacttcctctacctcttccattggctctaaatttctttctatcccaactttaggatccaactcgtttggaaaatcctcctaaatggccttagtttctatttgatcctccattctgtgagcaatgggtgtctcttcccggaccatgaacacaacccatgttgagacattacaaaaatttcttacacatttttgatcacctttaatcgtgccaatacatccattgtcgcaggggaatttcatgtataaatgcctaatggaagttactgccccaaagtccactagggtttgtgttaggctaaaattagtctaagtttcgggtcgtattt

SEQ ID NO: 226341 - DNA, 924 bp, Cannabis indica
tacgtggcttggcacgtaacaatcacctagtatagaaataagatggcaaaatattcatgatccaaactactctattatctactttgatacaacaattgctaatttatgtgcggccataaacaaaaatttaattaagagatatataaaatataaatatatataaataatattaaaaaattatgagatagtagttgtccaaagcttcccttaaatttttctcaattcaacattatgagttttaacgatgaccaattttgtaagtttggtaccaaattgtattttaattataaatttgttaatgttatttattattatttaactgtagaataattaatcctagaaattcatttgcatcaaaattgtaagttatgggttatttgagaaagacaatgcaaataatcaagagaataaattaaatgagcagagatggaaatgatttaatgggtatacatatttatatatgattggtatattttggtgaaattaataattaataatgggaccaaaagtggttgagagagtgtggtagagaactcatcaacgtatagatgaaatgtggaattgtcactatcactatagctaggccaaagatatgtctataaatatagtttaattattacatcaataagactaattaatgttatgtagaagggcaactgcccgaacttgcttctatgtaagtctacccctgtataaattggtttacttgggtggtagatcttcaaataatacttacaatattaaaaacaaaaaaaaaacaatttttagttataatataaattttttgtgattaaatatgaatattagtcacaacaaaaagttacttgtgacgaaaacatagtatttagatacaagttgtcactaatttaattttagtcacaacacttacatttagtcatatcaaattatgatttttgtgactaa

SEQ ID NO: 226342 - DNA, 2323 bp, Cannabis indica
aatgtcaactatttcagacgactgggggtggctcacaacaagattcagtggcggcactcttggaaactccattgctcaaatttgtagtaggaggtggataacaacattaaagattgctcattcaccaaagggtgaagcttaggtttattgggattttttctagggatcgttctctggtaaaaatctttcattcaaattcgaaggcaaaagtttaaaaattcgaaagtgcaaaaacggtgaaaatggtttcctcgtgcttatatatatatatgcaaaactggatatccacgtactttgaaatcaagggccaagatcttccaagaaaaaacacaaatcacaatttaacggatatggaactgaggggacgacattaaatgtctttataggaatcgaggcattttttcatgattaatactcacctcgaggcccacattgacagtaaatggtcgccattctatcgtttcacacaaaatatgccttcctaaagtgcatggcactcatgaatccaagaggtggtgacacgtatgtgatgacagttgttctccaagcagattcttgactattcgattggtcgagtgtatgaaagagaaaaaagcttccactacttttagaattatccacgtgcctaatgacaccaaggttgttcagaaggaaggttgcaagcttctgtcactcttatgtcctggaagcttggggaaaatattatttttatttttgaaagatataaacattgcataatctgaaggttatcaccacttaaaaatgggcctaagcctaccccctcccaaaaggccaatctagacttggaaccgacccaagcccaacgaagacccagaactttgccttgggtacataatgttcttccaagacccgaaagcctccctagcctttcgggacatggaaggaatgaaaacctcctaacaaagataagggcatacctagaggcaggccacacgagatactcctgaacgcctaccacaagatgatgctcggaagcctaccggatgtctaccacgggatgaatactggatgtctacctagagacaagaggcaaatgtctcccctaacataatgtgtccacctttttgacacaatactagatattgtcccctatgtcaaaacatgatagtgcgggcaccactactacattttcatacaccacttttgtccgacgactcccctgacacctttgtctgcctagcatgacccccgtgtaacacgtgtcctgcaacaaatgatccccattttagtacgaaaccgtcaccccatgagctagacattcttagtgggcctcatagtaatgtatttgtgtattttatcccattattgggcttgcttttacaataaaccccaaatgggtcatgggtatgcccaaacccgaactctagcctatatgaaccccactatcccttcatgcaagggggatgaaattttagccgaagctctactagtttttattttaagcttttttcttcttcaagagaaaccaccttatagtaagagttagggttccttattgtaaaacttatttgtaatacatttcaaaacctaaaaggtcaatatactgactcgtggactagagataattaatgcccgaaccacgtaaaaatcctcaatctcttttacttaatctttatttaattgcttgaaactcttacttaattagttttcgaaaatctcgataattatttataattttatttatttgtaaaataaattttaaaaacaatttttaaataataatattaagtgtaccaatataaacgtgacacgtgtataagagtatacacatgagtcgtccatagtgatagttaactagatgacaccgtaaaattgccaccaatttaataattaaaagggttttaaatgggtttttacaccacatactaaaatctataacttttttcctttttattgtggggcagaattattttcaaaaatactatatattttttttataataccttgtactatgttaagtttcatctgttgttctactattattttttagttgttatactgtaatttttaattgttctctttggtgttttacgcttattttataaaaggcagtatttttgtaaaaaaaattcatgtggcagtagaattgtaaactttttcccaaattttagtttttctataaaaatcccaaagttaaatagtatttttataaaaatttctgcatagcagcaaaattgtaaattttttctcaaaattcagtttttttttttttttgtaaaaactccaaagttaaatacaaggccaccaaaaactctaaattaaatgattgtttagttggtagatgggcaaagccaagtttggg

SEQ ID NO: 226343 - DNA, 1130 bp, Cannabis indica
caaaatattggggcgttacaatgataatgatgatgctactacaaatttcttttagaatttttattttagttttatgaactatcggttttatgtttatcaatgttttatgaatactcgttttacttttttagtaagtaatatttaacgatattataatatttgtgactcttaatattagtatgaaaaaatatttagttttttactcttaattaaatgattttatatattaattaaaacaattaatatttaattttttaaaaaaaatcaaaatagatttagaattatttttctttttaaaaaaaatgattctatcaatgacgatattatcgtcattgataatataatcaatgaagacattgtcgtgatcattgattacccagaatattaaaaaaaattattatcaatgacgatattgctgttattgatatttttttgtcaatgacttgctttgtcattattgataatacctttcgtcgatgaactatctccaacgactttttaccaacaaaatatcgccattgatagtcattagtaataaaaaatgcacccttcacggacgaaatttgtccttattgatgtccatgattcttgtagtgtggattttttatgttacattatttaacaaaatttataaataaatttaaaataaaaaaattacatcaaaacttataccacaaatcatggtgcgtaattttttctagtaaaactgtaaaattcgtagcccaatttttactatataattaacgattcacatttatgcataaaataataattccatccattcacaatatataactatatataaatgcataattacccaacaaagtacttagtctatatattaaattttatggtctatatcagagttataaaagtagaaataaaatttaatgaaaatagtttttatctaatatgaaccataaacccaaggatctcaatacaatatatagattaagtctaaattactgaaagaaagattataactgttgaatctatcaggttatctttgtttctattcatattgttgacctcgcttttagccaacgacaacaagtcaaattttgtaagagataagtgatttatagcaatcgatatataataaagcaatataaagacacagaaattttata

SEQ ID NO: 226344 - DNA, 2008 bp, Cannabis indica
ttttttttttccttcttttttatatcttcctatcgatcttcctctacacttgtaagactcatcctctccattatctatttttgaataaggataattatcttttactaattttattttcattaaggctttggtatttgggcttctaaacagtatttgatggagaatttctgcatttttgttttcatctaaggccttggtgttggagattctaaagaatatttaacaggtttaggatcgaaaaatgctgtacttttcggttaattattcgtgaagggactcgagaaaaatcaaccaacatcttcttatagtttatgaatatttatataaatttatatctatttttttcgtataaatctatatctattttttctatgtttcctactactgtaggttatcaatttgagaagaaatgtgagagatgagaattagtgatttgagaagaaatcttaccatttacaatctcgtacgtttctaatagaattattgtaaactattcagattcttccaaatggacctattcttctggagttgctatacattgttcaggagatttttttaaattaaatgtgcagagatgattatttatttgtttcatttagttgaatgttattgataaccatgccttgcgaatggttgtgtccatatgtgaataataatttatttgtaaatggaacgggtgtgactttacttgtaaatagaaatggcatctattaaaattaactttttaattggtatattctgttaaaagacataatattctcttaagtgcacaacaaaaaaagttaaatagacattttatatattaggtaagatatataaataaattaatagtgttgccaatattgaaaagacctacagaaggaaaagatggcgcggaacttaaaaagtagggaagaaccacatgcatgaacgttattaaaccctagctagctagtcatccctaacaaaatgaaattgtaaaaaagatgatcataataatattgtataatatatatataaatatataaatataatgttggggtcagcccagccatcataagatctacacaacaattatattaacttgattatattagacacatatttttcataattgaacaatattgacccttaaagtgttgctttgagtaaaaatcatataaaagttggtcccattctcttttgtctgcaatatatatatatatatatatatatatataataatttagacccaataaaaaacatttccaaatagtaatttgaaaatttaaaagaggaaaaaagaaaaagtccaagtctaagccgagtgaccatgatatatattactcagtgtaaatacagccgtagaaagcgactagactagtagtgtagtggtactcaatgcaaaatgaggctgtctatataacaaaataaaacctttcaatgtaatattacaaataaataactttcatatttatagtgcatagctcgatcattaccttaaagaaaaagggatattttcgtatataccctcaaattacaagaaatatatatatttataagttactactaaagtgagattatttacttaccatggaatagaaaaataaattcagagcatcacttttgctctcatacgtgagggcattcttttggcccttaatttttaatctaacaatagtagtttatttacttaccatggaatagaaaattaataagtttttttttattattatttaggttgtaatttcaatccacatatattctaaccaccaatcatcttctttctgttacattgtttgccaaatttcaaggagaatgcagttttttttaaaaaaaaattccaccatttaaaaaaaaaaacaatccttctcatcattcaaaaatcccaaaaatcttttatcatcaccttcatctcagtttctgccacatattgtccatcatgtcatttttgtgtactattactgtcatggaatggaaagcttcctcactaatatattgccttatgatctaaatgaaaattgcatgaatatcacttaaatattgtatg

SEQ ID NO: 226345 - DNA, 3170 bp, Cannabis indica
ttattttttttaattatatataactgagaactttttggttaaattgataaaactgtatgattaaattttattttaaggtactaaatatgtacaatttaaaaatatgaggtaccaattaaatattattaaaaatataagatactaaatatgtttttcataaaatacaagataataaatgagtatattcccccaataaaatgtaataatgtattactgcatcttaatttttgaaaatgaaaaaaaaaatcacaatttacagtatttacaacagaaatttacataaaaatttgttacaatttttttatttactctgtaaatgtggtttataaaaggggtttttcatttttatacttcaaaataattttttttttgttatttttacgaaattctacatagaaactcctattgcaactaacggagcaacctaaatcgcaaccaaaatccgtataacaatccacatagaaatcactggagaaaccatcttagaaacccgaaccgtttataaaattgttaatatatagttataaaaaataaatttatacaaattggaaggctggtgtgcggtggctcgcgactgtcatggccatcttgttgaagcttttctagcagcaaaccaagttttttagatgctgctgtggtggaggcgataggcttaaaggaggctcttattggatcaatgacaagcattggaatgaagttcagcttgaaatcgattgccttcttgctgtccaagccttacattcttcggttcttttgtgtctccctttggagtggtgattcaggagtgtaaggagttgcttgattctttaaaatctgttcagattcaatttgttaaattttctgctaacaaggctgcacattatatgactcgtagctcttgttttcattcaggtcatatattcaccgcgagtaatgctccagtggatcttttgaatattgtaatggttgatgcaatttgctaataaaatgtcacaattttatctcaaaaaaaaaaaacaataaatttataaatttgtaaaaggagattttatttttgtaccctctaaaattttataaaagtacctaattttaataatttttattttatataaaatatacatatttaatttacactaatattttttaatttttttcctttcttttcatatatattcttaaaaaaaatatatacataaaataataatcgtacacgcgtcacccatccgatcaactttgtgactgagtaattccacgtgcgactaagaagatcccactcggacttgggggcaaatattatccaaatttctacacggtgatgtagcatccatctaggtgacacatagaatacatttcataacttagacgggcaattctactcttaatgagtcgtacatggagatttgacactcaaggtcataaacaggaattgtgacatcagagcagagtatgtgaagacatctgaccagtttctgtcaagcaggtggctcatatgcaccgtccaggagatacgagttgtgaaaatttcatagataaatcctatatatcttaatgcttgcaagacacggtactaaccctaaactcatgggatagatttgaagtattgcaaaataaaggaagcatgcctaagtttcctattctactaattgttaccatagaaagtagatagaattcttattttattccgtattaattttgagaaactaatttgatgaaattaatccctataaatagtggactcatctcactattcagggataggaaattcatttagagaaaacacttcagaaagaaatctagattcaagagtgaaatactcagagatcattgtaagagattttaaaagattttaaggcattcttgttcatcttctcacaagtcaatacaactaaagaggagtatgctattaccatcaataagaggtcgaacctttataaatcttgatttttctttaatttatattatctatttttgtcatttcaattatccataaattgttttaatttgactcattgtcgttggctaaaaatgaggtcaacattgtacttagaacactacgaattatgcacccttaaattatcacacagagatcctaccatgtctgccaagtgattaatttcttctgcaagtgatagtgtattctcctcttcctgaaatggttgtggtgaatttgggaaataaggatggtattcgtgactccaaccctgaagtgatggatcccagtgccaatcgtaatcaagatctgccatgtcattcaacaaattcatttcatcatggcttctccttaataaagtccctctagttacatctgctccataatccacacaacttcttattttatcatcaagtctgttataaaagaatagagtaaaacacccacttgagaaattgagataacatctctctctaagatccttaaatctctcccaagcaggatagaatgactcattgtgttgttgtgaaaaattcacaaggtactgatcttgatatagcatttgacttgatcttgcaggtcaaacacattcagtaaaaaattagtaaaattaaataaaaagaaatcaaattataatagaattcaactatattcatattaactaaaatagtcttcgacaatggcgctaaaaaattgttgcaaaaattatgttacacaagtgcacgtatcgttttaacaagtaatactcaggtaagtgagattgttctcacaaggactgtacctaagtaccaatcaattgaattcttatttttatttgataatcaaataaatacattttgaaactaaataaactaagcaaaattaaataaacaaacatataaaaggtttaacgatggatatgaaattagggacatgacttcaattactttgactaccaattgttaatactaatttaccattcttcttcctcctatgtgatgatatattataaattaatctaaactgttttctaaacatgaagatcctaaattgcatgccaactactgatatctgagatagaacaacatacaatttgcattaagcaataatctaaaagttacaagctatgtaaatactttcgtttcacatcaaaacctatgtttattcatttaaagcattcctaacattcacttttcagatttcacatttggattataaatcatacataaggtgatcaagcttaaacatgcaatacacacaaagatgaataaatcacataatc

SEQ ID NO: 226346 - DNA, 1994 bp, Cannabis indica
acataaaataacttttgcaaaaacaagccatatttttgcacaaatagtgtaaaaaatcgtaaaatctgtaattttctcttaacaaaaaaagtaactaattccactcatatatataaagcttaattaatgtgattatttttaaaagaaatattggtagcaaaactaaccaaattttatcttttttaacacttaacaataaaaaataaattttgacggtaaaatccactgccgttttgctcattacctgtctaaatacttcaattaagtgacacaataaattacccacgtgtatacaagtatacacatagtcaattttttttttttttcttattcttttctttttctttgtctttcttctcccacattaggtttgaccattgggttatggaccattaggttgaaggtgaaggaagatgaagaagttacagtggggttatggtaaactgggctttaccagaaaaaagagagtatgaactaattccattaatatatatatatatgttacacaaattcacctctgttcagcatcattgaacacacaccccaagaatagaatctaagatgtaatacttaacctgaacacttaaacacacacagtagagaaaagagcgcaaagatctattattttattatgtacaaatggtgtctaatacaacagtcatagagagttgagttacataccctttgatacagcaaaagaattacaaagacaagagtattaactaactataaccgtgactaacctatcagaacatgacacctaggctaactaactacctataataactgtcaggacattagttagacaaaccagaaaataacaatatacatcttaattaattactacaaaaactttttcagtcacaacaaaaatataaaaaacttgtgactaattataaatcattatttttatgttttgactaaaaagtttgtggctaaaagtataatcacaaaaattataatttattgtgagtaaatatgtttttagtcacaattcacaatagtacttgttgtgactaaaattaaattgatgacaatttgtatctaagctatattttagtcacaaaaattttttttttgtattttttgttgtgactaaaaagtaatattaagttaaaaaaaaattatattatcactaaaaaataagttttttataatgaattattggatgagaaagtacgcacaaaattccatgggaatttatattaattatcaaatttaattaaaattagccaggacaaaatttgtttcttaggatcaagcaatctcaaccggcttagatagaaacaagagtacgaactatatatatgcatatacatatacatatatatatatatcgattaattaatgcaggattaggacaaaagagaatatgattaattaatcataatgaatatgttattatgagaataattccaacttctaattttttgctcttttgtcctaaatctcaataacataaaaaggatatacttaattatatatgcaacatatattttcttagccatgtccttaggtctcaacgttgaattttgtagatccccatgtttatacatatgtacatacatatataaacatgatcaatcaatcattatataattataatataatacatttttattttatatttagtgttactaaaaagaaaaacaaaccaaataccctataagattggagagtgtgtgtggtgaatcttattgaatccatactatataaaactatatattccacgtgcaattctatggaacaccacactcccaaaaacttagctctcttcttaattatttctctctaatattttcatggcttcttctcatacattagagcaaatatgtattgagcaaccaaccatacttgaaaaaatctccaaaaacttactaacctcaaaacaagtccactactaagcaagtagtggaacgtggctcgagtggctccgagcagcagttctcggagccatgatgggttgctctcaacagccctgcctattgcttggt

SEQ ID NO: 226347 - DNA, 2162 bp, Cannabis indica
atagttttgttataattttttttggattggaatgattttttgattaatgaatgtgcttatgttaactaatagttttgttataaatgtatgatttttttttaatattaatatgttaaatagtgtgattgaaaaataaaaagagaaactgaaaatgagataggagagtattgaagcaaaagtttagaaactagtttctaaaaaatatgttagtgagatataatattaatgtgttattttttttttcaaaatagatgtaaaggctataatttcaatataaaatgaagaaaaaaattaacttgtttatctattttttttatgtgcatattaaatttaatttctttttttctattatcatcattcctatttttattttttttactagctagtaactagttactaatttttattaatattcatatatttttattagtaactagttattcattagtaactggttagtaataaattaactaattactcataaattatacacctagtaagtaattaaataatttaatttttaattttgtagtatttctttatattataggttgtgaggtcaatttgtaaggatctgacttatttggtgttgatcactttctagctagctggaggtatacattcactaagttctactattaattaattatgaatggaagattgaagaaaacttatgatattgtggaatgaggattctttcaagagatgttagaggctctaaactttcctattccttttgttgatttggtcaatgagtgtgtttttatgccgaagttttccttattaatcaatggtactttttatggctatttctcttctagaagatgtcttaggcaatgggatccctgagaggagtgacaagggatgtcacctctcggcttagaattcataaaaatagagagaggtgtttcaggatggaacttctcgcatatgatgccacatgggttgtggcatagctccccaacatcccattatagttcacacttaataacaccaatcaattctcgagtaaagtgtgctagcttgtcgtgtgagtcaattttgagcccaataactttataattgagctatgactatgagatacacttagatctgtcttgaaaagatatttctatttcaagttgatccaagttattttgataatcattgagagagttatgtttgttatactgaagggcagtatgtacttttttactctaaatctgaccactaccacatccatgtggcggttctcggccgtgcatgttttcgcacccctcggggtatgttttgacttgttttttgatggtgaatcatatttttggagtctcaggaccccaaaatctcatttcgacgtttgaaactctaacaagagaccactgccagttgtaaataaatacttaagtttaatttttggcggtaataatacctaagttataattttaaaacttttgtaagtacgtggttaaataaattgccacgtggcaatctctgattggtccaagtcattaaatttttattatttaaaaaaaattagttcaaatataccaataagaaaatgacacgtggatataatggcttaacatttaacggttaggtacctacagagtttcagaaatataacttaggtattattaccgccaaaaattaaatttaggtatttatttgcaactgagagttaaactttggtatttatggtgcaaattactcttttatttaaattatactcacaggtaaactcatgaaattttagaacgttgatgcaaatttaaataattaataaatatatataattaaaaaaattattaaaattataatactatatattcataaatcactaataaaatatactataaatgctaaaatataaaaatacgagggggctaaaattttttctaggaattatataggcccaccagtgctcttttttcttattaataacatatatgaataaagcatattttaaatattttggtaaaaaaataaaatattatttgaatacttaaaaataaaaataaataaataaaacttagggaaattattctatatactgttttttttaactttttttttttaatttacggttttgaatttctaaagtagtttctccggtggtttctatgtgggttgctatacgatttttggttgcgataggatgctccgctagttgcaataggaatttc

SEQ ID NO: 226348 - DNA, 1507 bp, Cannabis indica
gagagaggtttaagaggcaagggtgtccagttagttatttatgttagaaatacaattacatctaaaaactctttgagaatatttagtgaagtgtgaccagttgagacttttatatctttcattgacctttattttgctcaagaatagttaattgtttgattatttacaaattatatataacaatgttggtatatatacagagttgtattaatggcttgaagggcttttgaaattggcgaagtcagtgatcttagattcctctctcaattttcaagtgtcgttaacataataataactagacaagttatgaaaatagtgagtgttaattagttaaacatatttaccccacttactaatgttattaagattaatatgaacgatctgagcttaaaccaataaagtgaggagtattgttgttgttgtgagtgagtgagtactgatgagaaaagaagccatccattattgcattgcaacaacatcaatcatcttaataaacgacatgtcgtttattatcttaagtaaaacgacctgtcctttctttaatcactaattgctttttgcttgtattttcttttttctgctatttatgtgaattgaatcatttaccacatatacaatacattcattaatccccataaatacccaaataatacaattacaaacccacaaaaactcaaaaacacaactctattgcaaaaatacatttgttggtcgtagctagtagaatttgttttgatgaagtcagagtctaatcattattaactcataggaagaaaatagggaggggtgttttcgtcatttcaaatgccctgttttgttttccaacaaaagaaataaaaaatttgttcgtttatgagtccatttgaatgagtattggagggaggggtgttttcgtcattttcgtcatgtaaccattaattatcaaaaaaaaaaaagataaaacaaagaatataaataaataataaaagataatacatgtgacttttttttttttaaaaaaaaaaagataatcctaattggagtggaattataactcaaaatttgtctataaatatagtatttggaataaatgtgttttgaaagattttcgattcatttatttttttatttttttaattttggtagaaataactagtgtcattcaatccaaacaacttgatggaacaacaaaggctttcaacaactgaacaggtttctttttctctgatttttttaatacttctctctttatatttctcttgtgttggtttggatgaaattttgttgggtgtgaattgtggtcttgacattgcacatatactaatcaatatagtttagaaacattacttgacattaccatatatttattttccaaagtttgaacatcataatcgatccaacaatatatatatatgtatatttacagtaatataatgatactaaagtctgaacaggtttctttttttcttcttcttcttcaatcatatatgctctctgttttttccaatacttctctctttatatttct

SEQ ID NO: 226349 - DNA, 2293 bp, Cannabis indica
  modified_base (99)..(99): a, c, t, g, unknown or other
ccttaaacttaacctaagttacgaacgtacgtacgtacgtagtacgtagttagtagttacttagtacttatactaccctacccacccctccccaccccncccccacaaaaaaaaaaaaaaacccccaaagaatttttcaataaacccaaaatgtaattctccacaaaacccgtaaatataaacacaataataatgttattttcattaaaatgatcaatcttgtattccaactaaagggcaagagtacctgcaatgtataaaccccaggcggcaacacagcagcgggaccggccttatcgaactgctcgaagaagtcgcaagtggggacgtcagggctctcagcagccaatgcccgaacccaagtggcagtgagcttgcgacaggcggcgtcgacggagtcacgattctcagcggcgaggacggtagagttgacgcagagattcttgcgggaggagaggccgagggcaaggatcttggcctggggaccgaggtgtcggagctggtagtcatggaggagcttgagctcggcaagggtcttctccatctcgtgaacggttcgggtacagtaaataagcttgagtggagtttggggcttagagagagtgtagcttgtgatgagggagaggagagcaatggtcttaccagtgccggtgggcatctcaaggaggcagtggcccttcgcgtctagagatcgcttgagttcaagcatataagcatactgctctgggtatatgtggtcgtaggggaagtacaccgtcacatcttcaatctgaaacttcatggcggtttcttctcttctcagaggtcttcttcctccaaaagctgtaagctttataggataatctatctggggtttttaggatcactcaatgttcaatactgcacaagagagtatcagcttgccggggattcatatttcgagcaatacatacaattacataccttgaaacaatagggctctcgatggaccctttttttattaattattttttaaataatatatttaattatgtattaatataatttcatattaatacacatttaactagttaagattcactaatccgttattttaatcttagagtattacgggaaccatctcggttacactgtcacgatatgtacaatccttgtcaagcgatcatctcactgctcctccaacttagatttacctttacctacacaatgtaacaaacttatgagtcgacggatttaataagatatgcataattatatacaaacaatgcaataccggctttatgcctaagtcgtcctgagctcaaatgctaagctcacaaaattgttaagaacgttctcaacggaagtacgaccactgtaccatatgcactagagtaccaactccgtacttgtattgttagggccattattgtacttttgggagttactaagtgttgtaccacatgcatgacgtaccctctagtactcgttttggtaacactgtaattaccctaaaaccctacattgtactaacacccttaaaactatatttttgttagtgttagtagtgtaaacaattaataacatgcatacattcacataaatatactttatgctatcttacctcattttcgtgctcaagtgtgcgggtcagtgtgagtgaaactgcagctcgacgctttataggaccctaaactacaatattcgaaattctgatgagagacacgttaaaacacatcccagtgactttaaaattaaactagaaataaccctatcgatgaatgacatggcaataatctaaataacacaaaaacgaaaaaaaaaactaaggttctaaaattgacccaactggtagaccggttccctaatcgaaattccagttcgatggggtttcctagggaccaaccagtcgaccgattgttacaggttcccctgaaccggtcgatcgattaagtgtaggaaccaccataaatgtccccaacaacaaaattcaaccccaaactttccaataatctccagaatacatgtatgcaccataataaactcatatcaagaaacaaaacctaacaatttacacagaatcctaaatcgccattagagagcaaggtttgagttcttaaactcaaaccttgctcaaacatcaacacaaccaacaattccaactaaaatttaacttaaacaatcccaaataaacttcagagcaccaaaacaaacaccaattcataacatagcaacctagaactaaaattcaaacatttagacttaacttgagcttaaagaaatcaaaggaggagaagcgaaatggattttatcttgaattagaacactcaaggcc

SEQ ID NO: 226350 - DNA, 1651 bp, Cannabis indica
attatatttataaatattaaatgtggtctataatggtgtactgttaacgatgggaatcttaaagtatatgctcatttaaaatatattatatagaaagataaagtagtagaccaaaaagtctaaattttacttttaaatggaattattatattatttgatggtcaatatatacacaattttgacgtatcgaaattgtttatatcatgttgcgtaaatggatatatagtataataatataatgataatatatgtacatatccattattatatatataaagtaataggctagattaggaattaaagaaatcttttcactgattgaaacaaactttttagagtgattaaactaataatacccaattacttcaaaattcaaaacttgataactaaataaaagaaatgaaattggaaaacatacttgatgaggatgatttagtggagaagatgactttgttgacataagcatgaatagcaattttcatgttttgaagatctcccttattaagcaactcaacagctccatgtcttctccccatattatcaaaagtagaaccagattgtttagttccaatcttatgttttgtagtgactccattatcaggaccaacaccagcttccaacaaagcctctttaacagcaaattgccaagttgacatattcgaaaacgacacaatactctctctcacccattcataggccttctcaacctcatcattgtcccatttcactccagacttaaccataaaatcattgtcagcttcggaaaagaaagcggcgtttatcatacttgtccctcccaaaaccctacctcttacgttctccactccctctgaagtgaacctttgcgccggggtatcgccatcatcatccgcttcgatgagattagttagaaaccccgacgcaaccaacgtgttggggtgagctttagggacgtttcctctttcgaggacaagaactgagtacttttctgatagagttgcggccaaaggacatcccgcggtgccacctccaaccacaatgtaatcatattcttcctctaagggcatatcagttgcgttgtaaaccgatttcatgtaactaaaatctgtttaaaattaattaattagaattaaattatattacaaaactaacaacatataaatagtttgtaattataactttaattataaagaaacttaccataatcagccccggaaactaacagttttgcatgatcaaaacaagttagaaatattaacaaagtaagaatagatagagaagaagattccatttttaattatgcctatatgtttttgaacttttgaagccacaaaaaataatgaattttgcttaaatcttagtttcaatttatagggtttttgaaatagacgactacggattaaagaaggaaaagtatacagtaaaatattaaataattatctcattattatatatcaattattagtttattgtcaacatctagatctctgtcgtttactgttgttttgagcttcttagagtaaattacaaaaatgtctttatttttttttattaattactattaagtccaaactaatatattgtagtgaattattaagttaaaaaaaaaagttataagtaaaaaatatatattttttaatatcttgtacaattattttcttaaagtaatttt

SEQ ID NO: 226351 - DNA, 1414 bp, Cannabis indica
taaaaggtacaaaaatattcatttttgtagtagcgtaaattcagcacaattttatttattgctcctgttctatattgtggagtaataaattttacattctattaatagaaattgttacaatcacattttaattacagtttttataaaaataaattagtatacgcaaaaacacgatacttcactagacaaattttaagttttagttttctaacgcacctcttcctcatcaaataaataagaaaaaaaaatgctgactatttgggtttagcaaaaaataatttattgagccctttgaattttgtttcttgcttattgacccctcaccatgtattactgcctccgtcccctgtatgtatatgcactttctaatagaccttctttctaattattcagaggtttttttttaattataatctaccagcatcagaccaacaaaactaagatggtacaccaaatatataaatggacatcaagcactaatatcagagtccttgactcaaaaaagaaaatattagagccgttgcatgtatatatgccacgtgccatactacgttacactatgaaatagtgtaggggtttattagtaatttcaaaaaagtgtgaatcactataaatttataattgtaaggctattgtgagatagggattgagaaaatagaacttttagttcaattggagtttggcactgactcgaagagtgtattttaggagatttgtcttgtctcgaagaggactattatctatcaattgatgctttcattgagagaatcccagcgagagatttcattgagagctccacaatatgactgacgaagagcttcgtgagttcgtaagatccataattagatccgtagagttgcgtactgacgccatgtttgagcgccatggctagtcgactgcggcactgttggattcctcatctcaggcgccaaccatgtttcaagagtttgatgactctactgaaccagtgagaatcacgaagccaacggagaaggctctcgatcttgtcgacagtgacatttcagctggatccgatataggtagatcgcaatcaattccggttcgacctacgacgaagaaggcagctcgaagaacaccgaaagaggaggagatcggtgtggcttcatcggatgttgtggattctcgatttgcaccaacgaaggcagctcgaagaactccaacgtcggagaagacagagatgacattggatcttcgcgcacaaggttttgagcgtgtcagcgagactgtttttgttgttaatggtgtctcactataggaatcaattcacacactgcggatagatcggaggaggattttcgatcgtggacgatggtggatatttgatcaacgacgactgtggatctttaacagcgagggacggcataaaatggtcactggaggacgatcgaaagct

SEQ ID NO: 226352 - DNA, 1462 bp, Cannabis indica
gagagagagagagtaggtttctttctaggtttttctataatatttctctaataaataaaacttattttatttaattaaatcagatcctaatgttcagcctataatgcccataaaagacaaaagaaagggtttctaacaaaatgaccattttacccttaagtataattcaaatatttaaaaccttttaagggtagtttagtcatttaccactcccaacaaatccccgatatttccaatgcctaacaatggtaccccactattgatattctaaatcatacaaaacgtgactctctaatggcccacgtcgctttccactactaccgaacataatcattagaatacgagaaatttacatgtatagcataactatggtaaaattaaataaatttttacaaatatgcaaatcataattaataattaaatctcataaataaaccttaattatttgataatctaacatatcaacataggtgatctttacaattatcccctcattaaaaggatttcgtcctcgaaatctacatgaatagctttggatattgagttctcatgtcagactcaagttcccaagtggcctcttccactttactgttcctccagagtactttaaccaacactatggttttgcttcaaaggagtttttcctttctattcataattttccttggctgctcatcataagacaaatccggttgtaactccaacgcttcataatccaagacatgcattggatctgacatgtatttcctcaacattgagacatgaaatacgttatgcacagctgacaatgctggaggcaaggctaactgataagaaacttgtccaacctttttcaagtatttcaaatcgtcaaataaaccttggacttaacttgcctttctttccaaagcacctaatacctttcattggtgacacacgcaggaaagcatgatctcctggctgaaatgtaatgtcccgacgcttgggatccgcataacttttctatctgctctgcgaagcaagcattcgagctttaattttatctattgcctcatttgtcttctagactaactcagggcttagatactttcgttctcctatttcatcccaataaaatggggagcgacattttcttccacagagcagctcgtagggagccattcctattgtcctttgataactattattgtaggagaattcaatcagaggaaaatatttactccatgaacccccaaagtccatgacacaagctcctaacagatcctcaagtgtttgaatagttcatttggactgcccgttcgtttgaggatgaaaggccgtgttgaacttcaaactaatacccatggccttctgtaaagaccgcttagtttaatttggaaattagcagttaatcacgtttatttatgaaaattatttatagctatttaaataatttattatactgttattattgaattcagagatgcatttttatgtcatgtag

SEQ ID NO: 226353 - DNA, 1660 bp, Cannabis indica
gacttctttgccagcgcagtagcgaactgtgctggtaaaagtgacatttcttgtagtgtatatatatattaagcaaacccaataaactcaagagccatagtcaccgtctgatggctagcttttgcgattcagcgcgactatgcttccctccgtccaccagtaaccattttcctccatccatcgtcagcactctctagttcagcgaccaactttatctttctccaattgtggtcaccattattgctctgaaatcccaaacgataaactcgactagacccgtgccatatcgggttcgaatcacgaacaacaaaaataatgttggtgctagtttcagtcgatggaactaataccatcttctccttctctggcgttggtgttctttgagctcaattcgctgtcgtaggtatagatccacaacgttcgatgaagccgaagttgtcttttttgacttcggtgctctacaagtcatcattgattgatccaaaatcggttgggatctacattaatcaaatcaagctaaaacatcgggagtgatgagaggcatctttgatggaacagagagcttctcttccagctccggcaaactgtgattctctcttggtggtgcttcactgtcatctctggtgatagtcatatcaacgttgatgtgccaaacgtcctcaggaacatccactgggtttgtgattctcactggttcagcagagttgtcgacctctagaacaatagttggcgcctaagatgtcgaaatcgaaggtgtacgtctctgttgatggacatttgcgttcaaacatagcatgtatttgcttcctctaagaatcaaaatactggtcaatatgcaactccatagatctacaaattcatgaagctcttcgtcactcatatttcggagctcacaatgaaatctctcgctaagattctcttaatgaaagcaccaatattacgtatgagtcatattcaagacagggcaaatcttgaaaaagtggtctcattcaatttcgtattccttatttgcatcatggagacaagagataaagcctcctcatatattccatgcttcaggtatccaaaaatcattgtgttccaggatactacaactgttctgttaggcattccatcaaacacatcccatgacaacatcatgtaaattttgattgcaaaaggaccatttagtgtcattttatgatggcacattataattttaacaatgcaaccaaacatagcaataattctttagtttgtgtttttttgtttcttttttttttctctttgattttaatttctgattctttttgtaatatttgatgcatattgtatgcctaaatcaactttagtttttgagcaagcaaataaaaaataaataccaaaataaaaaataaaattaaaaatttggttattaggtattgattaacttaagtacgtattacataataataataataattaattatataaatatgagattgggtctataagtaaagaaataatgctttttttcaacacttttctaacatgtgtatattgatcatcaccttctttgtaaataagtttagctaccttagtaaaattaagagcacaaaataagataggaaaaggcacatcagttggcctaataaaatcttcattgatttatttccagtaattgtacaactcttttattgag

SEQ ID NO: 226354 - DNA, 1575 bp, Cannabis indica
ctctctctctccctctctctcgtctctctttgcatctctctccctctcgttgcatctctctcttggttcacaggtggttcgaccgtaggtgattcgagggtgggtgggtcgcagtggaggcttttcaggggcgatttttttggtggttggtgattacatttggacgttcgggctctctctctctctctctctttgggttttttttgcaggcgatggtggtggttcgatgggatggtgatgttttttattattattgttgttattgttgttgggatgtagtgtgatggtggcagtagtggtgcgatattagtttagatttttctttaatattttttacaattcttttgcttcggttcataactgaagtaaaaaaccaattagtgttgatgcgctactatttgcttcatttcataatcgaagcaaaaaatattttgcgtcgattctaaatgaataaaaaaaatatgactatttgcgtctacgattattgcgtcagttactccaaccgacaaaaattgtttatgtgtcactttaaaattgaagcaaaaacttacttttgtagtagtgatatattaattaaggtgtactgtagtaaactgcatcgttttgtaccgcacgtaggtgtggtgtaagttgcagttaatgtaaaaaaaaaattaaccatgtggttaagattttcacttgaccacatttcgtgagttggttaaattttatatatattctccgcccacctgcaccacgctcacttgtaaattggatgcaatgacaaagtaatattaaaaatatttagctagcaatcatattgaagtgtgtttggtagtttttttttattattttatttttattataggattaagatcaataagttgttataaattaaatctaaaatatatatagatcttaaactcatgccagattattaagattactctatgaattaataagatggaagacatacctgattccatgatattggatacgagatgagattgtgggtatatggtcttctacagactaatcttctctcaatgggttcacactcaattaatgggaaatggaggagaagagtggttgagattagccttggggaccaaacccttatgttctttatatagcaaattaagtggagccctataaaccctaattaggtttattactattgggtattacacattacaaagcctttaccaaataagatgtttattgggctcatttaattagactacttatttagcccagtttagaatattagctcaaataaattgtcttaatttataagcctaaattattggattattaaaaatagggataattacataagacaccatttttattaaaaaaaattacatttttacgtttaaagatttttttttacatttttatggttttctatagaaataacacgaaaacaacaagaaaaatatatgtaaaaaaatcattccgtctcccttttctcattatcaaatggagctatatatacaatatacaagagtaattgtatgctataaattagctaactaattgctaaaaatatgtaacaaatattgaccaaatcaattaaagatatatacagcaata

SEQ ID NO: 226355 - DNA, 1446 bp, Cannabis indica
aggagagatcaatggtgaagtttcctagaatcctggtggaaatggatataacggatgatccacccaaaacaatagagttctttaatgaatatggaaagttagttaagcagaatgtcgaatacgagtggcttccgattaaatgcaagaagtgtggaggttatggacatgggatgatggattgtcgaaaaggggagaaaactcaagcaaaaaaggttatagaagatcatactaagaaggaagaaaaggctccccctaatgaaaagcatgaacaggaagctagaccaaccaatgtgagagagactcaagaagagaaaagtgaaggagaggtagttgatttagataaaggattgaagaatggtaaatggcagacacctaggaagacgattcaaagacgttccaagttaccaaaggaaatccagcttgctgaaatggagatacatacaaccaaaaatatgaaaaattcctatgaggcgctgtaggaggagattgtggatgtggggcaaggctgttcctatttaactaattgattatggattgctgcaatattttgtgttggaacattaggggattgaataacactaagaagcaggatgtggtgttagatatttgtcgagttaagaatgttcgagttgtttggttgttggaaacgaaaaatgagcagtagtagaattgagaacatgatgtccactagattaaacggttggaaggcttactctagtgtggttacagaagggcggttattgattctttggaggaaaacctttgtgagggttattgtgttggctgaaacgaatcaatatgtgcattgttacattaaaatggcaggggttaaccaggacttctgcacaacatttgtctacaattccaacgctcttgaggaaaggaaggagttgtggcgtgacttagctaatcttaaattccctactaagccgtggcttttactaggggattttaatacaattttcaactacactgataggaatggagggaagagagctagtaagaaagagattgaagatggtaataattggttggctaaagggttggttgattggctttctagttcgggatcaaattatacttggacaaataatcaggaaggcgaggatagaatttatttgagaatcgatcatgtgttcaagaatgaagagtggattcatacttttccttgttctagagcttatttccaatgggaaacggtctccgatcattgttcttgcttggttacttttgctctccccaaaatattggcattaaaccgtttgatactttaacttttgggctgaacatggagacttcaagaaggtagttatggctagttggatgaaacctattctaggcattgggctgcaggctatctatttgaagctcacgagactaaaacatgttctaaggaagtttaataagaacacaattggggatgtggaagttgttgggttttatgcc

SEQ ID NO: 226356 - DNA, 2100 bp, Cannabis indica
tgttgatagcaaatcagcaattgcactagtaaagaatccaatctttcatgaaataaataaacacattgacacccgctatcattacataagagattgcatgcattggaagaaaagaagtaagagtagaatatgtcaaatctcaagataaagtagcagatatttttacgaagccactcaagagaaaaacaatcatcaaattacgaagtattattagagtcaaaaatcaagtttaagggggtgttgaaatattaagcttgatttaatatagttaattactagaattgttctgttgctattaaagtttctagactattcttttatttactaaaatatttagagttttcttgtttgtttgagtactcttgaactttctagaattatttttcatgtgttagtagtgggaattgtgtagaaaaatatagaagctaatcattcaataatgttattaaattagtccatagagtcctataaatatagatgtaatcctattattttctaccaaagttcttcttatttttcaacaattgctttgttggttgctatgtgaattttcgttaaaataccaaaaaaaagctacttttaagcgtaaaaatgaaaaaataaatacatggtgtagtataggtttgcttattgaagcttagatcatcaatcgtcctgtctaaatataagctcatgtgactttctctactattatctactaacaagcaaagtttaaaacaaaaaaataataagtaacaaataaattttatgaaaaaaaaaaatcaacacaaaaaatattaatatcatatgtatgctcgtataatcttctacactattatatatttactaataaataaataagaaggaattttttttaaaaaaaaaatgagaaaaaaacacaacaaaaaatatggtaaaaaaatgtaaaatagacttgaaaagatattttaaagaaaaaatggagtaaaaaaataagatagattttttgagaaggggaaaaaatgtgggatttgaaaaacaaatgacaaaatattaataattggtacaaacaaaataaaatacacctaaatggtgtgcaacaagtaaaaaaaatttacagagttatgtataattgaaaaaaaaatctaattaaagtgaataaggatatataatggagacctaaaagtgtagtgtgtatgcatattttagctcatcttcataaaagtggacttcaatggtggtgtataaagtggtctaaatttagcacttactaaaagtcgtgccaaatttggtacaacatatagcatgagccaaattttctaaacctccaagagacgttgtggtgcgccttggctacgagtctccacacgagatgacacaggtagtcattcgtgggctggtttgcatacgcgcatgggatggatgtaccatgctggaaagagacagaggtcaacgcatgctactagtttggtggcttgtctcgagggcctactaacatgcgtggatgcatagtgccttgaggattggaccatggacatatgggagtccttggtcgatgagagagactattcggacagtatcgaatggggcatgattagaagcgttggtacattagcttggtgttggcatcttgtcatacatgttaccttggtcacgagtgactaggtgagcgtcgatgttaggatttaccctatcttagtgggaacctatggacagtgcgagtatcttggctagagagcctcgattcatggatgcacacatggatgcttgcgagcatgactcggaatgagttgctctagagacggaagtgtgcacgaggcacacagtcgcgtgaaaaatgagtctattgttacttgaatggttggaaggttgaccttggcttagagaaatcaaggtaccgtacgggtgttccacttcctgaaaatgtgagcccgtgacaccagacgttgatgggtcgtggtcggagaagaatgtccagcccgccacttttttctctctccttgactctagttccacagttttagggttttggtttttttttttttttttattttgagataactagttttagtagttttttgttagaatagtatttgttttatagtttaatttagtttttttttaagattagtcaagtaggta

SEQ ID NO: 226357 - DNA, 1099 bp, Cannabis indica
gaaacttttttaatgagaagaaaataaaaattgaaactttttatcaaatttggggtatactgaaaatcaacgacaccactcctaaccggagatgtcgtcggcggcggcactaccagacgagctatggcgaagaattctcgagctaggcataactataaagactcaatctttaaccttcaaagatctctgtcgcctttcaatcacctccacccgctttcgccgattatcttccgacgacgatctctggtcccatcttctctcctccgatttctccctcgaccgttaccgatctccattgctctcctccaagtcattgtacaaattcaggtaagtaagaagctctgtaatcagttttaggattctctctattgcctttttgtgacaatattttagggttttaggtttgagagggaaaaagagaagaagaaagctgctcacagaagggaaatgttgagaaaagagagccaaattgctgaacatttgaaaaggattaagaaattgaagaatcgtttggtggaggagcaagaaaagatgaaagcaaccattgttgagttaacaagtttgagcaaaattaggtaattgtgattttttggtaaatttgccaaactaacaatatgaaaatgttaaattagagaaataactacattgaatttagactgtgcgaccattcgttagggtcgttattcgattcaatgaatctcagtttcagaaccgaacatgagattttcactaaacatgtatgtaaaggtataatcggaaatttgacagcaatattaggtaatggttgtttttcgaaaaatttgccaaactaacaacatcaaaatgttaaattagcgaaataactatattgaatttagactatgcgaccatttgttatgatcgttattcgattcaatgaatctccgttttagaactgtaactatgtatgtaaaggtataatcggtaatttgatagcaaaggcaataaaaaatctaatatagaatagcatttcgggtgctataaaatacttgattagctgatgtttcaaaatttaatgttagttcattggaacaatgtaaacaaacaccttaaattctgattaatgaaaatgtaaatttat

SEQ ID NO: 226358 - DNA, 1756 bp, Cannabis indica
aattttcgcaacaacaacaatctctgaatttatcaaaacaactacagactcgacaatttactgagattttatcttcgcagcatccatattactcttcaccgcgactattgcaagctcaggacaatgcatgcacaagcaaccaatttaaacttgaacactagcgattcagaatttttagattatgtgcttgatgaagacaataataattagtttaagttaattttaattatgtgtggacaataattatttgtaaaatgtttaattatgtgtgaatttatttaaatttttaattatgtgtggatttatttaagtttttaattatgtgtggatgataattatttaattggtatgttggacaatttttaattcattatgtgtgtaataattagtttattgttaatttaatagaaaatattataattttaattatttctatatataatattaatattattatgaattatatatttatataatatattttttatttaaacgcattatcggtgggttccgccgctataggtccgccggtattaattaataatagcggcggatgtgtcagtccgccgctattactgattaataccgaccaggtattatcggcggagcaataccggcgggaccccgctggtaatcactaataccggcgaatttcactctaattaccggcggatccttccacccctaattcttctaattgttgtagtgaactattttacaaaatacgtaactacaaaagtggtcatctagtgactaccaaaatattgcctactatcccaaagatcaaacactcaaggtctaaccgtcccgatatgtacaattttcatctgctcgcactcactgcttctcagccttagctttgcccttacctactcatgtaagaatagttgtgagccgacaaactcagtaagaaaagcataatcatatcataaacataaactgaattataactaggcgcccatacactcaatcataaccctatcccgcatcccacgcgtactaaatctagaacgttcatacgatagtactattgaccataatattaacctatactcggtactctagtcatactgatgtgatagcatcaatcaatacttatgccaaacatacattcatcggtatctagtataactctatgtatacatatatcgctatttcaatatgttatataatacaaattcataaacatgcacgcaaaatatgtaatcacatatgcatagttaatttgagtggaactgttgcttgacggtttagaggcccctaagtcataacattgataaagctgataaatcattacgtgttatcgtgatttcatactaactatgcaattcgttgctaatcaacgaatttgttagaaaaacgtgattaattaaaactttccataattaaactttaaattaaaataaataaagtttacataaaccgggatcccattgtttaacatttacaactgttttataaaatatgtaactacaaaagtggtcgcttatgctgccccaaagatcgaacactccaggtctaattgccccgatatgtataatcttcatctactcgcactcactaccactcaccttgagctttgtccttacctacacatgtaagaataactgtgagtcgatagactcagtaaaaaaagcataatcatatcataaacttaaacagaattataactaggcgcccatatgttgggttttatgccataaataaaactcatttcaatataatcagatttatttattaatatagattagaaata

SEQ ID NO: 226359 - DNA, 1953 bp, Cannabis indica
gatttttttgggatacctgattcgttctcaacccaaactatccaacaaccactcactactccttcacatgagtccactcataatactcaatctcatccaacacatattactccacttgagcccacatattcttctccaccagccacctcacctaatcaaccacctactcctcactcaccacatgaatccatccttggcccacctacggatcatgggtcagtccacccaactactatagcccaccatgacaatatagataatgcaacaggttctatttcaacttctactactgaaactccacttggacgtgggttacgagataagatcccgtcagttcgacttcgtgactatgttactaacactgtttccacaaaaagtccatctactctctcttcaaattcacctgcaccatcagcatcctcaggtacgccatttcctatagcacactatattaattgtgacaaattctctatgggccatcggcaatttcttgctgctgttactgcaggttgtgagccaaaatcctttaaagaagctatgaaaaatgccggttggcgtcgtgctatgcaaatagagatttgtgctttagaggataatggtacttggactatggaatttttaccacctggcaagcgtgctcttggtagtcaatgggtgtataagatcaagtataattctgatggtagcatcgagagacttaaggcccgtttggttgtttttggtaaccatcaggttgcagggatggactataatgaaacatttgcaccagtggcgaagatggtgacaattcgtgtcttcttagctattgcagcatctaaaaattgggagttgcatcagatggatgtgcataatgcttttttgcacggggatcttgatgaggaagtttatatgaaacttcctcctggttttcagtcatccactcctaatatggtgtgtcgtcttcgaaaatctttgtatggtttgaagcaggcacctcgatgttggtttgccaagcttgtcactgctttgaaagagtatggattctcacagtcatgtgctgattattctctgttcactttggctaaggatgccattcaaattaatgttttggtgtatgttgacgatcttattatttctggaaatgattccgctgctttatcactttttaagacttatttgagcacttgttttcatatgaaggatcttggggtccttaaatattttctcggtattgaggtagcgcgtagtcctaagggtatttttctttgtcaaagaaaatattctcttgacatcatcgctgagactggtcttttgggggccaagcctgtgtcctttccgattgaacaaaatcatcgtcttgctaatgcttctggggatcctttgtctttcccagagtcttataggcgcttgattggtcgtctaatttacttgtcagtcactcgtcctgatttggcatactctgttcatattctatcacaatttttgcaagaaccaaggcaagaacattgggaggcagctttgcgagtggttcgctatttgaaaggctctcctggacaaggcatcatattacgaactgacagctctctttctctatcaggatggtgtgattcagattgggcagcatgtcctcttactcgtcgttctctcactggttggcttgtgtttcttggacattctccgatctcttggaaaaccaagaagcaacacacagtggcccgttcttctgcggaggccgaataccgctctatggcttctcttacatgtgagttaaaatggttgaagggtcttcttcttagtttgggtattcaacatactgctgctattggtctatattgcgacagtcaatcggctttacatattgctcaaaatcccgctttccatgaacgaacaaagcacattgaagcagattatcattttattcgtgatgctatccaggatggtaccattcttccttcttatgtttctacttcagtt

SEQ ID NO: 226360 - DNA, 1886 bp, Cannabis indica
tttgaaaataaaacgacaaatggttacctgtatagggaacaacttcaaaatacccctcttagccaaagcagaaacaatctcctgtgcaattccaagcttcgaaatttcaagcccatcatcatttccactggctttggccgaatcttcgtacgattccacatcgacggcgaactcagcctgcaaagccactgaggcacgataatccaatctcccagatttcgcgtggaagtttctaacatggaaaccgtatgagctctccctttgaagcaccccggtattggaaaaggacttgacctcacccccgaaaccaccatttccggacacaacagtatcggccactgacaaggcggtggcagcgattgagtggttgcgatggcgtagcagggtctcagctgctgccagactccgtctacgtaggacgatactcaacatcttcgctccaatttagggttagggttcgaagagaaagagcccctaattcttgagagagagacttagggttttagagggaagtaagggttttgggatacagaggcggacgagtatgctaagtcctcggagaatagggtgagaagggtttaaggcccttaagaagatatttaggtccggatcctctgtggtcgaccacttctgcttaatgttacaactcacgagttgttttttttgtcattaatatatatgtaaaatttatgacaacaaactcaactacaaccaagcattgtgaatcacgatattgcataattatgcttgcttgtgtcaaaatgtaacaatcatcaatgtctaacacctaataacaagggggtaaaatgtttaaactatgagtgaactatacccacatatgagattctttctcttttccagaaaggatggtcataaacctttcttccttccttcattgttttctttccatcattcattttcgttttgtttctctaccttgattcgagtcttccatcttgttctctatgtgtgagtcttcagttccccttgtcttaactgtttgtttggtgtcttgttgttttgtttatggctggttttgtttaccggtttgtgtgtgtgttgttagttgggattctccttgtctcctgtgttgttgtgtctgtgtttgtggggttgtttggatttattctgtctcttgttgtcagttgttatggactcagttattaccaccaactcctctcttaaaggcaagtgctttacttgcattgaagcctctatcaccttatccccttgtgatgcttctcttaaaacactttctctgtgcttatatggaagggtgattgctcctatgactgtggatgttgccacagtttctgagtttgtggcaaaaagttggaacaaagtggtgtatgtggtagctttatcagatgttcccttacacaccaactgtttcaaatttgggttcgaaagtgctaatgattgtagttgggctctcgagaatggaccctagtgcattcgtggatagtctctctttcttcaggcgtggactccttgcacagtcggtcctgtttcctttgatcgttgcaaggtgtggatggaaatccataacctcccgcacgattacttctcagtgtctaatggcttacccttgggtggacttgcgggtaaggttctggctattgagttggaggaggataaaccggcgacatggaacttttacctcagagtgcagattgagtttgaagttgctaagccccttgtttcaaggtgcttcttttatttgagctcaggagtcaaacgttggctacagtttaaattcgaaaaaaatggaattttttgctacaattgcgggtgtttgggtcacaaaggcgtggatgttctttgtcttcgccgatcacggttgcgaactatgatggcactctgtttcctctctacggaccgtggct

SEQ ID NO: 226361 - DNA, 1924 bp, Cannabis indica
ttttctttatacattactaagttttttttctttttttgaatttgttatttgttgttttatttattttaatttgttgttaaacacataaaataactattatttattttattttattgctagttatagtgaaaaaaaaaaatattttttttcataaatattaaataatttaatattaaaagtaatcaatccaaaataaccgatctaatccgcatttttgcagattgaattggatttgagttattgtgcggattggattggatccaaaaaatgaaatctgcacttagtgcgaatcagatgcactatgaacaaaatagtacggattggattgaatgagcacccctagcgtagagagccattctgaacaaagctaaaaaagattataaaggtgattaaaggatcaccttacctaatgtgcctagagggggagtcactgaacctaaaacttgactatttattgaacagaaataatagtagaaacacatttcataaccaagtcaataaaaagatataaaacctcatatataaattttaaaaagatcattcaattgatctattaaaaactttagtcatatctaactttagtagactaatttaactttttttatccatttctttttttattaattgcatgtaaaaattcatgagcaattaaaatattattaaaaatagtatgatcgcataaataaaagtactttaaaagttagatattgaagaactgagcacaggttttaatttatttacaatgattcgagacaccgctttatatataagatataaaataaattaataggtgtaaaatcttttaattgagaagcatttcccattttagagattaaaacaatgaaagttttattgataatagatatatcaatttaattatttatgttgtgttagacaacaacctcagccagcaaacaaacaataatcaacacaccagaaatgaattaatgaattgcagaaaatataataacagaatttaaagaacacaatcaagattatagaggttcgaacttccttcacaaagtgaagagcctagtcctctttgaactcccttaggattagtctttattatgaatcaaatggcaagattacactatgtttagttgtacaaattacagaacacagaaatgatgagatattccctttgtcttagctttaatcctgaagcttgaactccttgaaaccacctgaagctttaacttgcttcccttggtttctaaccctttagttcttcaatgctccataagtttccctctctaagaacaagtaatcttcctcaccatacataattctctctctctctatctatcttatctgctacttttcttaaaacagaaaagaatagaactatatataggcagcaccacatcaggttttgccattacaagaataactgaaaaactaactaaactaacacatgctgatgtgtcaagtcctcacttgccatgtcatcattccttttacttaattggttttattaaggactgaaataaacaacaaattccacctcagtacttaataaaccaatctaaagaaaacttctcctaagatcattgttcagtccacctactgacttaaccctcttctatgcctagcaattccaaacaatgttggaatttgctaagtgtaactggtttagtacccatgtcagcaggattttcttcacttggtaccttttcaatgttgatatgttcttgagtaactttctcccttatgaaatggtaccttacttcaatatgttttgttctatcatgaaatactgggttcttacacaagtataatgcactttggctatctgtatagacagtagcttttcctttgaacaaattcatctcttctagcaaaccttgtatccataacccttccttaattgcctctgttgcagctatttactcagatttagtggaagataaggctaccacag

SEQ ID NO: 226362 - DNA, 1656 bp, Cannabis indica
aaacgatgtaatatatatttagtccacatatcccatacataacataaaacacaaaaatcaaattggaatatagaacgttccataacttcgtgttacttaaaatcacaaaacactataactgaaaagctaagttcaactatacctgccttaagaagaaatatcaaataattaactagctcagcttaatttttcaagctagccagctaaaaattcttgatcactatataaatataatatatatatatttatatatatatatatatagaattatagaattattgtcagaagagatgaagaagaaaaggcatgcagcagcagcatttgtactatggcccaagacggtaatggccatcgcccatgtagtgaccatccatgtagagagcggcattttgtgggtgcagaccatccataaccatgaactgcatatcttcagaaggcttccagtgtctcttcctttgatttatgaaccaattatttatttgtttctgatccaaaccagttgactccgccaaagccaccttctctgtctcctgtacgtagaaaaatagcccatactcataacaaattcactacttgtaccttaaaagatagtgatatatttaagcatataatgatcaattaattaatgtcaaaattcaacatatatgagtactagctaatatgtccatcaatactcaccaaacactcgactacaataactaaaaaaaaacccgcaaataactatatttcctcagttaaatatagctaaagttttaagatcactcatgttagatgttttaaaattaatagagaatatttaaaatatttaaaaactcaaactaaaaatccatttacatcaaatgctccaaactaattcattttaatttttttttaaatttattactctatatttatagaatattatttatttttctaaatatattttattaattatttttatttgaatattttttttatataagtattgtgtatatattaatattatatgtttaaaataaataaaatttattaaaaattaaaaaaaaatattttggtcatgtatttgaaaaataaaattaatgaattttataaaagtttgagataaaataaataaaaaaaaaagtaaaatttaatggtgtggcgtcatcagcatatgattgaatcattattaataattcaataaaagttacattaaaaaaacaaaagttgtttgtcataatagtttgaaatattcaaataatattaattatagaaactatccaaactcaaattcactttaataaatttacagattcaatctttatatacccagacagcaattaatcaacaaaatctaacgaaaaattaaatataatgaaatttggggaacaccagtatagtttaattttaaaaaaaaaattatatacaataaactagaaaatatgaatcaagaaatcaaaataaaataaaacctgagtattgattagtgctttaataaggtgttagaaaactcatcaatttacttgtaatttttgaaagagagaataagaaaatgtgtctaaatatcaatgttagaatgcactattttgtttactcacttaatataaaataaataattaatgcaccttaaattgaaacatgtcacaaatacataggaaaattatacaaagggccactagaaatgatgcactgatttac

SEQ ID NO: 226363 - DNA, 1497 bp, Cannabis indica
caattagatgaaagtagcgcatgatcaattttttcaggcacaagaaaccgtttacaagaattaaaaaagtctggtgagatggacttttatgagattcgagccttaggaggtgatattagagccaaagctacttccaatctgaataaaagagaactacacctcttaaggaaaggaaggtcccataagcctcttcttccttatgttttagacctttgaagatcctttgacaacacccaactgttgttcgtaatttccaatgggacagaaaggagaagagtcgggatgcaaagactgctattgaagtttgctcggataatgagtcaatctctgctagccacaatgtccgttttgttgaatgggagatgcgagcaggttgaatgacgtgagcattcatgggactgatgtggttttgattgaagatattgggctcgtgtgtcgtctcaggttggtacccttgtggaagagcatggattgcatcctacacaagagccatgagaggtgtggctcggaactgtagagggttggggtagaactttacagtttgtgagctaaagtccctagttcggccgtgcatcctaatttcatcttctaactgagcttaaagttgatgctactctcgtggtatgtattcttaattcacttcatttttattttaatatttttgtacctgctgttgatgttgcaagaggtattattttgacctagaaatatggttttgtttttgaaagtatttcttgctcccctaatcaaatctttggtttggtttattcgaaccctccctgccagccttggctcctcacttgtgttaattctcctttgtactttcatgcgaagaagaatttttagtcaaaggttatgatgttaggtgatatgtttggttgcccgtggttgctaattggtgatactaattttgtgcttaatatttttgaaagagaaggttttaagggaagagactagtttttaccctttatatccaatttggtggagtctcgaggtctgataaatttgcatatccaaggggataagatggcttgaaataaccattgctctggtaagggccacattaagtcagccttagacaaggggcttgttaatgttggttggatcaacttattcctaaaaggtgttttgtgttctttccagaagagcaattctaatcgtaggcccctgtgtttatacttgggtagcttgaatgtcaaatttaaaaggagtttcaagtttggagaaggatgggctcgggatgaaaggagtaaattggttgttgcccatgcctgaaacttggtggttcatttttggccccgctagaatttttaagaaaattagggccactcgagttgctcttttacaatggaatagatctcaatttcctaatcttgacactgtcataaaagaagctggaacagaagcttgactatttgaaaaagttacctgcttgcacacgagattgaaaggaggagagtgaaattcggtggtcgcttaatgagtctttagaaagaa

SEQ ID NO: 226364 - DNA, 2072 bp, Cannabis indica
ttattttgtgcatgtccataaataagactcctatcattaattttctattataattttttagtaaatttttgtactaaattatacaagttaaaatatttttgttttagatttttctatagttgtattcgttatattgacaacattatctttataaatttttgaaattttttcactagtttagaagttgttttcgctatgcaagtaagtaggcctctgagaggtggtagcctcccaaatcaaatgccatcgggagttgattatgcgaacaacacgagttccaaggcagatcactagagatgactagtttggcataggataaccatcattagagagccataatgttcgaacatcccatttacctataaagataaagtgacgactaatcttgtactgttataaagtgacagattaagatttaaagtttacatgaaaattctgggtaagtctacagaaggatgagtacaaaacttaaattcagtatagcttttcacacgcaaactgatgggcagtccaagagaacaattcagatattagaagatttgttacaagtctgtgttatggactttgagggttcatggaataggtattttccattgatagaatttttttacaacaataactatcagagtacaatagagatggctccctatgagatgttgtatggtaggaaattttgttccccaatttattaggacgagaccggaaaaagaaaatatttgggtcctgagttaatttagctgaatagtgaggcaatagaaaagatcaaggctcggttgcttgctttgcaaagcgatcaggaaagctatgcggatcctaatcgtagagacatagtttcaaatgacaaaacatgttttcatacaagtctcaccaatgaagggtgtaaagcaccttgggaagaggggcaagtaagctctaggttcttagggccattcaagatactcgagaaggtcagtcaagtagtgtatcggctagccttgtcatcaatgttatttgttatgcataatgtatttcatattttaatattgagaaaatatgtgtcagacccaactcatgtcttgagttacaaaatcctagaactatagtcagatatgtccgatgaggaacaaccagtttaaatcctcgataggaagaaaaatattcttcaaaataagaccatagcgtggtcaagatactctggaggaacagtaaggtggaggaagccccctgagaattagagtccagcatgagggctcaatattcagagttgttcaagttagatttcgaggacgaaatccttttaacgggggaataattgtaatgactacatacatagaatatggattagtagggtaattagtattaattatttatatttcataattatatgtaattattttttttattgtgggtattatttttaagaaataggcattaggattataatttatcaattcaggagattttattaaactctaactgtattatgtatgacatatgtgaaaaaataatattttataatttttgttcggtaacaataaaaatgtgacgatttggccaatagagtcacacgggtttggtttagaatctttattgagcggggtatatttattttatatttagaatatcaagtttagacgaggttgtgatgtttgaccctcttacccctcattattgagataacttaagtggaaagcaaaaaggcattttgggaatttttgcctaacaggttacatttgtcctttagtgaaaatttaaaattaacttggctgattattattattatttataagtaaggttttttttagtagatacacattaggaatttaacgaaaaaaaacctaaaaaccttaaacctcctctctctctctctcctccttgaactaaagaaaactagaaatttaagctgccattttcaagttcttttcagcaaatgaattagaggaattgaaggagtaaagtgaaggtaagtcctagactcttcttcttgtgattttggaagctttaagttggcttcaaccatgcattttgagaaaatagttctattcgaacctggatttgatttgggttgaatactgggtcagtattgaattgtt

SEQ ID NO: 226365 - DNA, 2636 bp, Cannabis indica
atgcatgcccactgtatttttttttcagggccaacacttaatagttaatactgtttcgatagtgacatcacgactcacaattattataacttattaaaatattaacaatcactacccacaagtgccataacatcaaatagtgttcaagttccaataattatctgcatgtatttttttaatgcaataatactgtattagttatttgatgtatctattatcattaattaatcgttttaacttaattaattattgatgtaagttgctaatttttaataatattatctgatatcatttcaaaacatacacacatgacacatcaatgatcaagttggccatttttgtgggttgttttttatttgtttcttcaactatattaattaaacctaatgacataagaggctgcttatagggcgtgtaagtgagcaggaagaaataaaatttaaatgagaccattatttatttttatagtaaattattaagaaaatttttatattgaattctgcttattttatgtttaataataattattaaaaaacagtaattatttataagacgtcacctcataatagtactaaagaataaagatattatagtacttaatagatttactaatatttaaactttaatatttaataaaaattatataattgactataataaaacataaaataataattatattttaaattaatctaaatttaaattccaacaataataccagaagtaaagttaaggtgtggagttttgaatttgtgaccaccttaaactttaaacatagatttaccaataaattaaacaatacaatttgataatatttgtataaaaaaggctccaaaaagtacttaaatttaagccttaaataatttagaaaccgagtcaaattttacgtggagcgaccactctgcttagtctgcatgtggcttcgcctatgtaagtgagtctagtaattacactatatatatttatataacaatggtttctttgaatataatataataattacatataaatttttattattttattatacaaaatagttagtatttgtataaaaacttaatattgtttagtaattaattattattattcaatgttataaaaaaatatctttagtaacaaacttttagtcataatataattttttgtgagtaaatgtgacttttagtcacaataaaaagttacttgtgattaaaacatagtatttagatacaagttgtcaataatgtaattttagtcacaataaaaaacacatttagttacaataaattataatttttatgactaatacttttaaccacaacataaaaatgataatttataattagtcataattttttcacttttaatcataagttttgttgtgactaaaagtaaaaaaatttataatacaaaataatttttttaaactaattatactgtgtaataattacaacatttcttatggatgataagaaataaatagtatttaaggaagaaattacattgaatactcgctttactttatatagtttaattttttacttttatttctatattctttgaaatatacctatttttatagatgatgttcttactaatcctccttaagttaatgtaaattatgtaatagatttaagtagagagtgagatatattagacaacccactcacaaaaatgagtacattttaatataatataatataaaaatatttttgattaatatatatatatataaaagaggtatttgttaactatcttaattggaacatttgttataactaattacataattattttataattaaataattcaacaatatactaaattaagtcaattttttagaattacacctaaatttgattacagttgttggcatatattgtgcacttacctttaatcataagaacaacattaaagctaggccattgttggtggtattattattgtagtcttgcaactttaattatgttttggtccataatatagctaaattaattgcctttatattcgaatgcttatgatgatattagtttgttttctatcccttaggaggttcttaatgataacactgagtggactaaatttttgttggtttatagcatgacaatattgattttaaatatatttgttgtatattattttgtgtaacgtcctgatgctttggtgcgctacagtgatttttcaaataacaaattaccttgctaatcaagggttttctttgaaaatcgtgtcaaatcaaaacttgaataaaattaataaactttatgaacataaaaatgtatatatatattatataatcgggatctcgtgctaaaacttctataaacattttgaaaatatttttacaaacttgtcgcatagcgactataaaatatatcctaagaagtcctgagaccgaacacttcagattgctttgtcttgacatgtacaatcattacccgagctcagaactcactcctattcagcttccgcctttcctttacctacacagaaagaagaatctgtgagccaatagactcagtagcaaaagcatacaacaaaatataaataatcgacctgtctagacgcccatacacctatccacaaggcttaccaaatgattaagaacgttcttaattgttggtgttattgaccatgatattgttgggttttatgc

SEQ ID NO: 226366 - DNA, 1683 bp, Cannabis indica
atgaatgaagttttgaaaatggttgggggccatggccctataacttaatatatacctccgtccctagatatgcatcctcatgcatcttatttcaaattctaaccatatatgtaagcaaaaaaaactgtattatgaaagagaaaaataaagtttgcatgtattatccaatatatatatgagataagttgaggaatacctccattttgtatctattaataaaaaatacctttatactatattttattaaaatatacacttttatgagtgggttgcccaatatacccttactctctacttaagtttaaaatataatttacatcaattaacctaaagggtttaattgagacattatttataaattaaagtgagtatattttaaagaatataaaaatgaaggtaaaaattaaaacaaataaagtaaagtagatatacaatgtaattttctttataatatattataactagggccggccctaggcataggtgggctaggcccgtgcctagggcccacactttttaggggcccgaaataaaaaaaaaatcattaggctttattaaagtaaaattaagtgtaatttaaacgataaatattcatagcttaattggttgaggtgtatgacatattatgcaatgttgtgttcgaatcccataacactctttttttaatattttttgtatatatatttgagggcccaaaattttaattcgctttaggcccatatattctcagggccgaccctaattataactatattatggtgtggtgtgcatgctctttttaagaaaaaaaaattatattatgtgaaatacagctgggtaataaataattctaatgaataattagttattaaagttaactactaagggccagtttgatacagttgtgctgtgggaaaaaataactgtagttgtgctatgagaaaaagcagttgcagcaaaactgtagaaaaaagctgagttcagtgtttgataaattataaattttaaagtactgtgagttattaagatctattataatgataatgttataatctagtttattataatgacaaatatgtaaaaaaacttaattattttatataatattttattttttatatatttttttattttttttgaaaatataaatttatatgcatctgataaaataatttgtagtatttttatattatattgtattaaatataaaaaaaaattaaaaactcaagtacataaaaaaaattctagattgatgttatttgttaatattaaaataaaatataaattatttttttaaaaaataataaatttaataattatttattttattataattaatttattactttaaatattttatttttttaatatataataaagtgaatatagttttagtaaaataaaattattataattttttaatcaaagcagttttttttaaaagttgagttggagcagctttagcttttagctgtagcttctctaaaaattcttcaaaaattgtttttatattgcttaccaaacacatttttatcataactttttcaaaaaataacttttagctttttcaaaaactgtaccaaacgggccctaaacaaataatgatatacttattttagaacattatatttacacttaccctaacattaaaaaaataatgaacttaaataaaattttaaaaatttaattcttaatatcttttta

SEQ ID NO: 226367 - DNA, 1732 bp, Cannabis indica
catggtgcatctgaaacacaacatctttaacctcttcatctccaataggccaaagaaggaactcattatgctcatcacgacagtaatccagaacctcatcccatcgagtagactcaacagtaaataacttagtgtaaaagtcgaccatcacattgtccaacccaatgcctcatgttcccatccgcatcttttaagcaaaaaatctgattattacgtcttctagttgatgcttttgagtgaaaaacttgctattttgatctccctcttttaaccaaagttgttttgatctttgtctccaaaacacttctctttgattaagcacagcaaaaagctccttcttagcatcataaaaaagtttcttcccctcttcatctcttctacttttaaaccgcttaagctcctgattacaatgtttgatacgctttgaaaaacttccaaaaacatcttttccccactgccgcaacagtcgaccacactcgtaaatttgttcctcaataccgtgccccaccaacctatcccagcaatcccgaatatttataattattttttaaaattaaaattacgtcgaccactaaaaatttgccacgtgtacaagtgtgtacacgtggacagtccaccatggcacttaactgtgatttttggacggaggtgtgcagagcaaaacggaaccagggtttatgtagtttagccgccaaaattttggtttttgtggttaaatgttacaaactgtaaagttcaggtggtttagccgccactaattatttttttattaatattaaagttaaaagaataagataattagattttgaacaattaatttgtatgtttgtagttgtaaaatgtagaataatatatttatagaataaattggattattttttttttgtaaaaaaaaaaaagttcagttttggcggtttaaaccgaccaaacggaggttcaaaacggtcggttttgagataggttctggattggtcggtcgatttttagattgcaccaatccaaactgaaaatcgaattttggattttatatagaaaaaaaccgaccaaaccgaccgatgctcaaccctagcgacggcgacggtggaaattccactaaagccatgaatcactcacaataaccatacgaaacccgctacactcgcaataatggttaagcgttttacacaataaatttttaaacattttgaagagtatgttagttgttgttttttttttttttttgtcgaataagcaggagtttctagtgagatctagatttttacgtttatatcgatggtttatcgatattatatcgatgttttattcgatgataagtgtaaggttaggggtaggactcttatcaacaattttcgtatggtatattgtatagtttctcgtatgatttcctatggcgtgtgtaattttttattctagtttctttatcgtatgttttactactcttcaaactcacttcccttaagtcacacagaagaaaatactcatactactaattaagtcgtataagttcattacgatatattaacgtactatatatatatatatatataaaaatatgtatatatggtgagtgtaattgcgtacacacttaattaagtgcccttagtaagagagcttatttattacgaacaaacacacacatatcatagtacattaattgattattcatgattaggactggactttataacaagtctagcttattaggtataacaacaacagtagtagtaatata

SEQ ID NO: 226368 - DNA, 1471 bp, Cannabis indica
atactagttatagttattaattttgtaagtctcaagccatttgatgtgcaagtctcataaattttattaaaataatattttagaatacctaaggatgaataaaatatcacataaattatgttaatatctttaataaagaaaagagactttctctggtttttctctctagcagctgaagctggtgccatggcaaaaactaggtcgaaacaccaagggaagtcgaagaactcatttgtgaagcaaaaaaaagaagggaccaaactctgtatctgatgtaatacgtacgaaatcgatggaagctgtattaggtattactcctctggagttatctgatgaagatgatgaacctgatgcgattcaagatcgaacctcccctgcggttcaggatttccaagagctgttatcgccgagggcatctttgagggaaataagacaagctgaagatgcgagatcggatttcctacactttgttcaagctaataatcaatgtaacagtaacgctactcaaggttagctctcaattccccctattctcagatctggctctgttattaggaatttggatcaatcttttcaacaaattaagagcctgccaaagtcaaaattgaattggaagacattgaagaggagattacttactagaacccttcaattgtttgctatgtattgggttcaaatccccctctacatatcttagatggatttgctaatagaatatggaaggagaaggtaaataaagtcaaattgctcactcatgggttatttctcattcggtttcattcagtagaaattagggatgagattttgaatgggggatttattttcttcaataagaggccagtaatcatgaaaccttgggatccaaacaccaactttagaagagaggatgtgaaacaggtccctatttgggtgcagcttgaagagcttaagcttaagtattggggccaaaaatctctttttaagatagttggacaggtagggaaaccaatcatggtggatagtgtgacaaaagcaagggaaagattgaattatccgagagtgctaatcgaagtacaaatgaaccaacctctccccggtatgttagattttgaggatgaattcgggatgaatgttagtgtgggtataaactatgaatggaagccaataatatgctcaaattgcaaagaacaataagtccaagcaggagtggattattaaggaagacaagaggccacaaaaaccgactgctgttattgatgcagaaggttttcaaactgttcaaaaaggcaagaagattaaggagcagggacagtcctcagttaccaagattggaaatggatttcaggttctttcggagtgtgcagacatggagataatagctgatgaagcagaactgaaggagcagaataatgactatgatattgctaatacaagagagggggggaaccctctcttggtaatggataaggtcatagtttggaatgttcgggga

SEQ ID NO: 226369 - DNA, 2073 bp, Cannabis indica
tattaggattgggcttatattgggtttatttttgggctgtttaggtttttaccactttgtataaataccattttttcccttttttattgagtaaagagaaatataccaatttttaatatcctaatatggtatcagataaaattgtctattctctctcattctaaacccatcaccttcatcaaaccctaaccctaaccctagccatggttcagacaagaggtcgttcatgccggcggtcgccaatgccgtcgacctcccttctctggttgaagcttctcatcaggttcctcgtgcgactccacctctgacgatcgtgccgcctcctgaaggtccgtcttcaacagctccacctcattcgatgatcgcaccagtcgacggttccgtcgatgcttctcattcaccgtttgcttctctgccacctgagatcttgaccgaagacgctactccgaccattctgctgccaacttcgcgtccccctagactttatttttcattgccgatccctacgacggctcttccaacggggttcgcaccagtctcctcgctcctctatggttttccagcaccgcctcctgtggctccgatggcttccccttcttttccacctgattttggtttctttgacactccttgggtaaatcttgatcgaccttccattgatgaacgcaatccgtatcatcttggaattggagacaacccaaattttctcattgttcccttccaattgactggccaagacaatttctggtcatggaagcgcgctgccacgatcaacctggctgccaagaataaaactccatttatcgaaggtactcttcctcatcctccagttaatcatccttatcgatctgcttgggatcaatgcaatagtatggttatggcttggatattgcgcatatgtctcacgtgaaaatgcagcgagtattatgtttaaagattcggcccttgctatgtggaataacctccacgatctgttcaaccaaagtaacatccctcaaatctttcatctcaagacctctttaactcgcatcaaacaaggtgccaactccgtcaccacctattttactcatctgcaatcgctatgggacgagctcaatgagtttcaaccgttcacgccatgttcttgtggctgtacttgtggtgcgatgcaacaaattcaagatcactattctcgtgatcaaatcttgcagtttcttacgggtctcaatgactcctatgctggtgctcgtgatcaaatcttgatgtttgagccacttcctccgctatccagggttttttccatgatagtttagcaagagcatcaacgctctcttgctcctccgaatgctatggctgctgccgcttcttcaagcctccctcctccatcccaaaacaacagcggcaatccttctcggagcaagaaacctcgccctacttgttctcactgcctcaaacctggacatttggttgagaaatgttactttctccatggttttcccccctgactatggtgacaaacgcaagcaagattctgccaagtccaactaagcttcgactaccattgttacgggacaagacaccacttcacagctacaactcagccgaccattgatccaacttttgagtcagcaactccagcagccttctacttctagtgatgccgctgcgggtgcctctaatgggtttggtaaccctaatttttactctattttttagattgttgatagtggtgctactcaccacatacgcaataacattagatgctttactgactttgatcataatattattgcttctttagtcactttgcctaatggccaacaaattaaagtcaccacctctggtgtggttcagcttaacagagatattaggttgaaaaatattctctttattcctgaatttaggttcaatttattttcagtgaatgagtttttagaaaataacactaacttgctgttgttttctgaatctcgttgtgtcattcaggacccctctcggaatttgacgattgagacagctaagaaagttgggaagctcttcttctttgagcaagaaattcgctttttttacttttgatgatttgatttcagcaaa

SEQ ID NO: 226370 - DNA, 2682 bp, Cannabis indica
atgattacaataaaaatgtaaccattgaatagtcacccacatatatataagtgatgacattgtcatcattaatgttttatataattaaacaaaaaatttgtcagtggcaacactttatcagtactgatagtggcgtcaataatacatactattcttgtagtgaatagtgcttgtcaaaagcgtggccaagtgagatgagatggaggagaaagaagaacagttatgtgatggtttacccgaaaagtgaccctacaatgtggcaagtataggaagacatttacagagttgatcttgagtcatagcagttgacctaagggtccctagctctacgccaaggttgacttcaggaaccctagaattggtgtttggatcctcgaaagttatttctaactccccatccttcagtattttgaattaaaaaggcaagaagaatccaagtgtaagccctaaaaactaaaaagagaagaaacaacatcccggaagtcaacctgaccgcctagggttttgatatggaatccctatcaaaattaatttgaacagtagaaacaagagtagagaagctgagatagcaatggctgaaagcctttcaataatttctaggatttcgagagcctggttctatccctcgatggttacaataactactaaatgtcttcacaccccaaaagaataattccccaacattttattaaattaaaccgagtgtaagcaaatgcaaccacactctaacacaactcctgaactaactaattccagctcacattaatttcttatggtgcacctcacaatacctctcttgttcattcgaatagacaaaagtaatttggaggtctatccataccccctacaagtttcaccttattctcaaggtgcaaatgaggaaattggtcctgaatgattgagaaatcttcccaagtatcttcaaaaggaggtagaatttcccacttgatgagtgcctgtggagctatcttatgtgacccaagaagaacgtctaacacctccttaggagtaagtagccactctatatcatccatgaggcatggaggaaggacccaagcttgcaagtgtgttcccaagacagcccgcaggagggagacatggaagataccatgaatggaagactttggaaggagttgaagataataggcagccgagccaatgcgctctagaacaagaaagggactaaagaatcggggaccaagctttccattgagatgtcgggccactgtgcattggcaatgaggtcttaatttggcatagaccaaatctccaatggaaaaaacttacatctctttgctttctattagcttgggacttcatcttttgttgagctcattggaggttttctttcagcaaaaccaaggtaacatcccttgcttgaagttgttgctcgacttctgaaactttggtggttccattttcaaatcaaagaagtggtggaggatcacgattagacaaggacttggaaggaatcatcccaaccgacacatgataggaagtattgtaccaatattctgcccaggccaaccacttaagccacttgctgggtttgacaccaacaaagaatcttaagtatgttttaggtagcagttgacctcaaaaaataattaactgacagcaaagtcatgcagatctaatgcttgccacgtgtgtgtacaaataagaataaaaagcaacatataataggatttgttatagaggttcgacccccttgtgatagtggtaatgacctactccctttttaaccgagagaattactgtccttatcgctataggtgagatcttcatagtacccttaggattacaatgtatgaattaatgtttggcagaactaaagtgttggacaacctagggtaggcctgtcagagaaagaatgaggaagagagagagagtttgtcaaatgcttagagtttgagatcacgtttgtagcttagaggcaacttaggtttttagacagaggttaaggcttttatataggaggccttaaatactaggtttacaattaaaatcccttagcaattgtatagttagttagatatttacatatgaccaaagtgtccttaattctagatattattcagccattcaactaggcttttagggcccaattcgcatcccattactattggccatgtgtggaagtgtccatcaaggcctacaaagcacttcttagctggctaggcccctatggtggccaggctggctggacatggtggtgtcccttagctggctggccatagggccggccaggggtggtcggccagctcctgagagggagctggtctgtcacttgatccctatttgagtgtcggggtcttcatttgctcaggtgttgacttggcttttcttttagtgagctgagcttccatgtggcactcgttctgtccacgtaggcatgccacatcatgaggaaagaaattaagttaacatttgccccaagtccctgtgtcgacatctgtatggatagggactttaccagctatattgatgttgtcgggactgttgttgcctttgctgaataaaagttgatatgtttgttgaagcactctgtcttgactgtctaatctcattgcaatagagaaataactgctttaattgcctttatgatgtgttggtgaggtaagtgagaaaaaaggggcccaaatgtaatacataagagacattgggggagaagacattttt

SEQ ID NO: 226371 - DNA, 1409 bp, Cannabis indica
ttaataaaatgtatttagagcaatgaatattattttataaatgtagagtataaataataaattttaaaaaagctttaaaataaataaagagtttaaagcaaacttctctattttatattattagaattatattttaatatttttatttattttaaatattatcttaccattaatataatatttatatgtatttattataatataaaaggatggagagaaacaaataataaaatataatttagctcataaatagtatgagctaaatctagatgtgatttgagataaaatatatgtattttaaagtacctcatgggagagcttttttttttaagttttttgctatattttataaatttagctattataccttcatatgtggatgcttaaatgaatttgtgaagaatgcatggctaggtgaaatataatagaattaagtgaattaattaattaattattactacctgtatcttgaaaccaattgaaaaaggaaaatggccatttcgagctttgcaaagtcagctcccacacaaagcctggcaccgccaccaaaggccatgaaagtcttggatcctacgtgtaaatcttttccctgtgtgtgttattttccaacaaatattaatttttattaattaatttgaacaaattttagtgtataaaaaagaaattaattatattattatataggtaacctgccatcgccagggattaaatttaagagggtcatcataaatatcgccactcaaatgagccactgatggaacaaccataactaaccaatttgccggaattgtatatcctgtaataaattaactttcacacaatcaatgtcactctcaaccaatttaatacaaacataataatcttttatgtaacttatacttaattgttacacatttataaattccgtataaataaattgaaaataatataaaacagtcaacggccaccaaaaatttatgcatgttgtttaataagtacatgcacatgacaatataattcataatataaatttatgggtgattaatttttcattttctctttaatttatttagggttttcatttagaacgtcgtattaagtcgtatcgtattaaattagattatatattatatttttatataatattatgttaaattttagtttatactaaaatattatatatttaggtgtaaataaaaattaatatcacacgtagttttacataaaaatatcgtataaaatataatataatataatatgacttaatatggcgttctaaacgagctgttaaggaataatttttcagaaattaattgatccacttgccttttatctgaacatcattcacaacttttctaaagattcctggaacaatatttgctagcctgactacttcattgataacctgtacaaatgaataacccataaat

SEQ ID NO: 226372 - DNA, 1270 bp, Cannabis indica
cttagaattgatattgaattgatatatggtccaatatatatatatatatgatatgacttatattaagataataacaatatatttacttatttatatataaagtaatatccgtccagtccaacgtaacaaatacatatgatcttatctattttgctaatattctagtaagaacataatacttgacaagtgtaagtagatgatattatagattagcaagtcggcatagaccctatgttttgcatgactatgttaggactacttatttgaatatatattataactacatttcactgtgatcacatcattataattatgacattgttaattatgaaaataaatatgtaaacaataaatttaattaattaaattaatttatatttatcttatcgataaataataatatataagaaatactagcttttatataggcataaaacttaacagtttcatttacactcttaatttgtgcttcgaagtaattgtataattactaaataatataattattagaataataattacactctatttaaaatatatagtgtgtttggatgctgattagtaactacatatgaactacatatgaatgcttattttcatgtaatttgacaaactagtcaggctgtaattggttaactactaagtcatgtaattactaaggtagtaattacactatattttaaaatacaagatgtgtgtggacataagatagtaattattagaagttgttttgtcaggatctagatttattaacatgtatgtttgattataatctacaatctaacatctttaaatatgaatttttcgaaacaatgaaataaatacataaaagtttatagaaaaacttacattggtggcagcggaatattatgactcatttcgttcagatctctaatccttgatcctttctgttgcagagtatgatcaagatctgaatttagattctccttcagttgacagcatgaactacacaatatttttttcactatgctaggtattactttgacatgtgtgggtgtattctcaatcactataggcttcgacttattgagaagaagaagaagaagaagaaattcaaaaatagaagaggctctttattttataatttgtctgacaaagagtcgatcaattggtttatgaaaataagagctataattttctatttacatgataggtattagggttaggtttagaatttaaaatggaataaaaaaagataaaataaactttaattgaaaccttatggttgaattcccttgtgggcctcttg

SEQ ID NO: 226373 - DNA, 876 bp, Cannabis indica
gaagctgctaccacatcttgggctatttggaagggtagaaacgagttattatggcaagccaagtctaactctgccgttgctgccgtttatattgctaagtttatgatgcagcaatggaaacatgctcgtgaatgtcgatttgatcctctttgggtccctgctggtgctgtcaatggcgatgtgcactgggctaaaccaacagctgatttcgttaaaatcaatgtcgatggtgcgcttttgttgttgagggtgctattggtggtggtgttcttgcccgagattctgctggccacatcattgaaggttttgccacatataggattggtactccactgccgattcttgctaaaatcatgtgcatcaaagaagctttaagttaggtggcggttaagcaataaagcaatgttattgtggagttggactgtctaacttcagtccaagctcttaatggtttaatacaaatgccttctctatttggtttactagttcatgagtgcaagttattattaaactcctttgttaatgttggttgtgcttttgtatctcgatctgcgagcgaacagagttgcctattttattgctcgcagctctcgttctttgtcaggttgttagattaatgctagtaatgcttcggcatcactactcgacatttttatggctaatttagtttgaataaagattatttttctcaaaataataataattaggtttagagttcaactataaacttaataaaaattaaaaaatgagaaaattaagaagacaacaaataatactaattagagagattttagagtgtcatgtcactaccttgtatggcttgaagtttttatttataaacatacggttttaaagttttaaaactacaaaatacac

SEQ ID NO: 226374 - DNA, 2238 bp, Cannabis indica
ggttaaattgaggacttgtgctctgcttcttgcatatgtgtgactattgagtctgcaaatttttaacatggacaacgtttttgatgctctgccccagatatttgggattccaaaggaacacaggaagtctaagccgtatcatgatcatgtctttggattctccatcgctgatgatcacatttggttccgtaattatcaggtgggttaccatttaaactttgaaatttttgggactactgtttcggtttttaaattgccttagacaaaatttatattctcacgttgctttcagatatcagttccccataatgaatcagacaaaatagctagaaggggtttggaaaacatgacccttgtcgaggttggtccacggttttgcttgaatccaatcaaaatatttggtggcagcattggaggaccaacactatatgaaaatccattttacatatcaccgaaccaggttggttgatgagttcatccaagttttatgaaatctagttctcatgttacttcatcttgggcttgagaacatgttgtgactaaaatagacgattctaaaacattaaaatttcatttgactgtttgttatggttttagattcgggctatggacaaacggaaaaaggccggaaagtatgctaagaaagtcaaagcaaagacgagaagaaagatgcacgagcaagaaaatccattggaggctgatgaattttccggtatgtggagggagtgatatatttgtgttgaatggaaacagaggttggaagccatgttgtatcttttctaaaatgcctactttggtcaactgttttgggatggtttcattgaaaattttgtgtccctgctggattagctctactcatttatgagaaaacaattttgtcgatggacttggtgtttttttatgcattaattagatgaatgttgaactggttgtgtgttaatatcacacacaaatactaatatatttttagggaagttgacagcataaatacttaataaatttatttgtacttaaatttatgttttgcacttaaatatctaattttttaattttaatgatataaatatttgatttttgaagcataaaattagatgaatattggcatttaaaatatttaagtcgcttaaaattattaaaaagtaaaaaataattagcatttttaatatatttttaccttttgttaggtttttcttatcgttaaacaaaataatcttaaagaatttttttatttatgcatttcatttcaaagcaggatgaaaatgcaatttaaattgtaacctaattcaaagagtaattcacataacaatttaagcagtaactaatggagtagttcaaatggtaaaaataaaaataaaaaataaagaaaatagtacatgaagtgattcttttaattttaatattataatattcacttaattttttaaaaatttaataaaaataattaaaaatttaataaaaattttaaattaattaaaatatattaaatttacttagaaaaaacttaaattatttattaaaacaatattttcaaactttattttatttttaaatatttatattaaaaaatcaaactaaaattattataatctaataaataatttaatcaaattattatttttttttaaagaaaaacaatagaaaagttaataaagaataatattaaacccttgtagcatgattaaagtaattaaaataccaatttaatcaatttgtgtaaaaaatcaaacttatttatatttataaactcatatctaaaaaatatttaaaattcaataaaaatataaaattattttgtaaaaaaattagaaattaaactaaaagaggttatgtttacttaaacaaatttagaattttggaggaaaaaaaaaatagactcaagtttgttcccgtaaaatttagtttttacaacaattaaaattttaatatatttttcttaaatctaaatgatttttttcataataaataaataattttttacattgcttaattagttttaaattttaaatttcttttttaattttcttaatcattaaaaataattttttttaatatctaaattaatttatttagatttactaaagaaaaatatcgaatctttcccatttttatttgagtaggtacaatttgatagttgttaaagtttagggacaaaattactaattaacaaatacgtcagcttttaaacagaataataggatgtaacctatcataaagactaaatttatttaaatgtaaaag

SEQ ID NO: 226375 - DNA, 1039 bp, Cannabis indica
ttgtatatattttatatcatattgtcatattgcttgttactaatgttgataaaataggagaaaagatgcaatacagttttattatggatgcactttaataatatcactatgatctctttattgactagctagttttagatgtaagcattttatgaatggaatccaactctcaacatgcttgatgtattattaaccaaataaaaaataataaagatcttgcttcaattattcttccatgtcctccaatgggtctaacataaatacactttaaaacaaaaattaaataaagaataattacttttacacggagcatgttatgtgcacaattatagtatatacttaagataatacaataatccttgaatgtggcagaagcgcgtggcaattggtcaccaagaatgccattagaaataagaaagtacaaatatttttcttcttcttctctagctataaccggatacttacgtggaaaataaaatatatttctaatacttattggaaaaaattgaaggacataagatgtattatgcatttttttttaccatttggatagttttaattatataataatatacatggtttttttttgttttttttctaaaaaaattataacgtttgttagattaataaaattaaatctcatggtcattacataaaatattttctagtattgatgacacttcaatcaaatcagaaaagttgtttgcatacacttatttagtcacgttatgggccgcaaaattacagcaccgagaaatcttaacaaaatgacatcccaataaaagtttagaaatagaaatactcctactaatatagctatcaatctcccatcttggtgaacttcctctaaaagcgttgatggtgatttttcgaatcactttcaattatcacaaaattgtagaccaaagctattgaagtctctagaacaagtaaacaagcagcttcttcaccaatgagggggtctaaaactagaaaaattgttgacagctatccacacaaacgagcctagatagtcacaagccacagttgtcacacacat

SEQ ID NO: 226376 - DNA, 1771 bp, Cannabis indica
tatatatatatatataaacagaataatgatcccagaaaagggttcaaaaataagcagataacacaccaataaacaaaacccaaaagagaaaaggcaaaataactcgaacggaaagaaaaaaactgaaacttacagagtagataggcaacaatggcgattagaacgaatacaaaggtgaccagtcaaacccactgtgtgtatatataatagcttatttttctaataatagcggaaaattaggattaaaaagctaaacaaattaatttaatttaatttaattattaaataaaataaatatatgtttgctaaacaaatgtgataacgtcgtactacacgtggggcaaccaaacgaggacaagtgtctctcggatatgaatttacctttttaactcattagctttaggcgtagtttgtttttgtagaggataatgaagaggggtatataagacatttgactccaaacgtatcttgaatgggataatatgataaagtcaccagttgttacaattattatttatagttatagatacggtttggcttccaaaatataaaaaatctttaataattgtcactctaccaatagtaagcgatatcgatgaaggtattagatactagtgccttttaataatttttatataaaaattttgttatatttcacataatatatttataatgcactatttaaaaaaagtttaactatgcatctcaacttattttagtattgttgacgttaaaaaatagtcaaattcgtatcatctgataagcgatagctgtaaacagaaaaaataataagtaaagagagaataccacaatttatagtagtttactttttatatcgtgatgataatgaagttacatctacttagagcttttattatcacaaaataattatcttataagagaactcaagaaaaaataattaagtctagctttacttcacaatttctaaaagagagaaagtgtgaagaagcagaagctatgaccttgtagagagaatggaaagtgtgaataatgagctagaagagctctccttttatagggaatgatgtccaattaaattaaaataaaataatagaaaaatcgcactaaattagcagagaaatcttgcacgagatcgcaagtaaatttcgaggtcctaatcgtctgaattgcggtgagggtgtgagacgcactagatctgtcttgaaaagagctttaattggccacttgaatcgcattatttggacaaaaattgagagaattatggccatttactgagtagtgtgcacaactaaaaggggattgggagatcaggctaacttttgggcgcccacgttgacgtaaacgttaatctatgcacccataacttggtttcttgggatttaggcatattttgagatgcttgaatgatgctatagctatccttttgaccttggggaagttattttggagattatgcacgagtgatgcccgatgaatcactagtgacggctaggtgacagttgggtgatcactaatgcacgtggatgtcgatggacttgcgtatgacacgtgtacatgagatattgacttacaggagcattcaaatcttattttgggggcaaaagaagactaatgcccagagcagaactattgtttgaaggacaaaacactgagccccaggccaatgtcaacctggacgcctagtgtgcttgcacactggcgcccggtaatgcctgagggataactcgctactcgaacggaattttctcttaattctaagtctcatatctgtttttggtagaaaaacaag

SEQ ID NO: 226377 - DNA, 1778 bp, Cannabis indica
gtactctgacactcatttaatcgtaccccgagacccatctaatgtactacggaatacattaccgtaaaagtacatcacgggacaaaatcatatccgcatatttatatatcttttaattaataaatacatccatgtatatatatatatatatacatgatcagtgaatgtagtatatattcacaagaggagtgtatattaagatacgatttccatgggtatatgtgaattaatatggttaggtttttggtaatagtagtagttctatatatatatatatatttgccttttcgacaaggtgtgtagtgctctctaagttctagatcaaaatcgacagctgagcttccactaacaatatattcttaaagaagcagagctcccaaactataaattaatatgggattttctcgtgagagcccactgatgtatggcacgctcaggagcaataacctctacttcatcaaacacaaattaataatacttaaaaatcatcacaagagagagagagacaagatacaaactaataatccatctatgttgtacaaacattttctctttcattactttgataaattagcacctttatatctataaatatatatactagttaaaccacatattataaattgtaatattgcagtgttataatagtaataatatgtacaattttttaaccattcactaaaaaacaacactatttttagttataatataaattttttgtaactaaatgtaacttttagtcataacaaaaagctaattattacgaaaacgtaatatttagatacaatttgtcgttaatttacttttagtaataacaagtactatgtgactagaaccacattttaaaataaattgtgattttgtgattaatacttttagctattgactttttttaatcacaacataaaaatgataatttatcattagttacaactttttcacttttaatcacaaatttttgttgtgactaaaagcaaattttttgtagtgatttatttggtacaccatattaaattatattttattttacttatgtaaagtaagacaaagctcaaagacataaataactctttttaaacataatcttataaatgaagtatccaaaaattcatataaattaaaaaaaaaaattcaaaagtatgcacgtaattaaaatattaaagattacacgtcccaaaataattattcagaatgaatccaaaagtttcaataatttgaactttaaagattacatggaacttggcatgattctccagagggtgtccaattctgagctattatgaaggattgcttggtactagtatgcaaaacatgaagagagtattgcaatcagtgattaatctggaccctaagattactgaagtgcatagaaatattctaatggcagaatacacagaacaagaagtgaaagaagctttgttttccattcctggtatcaaagcaccaggaccagatggatttggaagtgccttctatcatgataattgggcactggtgggaacaaaaattgttgaagctatcttatcttttcttagtactgggaaaatgttgaaggaaatcaacaccaccactattactctgattcctaaagctacctgtccaaaaagtgtggctgacttcaggccaatttcttgctgcaatgtcctctacaagactgccactaaggtgatctgcaacaggttaaggaagattttgcttgatcttattgctgattttgtccatggtaggtatataatttagtacaaaatgttagatttaaagatttttttctaatttta

SEQ ID NO: 226378 - DNA, 4060 bp, Cannabis indica
ctaaccctagtggaatgctataaatagatagtgaaggcttcaggaaatttacacttaaattttctatttttccttcagagaaaaacctgagccttctctctccctatctggccgaccactccctctctctttcttccctcttgaatttcgaaattcttagtgtgagagtagtgcccacacacagcaagtgatacctcaatcatagtgaggaagatcgtgaagaaagactttcagcaagaaggagtttcagcactaaagaatcagagaaagagatccaggttcagatattgataatgctctgctacagaaaggaatcaagggctagatatctgaacggaaggagtcattatattccgctgcacccaatgtaaggtttcctaaactttatatgtgtttatttcatcgttttagaaagttcatatttagggtgttaatcaacatacttgtgagtagatctaagatcctggtaaaataatttccaacatggagctggccacacagtttatgaccgtgttcttgagggcgttcgtcgcaggttccaaagaagttgatcttctgaaaaaacagatcgctcagcttcaagagagcaacaagaagctggagcaagacgcgaatactaaagacaaagatctcgagaaccttcagaagtctaaagagcaggtagaactttaagctaagctctctcagtcgaaggtcgaagagatggctcacgacttggaatccaagaaggaaagtggaaaaagacagtatgatcaagctgtttctgactatatatacacgactttatccaaggtgccagacttcgacttctctgtccttggtgcagaggtggctgagatggcagaagattttcgtactatgtcacctacccagactcaggggtgaggaggaagtcttttcctcgaggagggagagactacggatactgaagaagttgttgatggagctgctagcaaggtcgcggatggctccactgctccaaccgctccacccgcttaaattatctaagttttatatccctagctattaaaccctttttagcggtacatgggtactcgcattttgtacttggaataaagttaagatttttcctctttcgaacaatatcctttcgaggattttttttcttttgtttttaagcggtactggtgtactcgcataattataactacttttatcttttgcaatgttcttgctattacagcttggtgtaatgacatacaaatgctaaacttgcaaaaaattaaaagtacagaaaattttagaaatcgacaatctttattataacaatcaatagtacaaaggtaggttataccccctatacttaggacatttattaaaataaattggctaagtataattacattgcgagtactattgataataacactttaagctttcaccattccaagcccttcggatcgcagtaccatcaagttctgcaagccgataggtcgcatggccaattttctcggcgatcaggtatggtccttcccaattgttaccaaaaacgccatgtgctgggtttttcgtgtttggcatgacctttcgtagaaccaaatctcctactcgctgagttcgctttttgaccttcgaattaaaatagcgagcagttcgctgctgataggtcgcattcttcatatgagcctgatcgcatttttcttctaagagatcaagttaaagcaattgtttatctgtattttcactaaggttgaaaatatctctttgtagggatcctaccccgacttcggctggtaccatggcttcgcacccatatgagagcgagaagggggtttcaccagtcgtggatcggggagttgtattatacgaccatagaacttgtggaagctctactggccatacccgtttacgctcttcaagcttcccttaatggtatgcttaattatcttatttactgcctctgtttgtccattgctttgtggataggcaactgctgaaaatgcctttttaattcccaattcatcacacagctggcgcatttccttacattcgaactgttttccattatctgagatcaacttgtaaggtatgccaaatctgcaaatgatggaattgtacaataattctcgcaacttaacagttgtcatagtcgcaagggcttttgcctcaacccacttggtaaaatagtcgattgcaactacagcgtattttactctgcccttctctttgggtaattctccaattaaatctatgccttagactgtaaaaggccagggactcgttatggagttcaattgactttgtggttgattggcatacgtggctatccgctaacatttgtcacactttttagcaaagtttgagacgtctactcgcagtgtcggccaataatacccttgccaaattatttttaaagcaagggaattacccccggtgtggttgccacagatgccaccatgcacttcgcggagtatatagtcacactcagccccatcgatacatttgagcaacggttagctgaaacttttgcgataaagcctaccatcataaatgacatattgagcagctcgatattgcagttttctggcctctactttttctctggggaggacttcttttttcaagtaattcattattggggtcatccaggtgacttccctgattgtatctacctccatcacctcgttctgactgactgttggatgagttaacacatcaacatgaattacatcgagtaactcgacttctcttgttgaggccaaacaggccaaagcatctgcatgagagttatgagcacgaggtactcgagaaacaatcactttcttgaatttctgtagcaactcgtaagttagggcgagatatctagccaaacgtcctcctctggccagatattccccgtttaactgagagacatcgatctgggaatcgctaaaagcttgtaaatactcaatcatcatctcaagagcgagtttcaatcctacaatcaaagcctcatactcgacttcattgttagatgcagaaaattcaaatctgagtgcagcatgtaccttaaaattactgggacttatgagtattatacctccccctgagccttcactgttggaggctccatcaacatacaaagtccatccttcattgtttggtacatcaagatcaattctttcttctataagtgccacctcagtacttggaaactcgagtatgaaatctgcaagggcttgtcccttgatcgcagatttaggcttatatttgatgtcgaactggctcagctctactgaccatttcaacaatctacccaaggcctctaattttgctaaaacttgcctcatagggtagtttgtcaaaacttcaatactatgggcttagaaataaggtcgcaatttcctcaatgctattactagtgcgaattccaatttctccatctgtggataacgagattcggcgtctaggagacgcttgctaacatagtacattggatactgcttaccctggtcttcgtggattaataccgaactaatcgcgtattcggacactgcgaggtaaatggataacatttctccaagcattggcttggaaagaattggggccgccccgaatgtaatttgagggcctgaaaagcttcttcacacttctcagtccactgaaacttcttattgccttttaaaatttgaaaaaactctttgcacttgtcaaaggaacgtgatataaagcgattcaaagcagcgactttacctgtaaggctttggacctcttttagtttggtcggagatcgcatttctaccaaagctttaattcttttggggtgagcttcgattcctcgctgatttaccataaacccaaggaattttcctgatccgacttcaaagacacatttaagagggttgagtcgcattttaaatcatcgcagtatttcgaactttgcttgtaagtgggtgacatggtccttcgcgtgttgagattttacgagcatattgtcaacatatacttccatggtttaaccaatcaaatctgcgaacatcatgtttaccaacctctgatatgttgctcctgcgtttatcaacccaaaaggcattaccttgtaacaatacaaacctcgatc

SEQ ID NO: 226379 - DNA, 3211 bp, Cannabis indica
acaggcaaggaagaaagcatattagaaggcaacctgaaccccgacactgacttggacccaaacccggaccaaggacccagaccgggataggagactcagacctagattggggacccaaactcaaaattagagccagaatcgagaccaaggactgagactgggaccccacacctgaccccgatctcgatcccagacccgaacccagacacgaacacggaacgagatgcaagattcgaatcaaaacgagactgggacaaaagatttggatcaggatcttgacccacgactcggggcttcgacccaacccgtagtcggtgtgtagatcttgaaatcgttccaagacccgaacctggaaccatttccagactagaacccaaacaaaaactcggacctgagacagaaattggaacaagaaccgaaagcgggacctcggaataggaattggacccggaaccaaaattggatctagacgcgaaactgaacacggacccaaactcagaccgtgatcgaaactcgaacccacaccggaacccgaatccagacttgtgccagtacctgcgacccaggacccatgacccgaaaccttgaccagaacccaaactcgtaccaaaacccagacctaaacctagtcccagacacagacgaagacccggacctagacacggactgaaacccagacccagacccaaacccacacccagacccagacccagactcatactcaaactcggactcggacctagataaggactgggacccaaacctagactaggaccgaggcctgaacctggacgaggactagaactcggactgggattgggaccgggacccgggacccaatactaagacataggacctgagaacctaaccgtgacccagacccagactaggccaagacgcgagacaaggaccagtaccgaacacgcaccgcgacttgcactcagacttggaccctaacccggacacggtcgtgtacccagaccgggaccgagacccggacccagacctagacctatgactcgatcccagaccaagactcaaacctagataaggatctggatacgaacctggactcaaacccaaacccagacccagaccgggatcgaaactcgggacctagatccagaccgagatcgtgacccagatccagagctggacccgcacttgggacccgaactcagacctggacccgaacccagacccaaactgggatctggacctaaatcttgactcagaccaagactcggaccaggacttagaccccgacctagactcagacccaaaccgaaccaagacactaaatcgaaatcgaaactaggactaggacccaaactcgaacatggaccaagaccgagacctaggactcggaccttgacttgggccttggaaccccgacctagattggaacacaggagtcggacccatacctggagcaggactcaaacagagatctggacccaagtcaagatcggaactctgacccagactcggactaggacttgaaccccgatcgggtcctggactcggagcgggacctaggactctaacctagattggggacttggacctaggacacgggcatcaaaactgggacagagacccagagtcctaccccagagtcctaccccagagtcgaaccaggacctgggacccgaagtggaactagactgggacccgagaccgtgatccacatctacacttggggcttggacctgacccgtagtcagtgtttggatctaggacccatacccagactcaaactcaaacccagactcggacccagacccagacccagacttgtaccccaaacttgggtccgagtccgagtttgggtttgagttcgagaactggaatctgacaacgacctagacccaaaccggattgggacgcggacttaaatcaaaactcggatcgggactcaggacacgaacgcgaacggagacacagacttggaccttgacccagactgggattggagactcaaacctagacccaggacccagacctagattggggaccaggactcaaaattagaacaacaatttggacccaggactgggactgggacccaagacctaaccccagtctcgatcccagacccggacccagacacggacatagaccgggacctaagatccgaattaaaatgagattgggacccgagattgggatctgaatcttgactaacgaccccaggctcggatccaacccgtactcggtgtctggatcttgaaatcataccgagacccgaacttggaaccatttccagaccaggacctaaaccctgactcgaacccaagacctaaaatcagaacaagaaccagaatcagtacccttgaataggaattggacctagaccaaaaactggatctagacacagaaccgaacacagacctatacccagaccgggatcaataccaagacccaggcccaaacccagacccagacttgtgccaagacttgtgacttagaacccgtgactcgagacctggaccagaacctagaaccgtacaagaactcaaacccagacccagacctagaccaagagccagaccaagacacagactgaaactcgaactcaaacccaaacccagacctagacccggaccaaaacctgcaagagtactataactcgtactcaaacccatgactgggaaccggactgagatcaggacttggacccaaacccggactaggaccgagacctgaacctagactaggacaagaactcagattgggactgggactgggacctgggacctaggacccaatactcagacctgggacctgagaaccgaaccgtgacctagaccaagaataggcaaagacccgagacaaggaccattactgaacacagaccaggacctacacgcggactgggaccctaaccaagatcgagaactaccactttgacttgaatcggggaccaagacccatgacttagaaaccctaaaccctaaaccctaacatggacacgggcctagaccaatacccataccgagattggaacccaagacccagacccagacccggatacaaacccaaacctagacctaaactcaagacctaaacccggacccaaacccagaccagaaccttgtctgggatctataccttgaatgggacccggatcgtgtccccgacccagccccgaatatggacttggactcagatcgagacccggacccagactcaaacttgaacccatact

SEQ ID NO: 226380 - DNA, 1261 bp, Cannabis indica
tttttttttaggataattgtaatttgctgatgaaatattttaatttgttgaacaaaataaaatttgacttttcctttttaagtaaatatattcacacaatgatccataccatatatatcaaataaaataaccatagagctgactttctttctctaatatcatttatgacatgatataaaacaaaattgtgctaaataatgttttttgtttttaatcaaaataaatatgagtgttcaaaagcaacataaatcatgactaaatttaatcttaaaaataataaacaaaagttaagccaatcataaaataataagtatatgcatgtattttgcaaggttgaatatggcataaaatataccattaaaagaaaagaagaagaaaaaaaaaaagaatatgccatgcataagtatcccatattactattatataattcggttaatgttgtctcttactctaacccacaaatattgttttggcatttcctaaatttcaattataaattttagaataatagaacttttgcccctaaactatgatatttgtataattttgcccctagaacttctcttcgttgcaaacgcacccccctcctctgaactatgaaaattgttgcaaatatccccccttcaaggtataatttgctcattttttaaaacagtttacttatgtagctataagttacaagtataattgcaatcgaaaggcttatttaataactttaaattacttaaaattcagttattgaccttaaacatacaaacaatatcgtggtctctaagaatgcatatacatacttgcataatttatcattaaataattatttacgtatttattttttgtctgcacttctgaattggactagattaattttatattagtattgtattaacaaattatttaaataaatgaccaaaatgcaactacagggaatatcaaataaaaactattaaaaccaaaaagaactaaatatacatttttcaaaaaaaaaatgtaaaattgcccattgactttggtatctttcctcaaataatatttttgtaatgtaattttaattaatagaactatttggagtgatctaaaaagaaacatagttgaaagttgaaacaatattcatgttataatagataacttctataaatcttttgtgttattttctcatcattctttatattttgattggagataattatataaaacactaatttttgtaaaaaaaaaattacatttttacgtttaatttgtttttatatttttatggtattct

SEQ ID NO: 226381 - DNA, 2522 bp, Cannabis indica
ttaattattgggtttatttgttaacgtgagatcaaacaaatcgttaaatttaacagaatattcttttacttttaagtatattctgttaaaccaagaaatgccgttagatataaatttttaatatataaagatatatatatatatatattatagcagtgggagagcccccaatatgcaagatgcaaggggtgggctcctatataattttcatctttttaataacttctaattcatatatagggggcttttttttctaaaaaaaaggtcatgtttatttacaagttataaatggtaacccaataaataagatttcataaatgtatagttttttttagagtttcaagggaacatgacttatctttcggtaattagttatattttaatttttttttttaatgaaagtaaattttcattaaccggcacaatattatacaattcagaacttaactgataatcctgaaaagtatgacctggggaaaaacaagagctacgcgccaaacaatgggcggctttgttcacagattgttcaacaaactgaatagcaacatgactcaaagaagataaaacaattttgcaatcattaactaataaactaaactcagaaggcatatgtaactcactctggatagcctaaacacagaccagactatcagtttccagtagaatattttgccaattatgacgctggatccagcttaaggcttccttgatcccgataatttctgcaatctttggcctaaccattcccctcctgctagtagtgaaggccttgagaacttgaccagcatggttacgggctaagcaactatgaactccttcttcatgtcttgtccttcatgaatgcgagttcagcgaactgcaatgctgttgttgttccccttgaaccgtcctgggtctggccatctcgccgactggttcgtctagaagacattaagctagcacgtcagacttgcctgtctacttgagggaaggtgtgaatcctgtcttctgtgaacaacaatcgcgtaataattctcgctgttattgtcgggtttggctagcccatttccaatccgggcttgggttgttagtttgctagaacagggctttcatcccaaaacggctaacatcattaaatagagcaccgtcaacattgaccttgatctgatcagaaactggtgtagtccaatgcacacgcgaagacagtcctatcgaactgttagacaacgaaattgtcgtccgtgactgtgcaaaacgaaaatgatcaaggagtgatcttgccgacaaaaccactgatgcagcaatagaagatttttgttgtcaaacaacctcattacgggccttctaaatactccatgcaaccatcgccacttcctccaatgcttgagaattgatccttgccgaaagagcttgaaaccaagagccaaaactattagctgaccaactaaaaatactaaccaaagatctattccaacaggctcgagcaaaagagaacccactagagcatgaaaaataaattccttagcctcgtgacatactagacaaatggggctaataaccacatgacgcttgagaagttgcaaacaagttgggaggatacccgaagctgctctccaaataaagttactaacctttggaggaatctttaatgtccactttttcctctaaaaactagtgttgtcatcgtccacccaatcatatttgagattttccaagaaacgatacgcactttttacgataaacagaccactattctcgaaactccaagaccagcaatctctatgattgtttgagctcagctgtatagatgtaataagagcactgtcacgagcagagaacaagtcatgtatgatttccatgtcccacaccttatcatccaaacgaaagagactgtgaactgttttgtcttgtaacccaggatggtctgaatgcacatacggatctacagggcaaggtaaccaaggatcatgtaaaatggagatcgtagaaccatctcccaccatccttcgagcacccgctcaaaaaatagcctgcgcctcatgcacactcttccaaacaaaactgggattattacccaagctagcatccaaaaacgttccatttgggtagtaacgagccttaaacacctttccaatcaaagaagattcatttgtaaggagccgccacccttgctttcccagtagagataaattaaaatcatgaaggcttctgaagcccagtccacccgcatgtttgtgtctacacatgcgcccccagctcatccaactaatactcgttgtagtcgaagagcctgttttccaccagaatttacccataataccttctaaatccttacaggtttctaccggtagcagaaagacactcattgcatagctaagaatagcttatgcaaccgtttttagaaggacctccttccctgcacgagagagtaaacgaccttcccacccttgaatacgcttttgtaatttgtccttaagaaaacctaaaatggcagtcttctttcggcccataatattcggcgacccagataggtggtgttatca

SEQ ID NO: 226382 - DNA, 2417 bp, Cannabis indica
gcatcgataatacccaaaagtataattgaccacaataatactcttaactagtactatactcggactgctaaactgtaactatgctcataccgctatgatagcgccaattaatactttcttgaattgaatatcagtcaaatccagtactattctcgtactgctgacccgacacgtagttgtgccactatgatatcaaatttataactttatgcaatttacatacatacacatattaacatatataatatgttttatgctagtcttaccttgttcccgaattcaagtgagtcgaccgacctgaatggaaaacctcgtgctggatagatgccctaagtcacatttatgttaataggtaaataacacaccgaaaacctaatttggaaaatccaaactcactactaagggttctactatcagtagttcttataataacaccctaattatcgaggaaataaccaaataagactctgaaaataacagaaccgataaatcgaacatttcgggaaacctgcccctaatctggttaaccagttttacagggcttgtaaaatcggttaaccggtttacaccaggtaacccaaacaaattcgaaaccttacccaattcgtatccaaacttccctaattcttccagttcacctgaaatagcaaccaactaatggaattgaatcttgggagcacatagataattaaaagcaagatggttgatcataaaaggttgtttaaaagggtttacgtatgccttaaagcttgatatgatggttgtttcttaaaagggtatttcaaagatatgatgttggctgctattggtattgatgctgataactctatgtttcttattacatatgatgtatgtgaaaaagagaatgcagatactgttagttttatagtactaaattaggtacgcagtggaagagtttcgtattatctgattatcattgtaccatagcctaatggattttcagatgtgtgtacattaaatcaaaacataaaataataagtttatcacatataccgcttgatgactatcagggtatcctcgaaacttctcgtatgttgtatcctttaactcaagatgatgagaatgatgtaattaaactcacaccagtgtcttctaaattaatctaccacatacaaggaatagtggggcctattaagataaattgtataatgatgttcttgttgagttctcaacacgagcaaaaacaattgagagagaaaataattttctttctcctctaggtatttcaaaaataatttgaaaattatttcttgatttctcaaatcaggcttctatttatagtagttaaatccttattagttaaatcatatttaataattcaaataaataaaaatctattactgaatttggttattaatatttgtgagggaatctcttaattacttgagagaatatctcaacaactttgaaatatctttaaccacttttcaaattcaaatatttatttgattgaattaattatataattaattaacccaaaagacaaaccccataaggacatgcacctaccatgtcttgtttaggacaaggatggtgtcttttgttctgatagcttttgtctcaacaaatattgtcttgacaaattttatcttaacaatttttgtctttttcttattttattaatttgaaaaattatttatttattaaaaaaatatataattactattttgccaattcaaaataaaaattttcgaatgacattataatactctttatccattcccttggtaatgtttcaaggtggcgattcagggaccatggacctataattctaagatccaataaactatattatttattgagtctcatcaaccaaataatcattatttattaattcatgattacactactaaaaatatgaaattgaactcttagcaattatagaattatatttactgagttttactgcaatgtccattgatataatcaattccaatgattagccctctatgtgtcggtgatgtcgtccaattagatacactacggtcccggtagtaaacgggctatatgtcgtatccacagggaggaaaaatacatttagaaggacagttagtaattttacgagaataaaataaaaccttgaatgtgatgagaatattgaaaaaaataatttttgaaaattaagcaagtaattaaaatgagaagtgatcagaaaatgattatggaagacacaagcttcgtacatgcaattatattttcctaataaaattgattctttaaactcaactataattctacaccattaattatagttggaaaatgtgtataattaagctcactaaaaaaatatattctctaattaaaattaatactacttctaaaaattctatcatattgtataatttaaatcaaaaaaataccaccggcagaatgcagtaaaaatcatataatataat

SEQ ID NO: 226383 - DNA, 1900 bp, Cannabis indica
tgacttgtagtgatatttaggtttatgtggagacttgtagtgtgatggagatgtagtataaggcttatagtcatcacttgcacccacattggtggtagctataataaagcatagtgctaaagcacatactaaatgaggccaaaaattgaccattttttagtacttgaaaaagaacaccaaaacacttgtaatattttagagatatttaagacctcctcaaagggtttgaagagggatgtttgttgtgagtatagtattgaagaggatgtattggatgtttatataggtattgttaaaacgagtgaaatgttttgtttattaatatatgaaactttccacaaacctccaactctcacctattattatatatttgaacctttcaattgagctttcccacttgagaaaattaaacatatatataaatatatatgtaatgggaagccatttagtctactatgattcttattcatgcatatatgtgcagtgcacgttgaaacagtctaattattatatttatattggagaaattagaccataccaatattaatggatttctaatatcatgaaggattcttatttagaagttcttaatttctatgttaagaaaatcgtggagataacttggtctaacatatatatattcaccgtatttggacatatatattagaatgatatattatttttattttcttcttcttttattttctttttatttatttttttttttgttttttaaatgaaaaatgtataaaaaaataatatttttcaaaaaaaaaaggctaacctaaccctaacccgatcaaaactcacgtggatccgatttaacccaaactcgacccaccgcacctgaaaacccgaaaacctggtcacacaaactcaaacccaaaaacttgaaactgtaaaacctacccaatgtgcacccttaaccaccaccacataattcgtcaaaggtagtttttttaagacactttacaattatttttagaagagactacccatttttcgttaaaaaagaaaaagtgacaagagaaaccatcttgaaatgtttaatcatagtttacatttaataagataaacaatttttatctataaacataagagattactattaaaaagataacacaaaacataagtattgaatatcagataatcattcttagtaaaaactttttcattctccttttctaaagaggtcttttactatgacaaaaaaaaaagataaaataaaatctctgaacaaagcttgctttttggtagtgtttagtaatatttttgtttttaaatatttttattacaaaaataaaagtaaatcatgcttccaaaattttaacatgtactaaatcatgttctcaaaacttttctggccgttgaaaattttttctgaactattgagattgttaaatttaaagacttttgtcaaatttcatataattttactatttaagtgattgtttatgtactaaatcatgctcctcagactttgatatctatcaaatcatgctccttgaactttaacatgtattaaatcatgccccgtgaactttcatccatgttagactttttttttactaaaattagacaaaaatccttaaattcaacaatctcaatagttcaaggggcattttaacggccttaaaagttcaatgggaataattcgatacatatcaaagttcgaaagcaaaattcttaattagcctaattttaatcagtttttttatttttaaattaaaaaatggaaaatattttctaaaatcatgttttttaacaaccaaaatcatttttataaaactgtttccatttttcaatttttaaaaaatcactttcatgtatctcatttattaagtcgtatttgttgatacgtttttgctgtctctcggatttgagagttgttgttctgttt

SEQ ID NO: 226384 - DNA, 1959 bp, Cannabis indica
ggacccccattcccctttttggcgtagggtttgatgtgagggctaactggtggatttcttatctttttcagatgagtgaagttctacaagaccttcacgaccatggtttcttcgggtttgaccaggaaatcctcgagcttcaccgagccaattccatgtcgactcttgctacaaccgacaccaaatcttccaagaaagggccaaagaaattggccaccttggaggaggttatgcagggtctgatcgcttataagtttttttttgccgttccaatagttgggaggctgatgaactatgttcgtcactaacctgcgcataccagctggagaagatagtgaccgtaaatgggatcaaaccatcgagttccgaagtttaccatcgcctcccgagggatgaggagactccaaatcataactacattggttttggggcctggagccagacccatcgcatgtctggggccatgctacctctccaagattattttattgacttcctaatttttgtcggactctcaccataccagctgatatctcaagcctaccgcatgttatcaggcctttttcattttttatgctgtcaagggttgggctactcccagcctcgctgaaattttgtatttttatgaactacttttcatccccaaaaaggaagacaagtttaaagatggtttttacaaactacaaaagctcacccggccaacaaaatcccagtaccctttaattttcaaaagaatatcaaggaataacgccataggtttttcttttctttcaggaattaaggctttcgagcatccagacctattgacggagtgggttaagatccccctgatgcaccgtaccgcgcccactcaactcttcttggaccacgcccaagtgtttgtgggctacaagaaggaagacatgaacgtggaggacttggtgataaccgtgaactgttggagggccaaggtgattttgaagggtcaatccattgacgattttaacttccaaggtcatttgtcccaacgcccaaaattccaggagtgagaaggcgcttagggtcgacattatttcttctgctgaggacaaatataacaagtacacgtataagagggagcagaagctcgcgctcaccttcaggctgcctccggaagggtcattcaggaggaggcaggagaagagaaaacaccagtcatgcccaaattcccgttcctggttccaaactctggggcccctagtgtcagtacctctggagcctgtaactctcctttgaatattcacttcgttccttctgtccaggattatgcgaacttaaggccagtagaatttgacatgagattatatagatcttatttaaaaaaatcgaaattttagaaaaaatcttaaataacagtactaaaatataattaagttttatatatattttttgctaataacctttgaatgctaaatatatatgaatatacactataaattaaaagatagataatgaaaagtaggaaagattctgatatttaacaagagtgtgggtaggttggacaatattggttaaaagatgtgcatatagtactaactaaccatacaaactgccaatgaaaaaatttcaatacaaaaattactctcactattattgattgtaggagttttcctcttttattatacacacaacaaatgaaataatcaattttccaaggtcaaaacttacttttctcactgagtcaaagctcagttgactcccaagagttaaaaccataaacgacaatcttttaatctctagactacaaatcgtttttgacttaaccctaattaatcctccaagaacaatctctaacccttcatttcacacatacacactcgatacacaaagagaaaccctagtagagcttcgtgtttcttctctgaagaacacgaagtctgctcaaacccaaaaaatcaaattcaccccttcccagatcaaaacaaaatcccagaatcatac

SEQ ID NO: 226385 - DNA, 1547 bp, Cannabis indica
aaaataatatataaaatataatacattattataacatcaaacattattaaaatttaaacacatgcagcttacatattaattagttgtggttcatatatgcattggtagcccgttacaattttttctgctcacttgttgatccgtttcaccgtattgattactccacttcaccagtattaatccaccacagaattaaattaactaacaatattaaccacttccaaaaaaaataaaaacaattctacactacaagccttcccattggaatatttgctttaattaataaaattaaaatttcgttgaagattaaaaataatcgattcgattagtaacataattatcaacctccttctatctaacaaataaaaaaattcacgtactgaaaaacataagtctgactttgatcaacaaaaagtgtactctttgttaattggtgacgttcaactaatttttaggccattttcaatggtccctttatatatatgattataggtcattcgatattagctacaaacatggtcaaaattaggtctaaccacatatctatcacattataattttgattaagaaacgaaaattgataatatgtactttagtactcctagattaagatagcactcatacatatttggatgatgacctaccgacgtacgtgcatagttaaaaattaaaaattatatatttatatgcttatttgttcaaagaaaaatataatatataaaaattaattaatttcattagtttagttgtggtccttgtggaaaatctatatagttagttgtcattatgtgtcacaatcgaagttgaataacggaaacttgtttcacagattccattttaacatttcgttaagcaagccgcaaattactctttttttatgaaacgttaaccaataatacttggtgatgtatacacactgatcatagtatatatttaggcccgtttcacaaagtttttgaaaaaaattaaaacttattttttaaaaaagttgaaataaaaatttgtttagtaaacattaagaaataattttttaaagaatttatggaaaaactacaactaaaagctaacagtttaaactattttaattaaaagattataataaatttatttgtactaaaactatatttacttatttattatatattagaaaaataaaaatatataaaataaataataattaaacttcttagttttcttaaaaaaatatttgatattttattttaatattaacaaccacatcaacctataatttttcttatatacttgagtttttgattttttttatatttgataaaatataatataaagatagtactataaatctattttatcaatggcatataaatttaaatttttaaaaaattaaaaatatataaaaaataaaatattatatatttatgattataaaaaactagattataacattatattatcattacaatagatcttaacaactcacagtacgtactttgaaacttataatttaccaaatactcaactcagttttttttcgtagttctgatacagctgatttttctcacagcaca

SEQ ID NO: 226386 - DNA, 2614 bp, Cannabis indica
acattgtaggcgagactagcaaggccgagggaacacaatctcagaccatctatcacgagcctaaaagtgatatcctggccattgaagaaagaggcttcaagaaactcaagcttagggagctttccatctccttcatagagcgggatgctgcctaggtcaacttcccgcacaattagcccctagtcgttattgcgtagatcaggaaaataacagttgctaggtgcatggtggacaatggagcctcctccaacattctttttagatcaacatatgaaaagatgggacttcaactaaaaaacttaggacctaatcaccaagtaatgtttggattctttcgccaaggcattgcacttattgggtacatccaactacccctgacagttggagagaatccaacaacaagaatgctaatggaataatttgtagtaattgacatgccattgaccgttaatgctatgataggttgacaagccctgtacgacctaaaggtagtaacatccatctaccaccttttcctaaagtttccaacaaggcatggggtatgatgtttgaggggagaccaatagtcttcccatcattgctacaacttggccttgtctaaagccaagaaagaaaagatgcccgccaagagctctgatgaagagccttataaagggcaatgaagtctagccaaaagcggggaggtagacatagatccttactttgggaagaactgaaagaagtggaggttgatcccacttttgcagccaaaaaactaaagattaagaaaggtttagtgctggaaataaaatcagtattggtaaatttctaaggacaaaccttgatctctttgcataatcatatggagacatggtaagaatagacccttctgtgatgacccatgcactaaacattgaaccaaacttttgacctgtgcaacagaaaaggaggttgaaaaagtgcgtgcccaagcactaaaagatgaagtccaaaggatgagtgccaacgaatttatcaccaaagcattttatccactttgggtatttaaccccgtgtaggaagccaaactaaacaacaagtggagggcgtgcatagatttcaccgacctaaataaagcatgtccaaaggatggctttccgcttccaaggatcaaccagctagtagaggctagagttggccatgagatcttaaggttcatggatgcttatttagattacaaccaaataaagatgctcctgccagatcagaacagactaacttcatgatagacccaggcctatactactacaaggtcatgctctttgggctaaaaaatgaaggggccacctattagagacttgtgaacaaaatgttcaaagatcttattggccgcaatgtggaggtgtacgtgcacgacatgctagtcaagtccaaaaaggctaagggcatgtggaggatatagatgaatgccttaagatcctttgagtgtacaacatgaaactcaaccccatcaaatgtttattcgaagtaggcttgggcaaattcatcggcttcatagtcaatgccaggagaatagaagtaaacctagataagattcaagcccttttggatatgaagtcacccataacaatcaaagaagtacaaatcttgacatgatgtatagctacattaagcatatttgtgtccaaatccattgaaaaatgtgtgcccttcttcatcatactcagaagaaataaaaaaaaaattgagtggacaagggagtgtgaaaaagcattcctagagctgaagaaagaattggctcaacctcctgtcctatcaaaacatttggacaatgaagagctgggtgtgtacgtggctgtccaagaggatgctatgagtacaacttaataagagaagaagacggtaacaacatctagtataccacatcaacaagagactagttgacattgaaagtcgatacccactcatggagaagctaacatacaacttactcttagcatcaagaaagctaaggccgtacttccaagctcacccaataagggtgtacactgaccagcaattgtggtaggttttataaaaacctgaagcatctagccaactactcacgtaggccattgaactcggccaatttgagatcacatatcaaccgatagtggccatatatggccaagctcttgcaaacttcatggctgaatgtacaagcatatctcctaaaatctcttgagatttgagagctagagaagaagcaagagtaagagaattaaaaagaacctaaagaatcaacatggaaattacatgttggtggaagcttcaatgaaaaactgtctagtgcagggatttccctcataacaccttggggcaacaattgcatggggcaatcaaatttggcttcaaagcctctaacaatgagcctaattatgaagcccaaatcacttggctcaagttggtgcacaaagtatgagctgaccacttgaaaaaatatagcgactctcagctagtcgtaaatcaagtcttgtgtgaatacgcagctcgaggtaaaataatgatagcttatttgagcaagaaccaaaactttctaagtcatctcaaaggctataaaagaaggtaaatctgttggaagttattttaccaggaacttagatctactcacaagtat

SEQ ID NO: 226387 - DNA, 2317 bp, Cannabis indica
agtgtcttgaataaaatcaacttaaatattaattttctatttaattaaatatatctaaaaaaataccaaagagtctacttaaaaaataaccatctagatatttcataaactaattacttattttctaattaaaatataatatattttagtctatttatttaattaaatcattaatgtaaattacttgatttaatttgatctaaaattaattatcaaattcatttttaactttaatttaatttttagaattaatgtatacatttaaaataaaatgtatcttgaaatttatatggaaaaatgattattaaaataaaataaaatatactctaaaaattattgggcttgttagtagatagtgagcgaatttcaaccgtcactggttcagcgagttcctgaaccattctatatatctcgttattagatagcgagctttcgcagcaggggcctcctcctcagaaattgaggtgggtatgaagctatgactcttcttcagctcatcaacgaaagccccatctccagagtcgagcatttacctatctgacaagttgctcatctgaaagatagaatatcttttcattgtggtgaaagtgggagaatgacaaagtgccctcacccgcatgaaagaaactccaaaaatataaaggattaactagacatctcaagaaatggatgggtgtatgtcagtagcataataatcatgtcgttacatgagaattaaggtaatgcgacacacccaccattttgagaactcagccaatcctcccaaagtgtaagtcgcacatgtaccactagttgtttaccacaagaaatggctgggggtttcctagtatccgaaggggcatgcattccttgcaggaccattgagttaatgggacaccaccaccatttcgagaaacttagttagtcccaacatgcgactataaagcaagaaaagtgaaagctggccgtatgtctcaaatggataggtgtatcgtagtgacccaaggttcatgcgaagctttgcatgagcattaagttactacgacacgctcaccatttaaaagacccaaacagtttttataacaaaagcacatataacctaaaggctaaaaaataaaccttaagttctaacaggggttaagaaagctaaggtgcagatttactaagtcaatttcgatattcagaattgtatgcatgcaagatattcatcacaaaactcgggagtattcgaaatattcagtgagaaatatgcgaacactcgaggtgttcttcctgaaaattgcaattattcaagtttcaggtatatatttcataaagaaatgcatattttgtcaaaatcaaataaaatttcatatcctatcatctcatgcattttctacctctcaaaacatagaatacaaataaatggaagcagttgcaaaaaattttccactaaccttgaaaatgcaggtcgcctttaaacgactctgtaggtatcaaacattctgatttcctttctgaaaaaagaaaactgaggaagaatgcaaaggaagtttttgagggttcaaaaatcagagaagaaggaggggaaaaattaaaatgagagggaaaagagatgaaggatcatttcatatcaaggagtttaaataccattatccctcattaattgggatggagacacgtggcaagggaatgcctaaggtctcacaatccaacaattatccataaccacgcttgcacagacaacgaagagttttgatgacgtggcaccccaaatgggttaaatataatgattacaaccgtctttttgaaaccctagattagacaaccaagagtctccatctcgtgacaacctttcgcctacctctcgcttatagtttctcacatgacatagatgtcaatcgcgaaattaggggcatgttttatagtgagaatttttcacctagaaactcgagaccaggcttcaataaaaatgacacgtggactcactctcctcaaggagggcggagatgttagtaggagacctcctgagcgtaaaccttgcatgaactagactcagcgggataatgtgaccttgacagagtctagtcacattcttatagttcgcacgaagcaagaccgaagatcgggtttaagactcgtatataccgagagatatgcagaactataaaggtcttcctgcgaagtaagagatatcgattctctgctcagcgagctggtatggatgacccaacgtcctcgataactcgataaagacttgcatgtcttaagttatcgacttgattagtcttgtacgcatcttgagcctacaagcttatgcgagaatatgaacagacaactcgtactatgaaagtcgcat

SEQ ID NO: 226388 - DNA, 1731 bp, Cannabis indica
tcaaattgataaaaatgtgtttgtggtggtgaaacattgatcttggattttgttttcttagccgcaccccgagatacccctttgggaggtcgggttggtaccccgagccaaccttcttggaggtaggggcggcatcttgatttggcttccttggaagtcggggtggtacccaaagactaggtgccattgccgattatacttgcctgatttaaaagtcaagcgtaaaattatccatagctaattatggtttcttagcttggataaatgatggaatattgctaccactcatagatagatctcacaaatggggaaggtaccacatcaaagcctactcgtaggttccacattgggttctacatggttatgtgtgtgatgacttaaacaattatgtgagtcatgacatagcaaagttgaatgtaatttttggagtacctttcttgtacatatttgagtaccatgagcgtttatactagttgtcatggacatatctgtttacttcaaatatgtaggggttatggttcaccccgcggctagaggatcggggtacacccccagtaaacccttttctcatttttttacacacatatattccgagccacccctttgtgagtcgaggggggggggggcggtaccccgagacacccttataccccgaagttggggtgttaccccctaattaccccttgaaggtcaaggtgataccccgatatacccctaacaggggtcggggtggataccccgcgacaacttacatttcattttttttcggggaatcaactccaagcggggcttggggtgatacaccccgagaccatcccatgggaggtcgggctggtacaccctgagactatcaatagggggtgatgcctcgggacaaccgtagagtaattttgcattcacacccctaccattggatcgcctgtctcatctcggccgcctcctcctgacttcgcatctgggtccgccaatgatacaatcctcattggctcgacgtccacgggggctgagtcacttgctgcactgcccttagagggccattgtcaggctttatctacgggtctgatggtggcacgtagccacactgagggcctcatggacatcatggacaagaccatgtctaagcttgattattttccctcggcccagatcgttgctcttgggtgccttgagatgatcagagtaagtttctcctacttgtaaaaattcattcctttaaccattatctaacatacatgtaatgatctgtgacgggctacgaccattacttcttatggtcaatctagggttctcgccgtacaagaggagcacaacaagcaaggcgaaacctcactctaacttgaacttgatgccctccgccaaaaacactcctagaagattcgtgatcaagaaacttctgttgaaagggttactgctgagaatgagcgtttcaagggtgagcttgaaagcaagaaggaggctcatgccaaggttgtcgaggaaaacaaaattaatgtcaaggagcgtgagaagctagttgcggaggtgaaacagatcgaaaacctctccaccgatgttttcttcaaattttggctaaacaataagaaggttgactttagttgtctgggtaagaacatggaaagtatgctatcttattgtttcaatcgtgaggaggcagaagccagggagaaggcgcaggcagcttgcattcagaccgattcatacctcaactttggggttgaggcaacagatgac

SEQ ID NO: 226389 - DNA, 2143 bp, Cannabis indica
taatcattaaatataaaattattgttcgtgtatcacttttttattagtatatttgtttacacttaacacaaaaattctaaaattttaaatattattattattaaaaataaacttaaatatttatattacaaattatttttcttaattatgatacatatatgattggaaaattaattctacaatataccccttaaaaatgatgcaccgatacagtcttatctgtttggatattcgaaataattttttattcaatccttttcttatagtcatctacgttatagttatttaaaatatcctgcaaaattttaaaaaattaagaaacatttaagatgttaaaaatatagttcaaatagtgtgttgcaagcgtgtttcaaaataaataaaatatatatcggtacatctcttttaaaatgtgcatcgtaaaaacaccctatatgattaatagaaaagataccaaaaacttacttatttaaattatgaaaaagaaattatatttatttattaattaatgtacactttagtctttacaacttgaacattttcttttatttaattaagaggaaaagaaaaaggtggtgtttttaaaaacgataataagggttgggacttgggatgtgatcttaacttttcatactttgttttctgtcacagagagagaatatgcttgccaaattgccagggagagaatatgcttgattatttatttccgaaaatgccctccatcatcatatattttagaaaaaatatcttatttagagtaacttatattttccatttttctctgcaatttccatgatttggatgattggaaatgggtgagtgatatagtctccatcatcatagaatgatgacttctcatttttattttattaataataatgataatttttttttttttttgaaaatgaataatgataattttcatatcataccttgcaatacctagttatttaggatatgcaaaccaaaggaggaatatgacaaaattactagatgctagtgttgtaaataggtcaggtttttttataggcaagaaatttgtacaagcatgatcaggtacgaaaaaatataaatttgaacacgacatgacaggatgacacaatgttataaattgacacgacacaacatgaaaaatatttgattaatcacacgcgagactagaagaacgaaaaacacgacacataagcacgaatagatcagatcaaaaggcacgacacgcgataaatctgtaaaacacgacacgaaatattaaaaaatcctataatttgataattataattataataatgtatgtatttatcaattataaatgagttaaaataataattaaacttaaatataaaattgaatattataattctataattaaaattattataaaatataaaataaaaattatatattaatttatttatagagtgtaatataaaaatttgagattttataagtaaatatttaaattttaataattttaattaattttttatataactatctataaaatattgttaaaaaaattacataaatataattgaaactataaaatatacttatagtttagtaattaatttattaattgtaagaaaatataaaaaagtaaagcacgaattcaagcccaaatatgaaaactggctggcatgtttaagaaaaataagttggcacgacacgaatctaaacacaacacaaaaatactaggcctacgggccgtgtcgagcctactttttgaaaatagtggcacaggacggcacgacccatattcttttagagcacaactcaacccatattttgaaaagcacgaaaaaatataattcgggctaacacgacacgcatgaatttacagcactagatgctacagatttaactttaacttaatttactaaattaaattttataaaatgttaatttagaaagtgaaaaaatatagagtaattagcggcaaaatcctcttatgtttttaatttttattatactaaattattaatttttttttgacaaaacccttaagtttatttttctttgcaaatttgaggctttagttaaatattattgttaaataccaactagattaccactgtgtacacttgtgtatacataaaagtaaaattttgaagtcaatacagtaataatccagttagtatttaac

SEQ ID NO: 226390 - DNA, 1207 bp, Cannabis indica
ataattaaacataaacaactgctaatttccaaattaactaagcgggttttacaaattgttttcggacacatcatattattggtgggaacagaaaaagcacaccaatttagtgacagcagattttgatttctaagttaggtagtcaaaagtgcttgtgatttcttctcataacgaaaatcattcttcttattcttagaatcatcagcagaccaaataaagattccatggagttttccttgttgtttcaactcattacaagccttgaagaacccattttccggtgacaaacctcctctgccttcggtagtaaagctaaccaaaaccttcccaccatgatagttaaagctttgagtgttgaaataatcaatgaattgagacacagtagttcccttatcataagcatagaattggaaattcacatagtcaatcaaatccccatatttattccacaaagcctggtaatggctctgtacttggtcattctcatagggagcaatggaagcgaacgagatcactttattgttcttcaaactctttattaaccgtccgatgcattcggcgaaagtatgagtgtctgagctgaaatgctcgtaatcgatatcgattccgtcgaggttgtattgttggatgatttgagtgagagttttgactgcattggacacccaagaatcaatggagaatggcttgaagaaggccgaagcgccaccgtggcccacggtgtctccgccgaggcttaggcctactttgacgttgggattggcttttttgatggctgagacatgagatggggagagattgtttgagtcccaaaaaacgttgaatttgccattggttggggttaagcctgatgacgtgtcataatctatggcgaaggagagaagaaagtgaaattggagggttggattgattggtatgtctgagaatgtaacgttgttgaattctgctcctatgtattctgtgaaaagttttgtgtttggaattggaacagagttagcttgggataagatgataaggaaaattgtgatgagaagtatgtttggattagtagtaatactaattagcttcatattgtttttttaattgctttgtttgggtgtgttaggtttttggctttctttgttgttttagttttgtattttgatgagtaaaatggtgaatgttggtgtttatataattttttttagttattttataaattatttataat

SEQ ID NO: 226391 - DNA, 1270 bp, Cannabis indica
atatatatatatatatataagacccacaccaataattatatgagacctaaaaaaaatattaggcacccttaattttttttttagcaactacttttaccaactcattattgaatcaatgatataccctagcgatctctaagcaaggctaccccaacagaacaacagccccccattaaccaaatcaggcaaagaagcaacccccggagacacatcacagacgccttgatgcaactccgcctaaaccaattaccacgaacaaagccaatcgagaaaagaaactgggagaccaaacccaatgttaaaacagaaaaactatatgtggagaatcagaagaattaagacccctgaccagaaccacttagaaagagtcgatgagccctcattggagaataagaaataattcactactctacggctgcttgagtagagagagaataacaagagagaaattaactctaataggttaaacattctactttaaagctagacacctttaataataaagagataacataaaagttgttaaaatttgattaaatttttaaagttttttaataaagcagaatcataattttaatatatgttcaatctaattttattataattgaatatctaattttcactttttatatgagatttgataattcaaattctatttgaattgaatttgtgtatttttaatatattttaagtgaattattatttccttattttcaacttttcttagcacaattattatatctttattattagtgaaacacatcatagacatgaaaaactaaaaacagctaattttaattcattttgaggcacccaaaataccaataacaatccatttcaaaaaagaaaaaaccaataataatcataatgagatgagccatataaaagaacaaatgaggttaagcaagaaaataaatacaataaatgaggcctatccaaagaaaaagaaaaggaatatggtaggcaaattaaatttttaattcaaataattatgatttacaggaaacatgagaaaacaatagcatttttggacgtttccaattattgcgtcctacctcaacttatggccacgtaactcgtaagtgggtgtgggtcatgtctaaataccaatttggccatgtctctaaatcaaaaaataccctcaatgtgttatcaatatatttttttttcgaaagatgttgtcaatattttataaacagtatctttttatttttacgttaataaaatagaaaaatttgctatctagtttttttttttttttaaaggttta

SEQ ID NO: 226392 - DNA, 1783 bp, Cannabis indica
ttactagcttaattatactgcataataattatattgtatacagttatttcaaaacgaaaaaaaatacaaataaagaaagtgatcattttgaagaaaataatctatatatacaaaagattacaatgaagaaatattattacattacaatttagcaaaatcagtgatcaataaaatagttggcatattacgagggaggcattcagagaaggaaagaaagaaagaaaaaatctcttacacgtagtacaagtaatacagaactacatctaatataaaatattaattttttagcacatcttgcttttcttcaaggtgtttgatgtttagcctctatgaatttgtgagttgtgaaaattgtttgtgacagaatttgtagtggtaatgggcatactaggactaatgcaaatattattttgaacaaaattggcttggggatttatattattggtagctgatagagcagccaaagatgtggaagatgagaatcctgatgatgctgcaatggagaaagtaggcatggctgttacacaactagatgtagtagtagtagtagtagtgttgctaccattgccatgaattttccatgcccagttcaaaaaaccctgcgaagaattggcggcttcgatcctcttttgatgatcatctgccattgctctcatctcctgtatctcccaaaaaagtgtttcagataatcaactttaagtatttggcaagtttgtgaggatgcgaaagaaagtacctcatgttttggtaagaaggctggatacactcctgaacatgtagctgaagcagcatggttgggaggtagaatatgtggggatggctgcccatcaatctattgagagtagtggatactaattttagtttttatatcagaaaggaaagaaaactgcactttctaaactgtgcctattattaaaatcaatgtaccattatcggtcttattctgtgaggtccttcacgagggttccaatgaacacgagtgtccccaagaccaaaagagtactcacgcccttttggaccatcacatggtggagaaattcccaagttcagatcaaggttgtggtcattgcctgcatttttgcaacagaagaattaattgttatatttgtagtactagataataactcctttagctataaagtcattaaatttagtaccttgtgcattggtgtctaaaattatctcaccctgataagtactatgctcaaagttggtaattgcatcccttccattacatttgatggctgctttgtcataagccctgaatttaaacaaagataaaagaaaaaacttgtgttggattaaatccccaccaaacaaaagccaagccaaaggcataatgtgttttattctatcgagttaaaaagaaaatgttgtcaatattagaggacaatattgaattcttcaaatatattcatgaacaaatgaggaccttgcagcctctagttcgctgtcgaataatccaagataaatatacctgcaaagaaggatcatgattttatagatacaaaagtggagtgcccattaaggcatttcttcttttgtatgcataacactaccatcaaccacatatgtgatgactaccaactttctcaatgttttgactctcataataatacataattgtgtaattagatgagaaatggttctcacttttttccaaggaattgtcccattcgagcttcccatcgaccacatttatgcaaagttactcctctatattttgagctcccacgagaaaatccagtgctttgtcgtcgaagtatttgaacaaattcttctt

SEQ ID NO: 226393 - DNA, 1460 bp, Cannabis indica
tttcttgctgtgatggattaatgggtatttgggaattgatagaaaaaaattaataatttggtactattcctgagttactttgcaaagtgaaattgagagatacaaatttgaagaacttttaagatgttgaactagtacttatagattttaagggtgagggacagagatgatgttatgcagttagctctgctccattatgtaaactaaatttgtgttctgcatttatgtttttttttggtagcctcaagtgtcatcagctagtgttaatctcacaaatgaaacggccatagtgtggcctgttgctgaagccaaggttgttcccaattggcaacatgaattaggggaggcacttgcaaagcaattgacagattgcgggtttaagtctaaccttcgaggtaaggagccgaactagtatgatgtcactaatttgtattgctaaaataatacttcactatgacttgcatagttcttgtgtgtgttttttctcttcttcctattaccacaaactcatattaaaagtaaaagtcgatgaatgataatattgcaacaaggatgatgttcttcagggttgtctattattgttttgtcaaaaactatgctataactccatggccaatgtgtcaaggtgtttgtttggccaaattcgaagttctttctacttttaggaggcatcagtgttaatagttttcatctaggattcttatgaaaaggtgacaacaactagggggtcagaatgtggtgttcttttaataataagcccaagagataaacttacattacacatccttgtgtggtagcctatgaatcacctctaactgtaaatgagagttactggtttttaaattatttatgtgaagattggtgggtttagtggcaggtgagggtgagactgctgttgaagaagacaaatccccatagaaatgcaaagacaattgttgtctgcaaccataaatgttatggtatgtcccaaaagaatctatacatctaaactccattgtattagaagtgaacaaataggcttaagactgattatttatttattgctacttcttccaataggtaagtctatgcagcttatagattggttggagtggcatgtctgttgtggggcatctatttctttggagaatgagctgttccacactccaagcctagcaatttcctagttattaatttatctcttcaaaaattcttgtaccctatccaagaaaatagaaaagaaaaagggttgtatttcatttgtttaagtgttagacatttggctatgttcgcaaaattacatggtagcatgagtttcttgtgtgttagatattttatcattattttgttattttgtggctgttagtagtcagtactaagtttccaatacattatgtctagtaagtgttctttagtgttaaatcttgtgagtatgggtatttgaagttgaagttataatgaaaatataaaacatagattca

SEQ ID NO: 226394 - DNA, 1466 bp, Cannabis indica
ctaactgtttctgttagtttgttaagctgtacatcagctcaatcattctcttttcggttgtaactgattttggttgttgtattctatttcttgttcacttgtatataatctgaactattgttcataataagaagattactctttcaatcttcatccttttctttctctgcctttctctcttttcttctctttgttttctcttcttctgttctgctatgtctaagaggtttaacagtttgtgaaatatatacttatatgattgaacaaaaaaaaaaaattgcaatttcatagtgtggtggccccaaatttcagttctccaaatagttgaaattctttaaattctaacttttcaaatttctatttcttcaaataaactaaatatttataaataataaattaagaagattaagaaataaaaaaacttaaaacacaataacaaggaaaagaatttatccttaaattattaaccctaatccaaatagattattataaacaatgtgaaattaatatatatatttgtattatacaaatcttaaagtttgatgtttgtaaaattattgtagcttcaatccctaattttttattgatgtaattgtagaatttcaattttttttttttggaaaaagatcctcctcgttctgttccctttgtttctctgcaacaagtcaagtaattttttttagttttttaacttcctacaacatggaaactgtttttatttattatttcatttctttttataaaataaagtaaatattgtaaagttgggtttttgtttgggctgacccacttatttcttacaaataaaaaattttgaaatatgtggagcttgatttttgtatagaatgtgtatggggacttctatttagatttacaaataattgaatgaatatttaagagttaaatgtaaataagagagacacaatgatttacaatagtttactccctagtatcgcgacactaatagagctacgtctacttcaagtttttattctcacgaaatagattaaaaaatgactaagtctaggaaactcaaatttttagagagagaaaccagagagagatactttgagcttataggtacatttttgaactttcaaaatgagctaatggaactctccttttatagggaaggatgtcctattaaaataataataataaatccaaaaaatatggaaaaatatatttaagctatttttgatcgtagatgatgatttaatggtgaaattttagaggtcggcctcaattttcagagcttgagtcacatctgcaggacccacttcgagtaagctgtaacttaaatttgtaactcaatttcgagtcaataactttagaattatgattgaatgtaagacatagcttgatagtgttagggtttataaaacacttaagaaatatataaatcacagatccaaacatattcctaaaagtgctttaatatagaaaaccctaaatcataaatctat

SEQ ID NO: 226395 - DNA, 1686 bp, Cannabis indica
actaaaatggtcctagatggctcgttcattactgattctttacttttatccagaaagacataactaaaatgacatgatatatatatagagaaagatttgcttgctaaagaatatcatttagatatacaatgagaaactaccatactaaggaaactcaactgaaggaggattttccttccgagcttatccatcaaagatgttgtaataattgattctgaaaataagtaaaaaaatgattggtaaagagacagatttaaaataatgcaacacatgtaaatattttatttagaagaaaattataaattaaatatttaaaaactttatatattaccattcatacatgatagtggcaaattctgaaatcttaaaaaactctgtttagtaaattgcataactaactaaatattccaattagttattactcttgcagttaatatagaaaagccacaaaagaaaatcaaacacctttggtacccctacttgccatatataatgaccacaaatcccctaaatttgaaacttcaataagtggaaaacttcatacatgatgctgcctactctagttagtcctgattttccacttgcagatacagtcaaaaaataaaactcacattaaaactaataaaaaactacattcaaataagttaaaatcttacaaagtgacagatacactagcacttatcatagctaacaacattaattcataaataattgtttgtaaattctaacatttatatatacctattcattccacataaataaaattgaatgtgattgagataataagaaagagataaagagatttttaatacttgcactagaaaaagattagtgatgtgatccatgatcactcacctcgcaaacaacacaaaccaaagagattaatcaagaataatgtaaataaatgaaagttgtatagtgcagcaatgatttaaatgcctataaaccggttataaacagtagtaggaaccaaaaaaagaactaaagttaatgagcaattaagaataatagtaataggagaaaagatcaaacacaatcaaatttacgagattcgaacaagtgatgatgaatcacttgcctactcctcggccagaacagccccaatggctttagtctttattgatgctagaagagaggattacaaagttgtttacaaagtgttcttgacacattcactcatgaagaaaagcttcaattacaaaacaactcatctcaccaagactctctctctgttacaatctgaactagcactcaaaaactccctcttaattgctaccagaatgctatagcaattggctatttatagcctttgtttaagacccgatcctaactgtcataactgacaggtaaaaccgttagaggcagttggaatgtattagccaatgttgtctattcctctattagtggccaatcacaacaattatccaccttggtcattaatagaggaaatgaatgatgataagggctgaactggtcttgaatcctcatttagcagttgaggatgtttagcaagtctaggcaaagcctaaacttgcctaaacttacatactttgtcatcatgtctgcagggttctcctttgttccaatcttcttcacactaacctccttttcagcaatgatatccctgatgaaatgtagcttaatatctatgtgttttgatctctcatggaacataggattcttcat

SEQ ID NO: 226396 - DNA, 2205 bp, Cannabis indica
acagggtccaatctgtaacttttgcaaaacacagggtccaaaatggtatttacccgaaaaagaaagataggagaggctttgaaccgcaacagagctttgaaacgtaacaaagcaattagagaaaatagtaatgttttttcactcgaggtcttttgcccacccaagagccaaatgaattgcagagagttcaacatggaaaggtgaggagctcacaccagcaatggtcgacagtcgccaatggttaaacttggggtcaagagcaatagcaacaacaccatacatgccatatttgaaagactcgtccacaaagaagcactgattgatggaggttcaatgcaagagagcaagttatggttcgagattgccaagagtaggattgctgaattctataaacttgagccaaatctcgtgatgaaagaactatatactacaaaaatagtttttctccaagtttttaaatagtcatttaaagtattcccgtcggtttctataaccgtcgcctatacaaacgtgtatgcacctataatgcaaaatactcaaagatagatcgtgagtaaacaaataaaatcaagaaattataaataagacaagagattataatggtttagtaagagctcggtctgcttagtccatttttgacaataagtttagcttagtttatttaatttagatcactcatttatatagaaagcaatcatccgtttggatttacatagccaaacaagaacgttattacattaattatgcaaattaataacaaaaatcgtttaaagaataaatgaaagaacaattttgacccttttttgattgattgcctaaatgctcgtgacttgttaagtctcacattgactattcatattctaaacactcgagctcacagattctttggtgttattcacatattgggccttcgagcctataattgcgattaaataattgaatgcctacgattaccctgatcgcatgtttgagcattcatgtgttgaaaacctagaacttgcgagtcttaatggtttgtctaatttttcaacacatgaatgctcaaatatgcgatcgggcctatatctgcccatttattaactaactgtgtgttttctaaattctgttttacttagttagttagttctgttagtttcttaactaactcttgcttttgccttgtaatacagtcatataaataaagggttattggctcagttttgagctaagcttttcagcaattctctctgttttcttttctctctgagtttcttttctctggtttctaccattcctggtttctaccttttctgttttgctggtttagcttctacatggtatcagtcgccttcaatggagtcgtcgattccaccctccgatcctcctcagacggtcaccgcccccgcaccagaccagtctgctcaatcttccgattctgccccctctgtttggaattcgttctctagttgcctctccacttctctaacgatcaagcttgatcgtacaaacttcctttcttggaagtctcaggtggttccaacggtgattggtcatgacctagatgacattttgttcagtggtatctctcctccccaattcttggttaatggtactaacaaccctgcctatcatcaatggaagaaacgtgatcagctgctcttatcatggattcgttcctctatgactgaacgagtccttgcctcagttgccaatcaccaaacctcttctgcagtttggcatgatcttgagcaacgatttgcgagtcaatctagggcaagattactccaattgaaaggtcagttttcccatgttcacaaaggcaatctgtctatttcggaatatattgaaaaagttcagtctcttgctgattcccttcttcttgctcgttctactataagtgaacaagatattgtgcttcagatcttgaatggattaggggctgagtttgatcccattgtctctggatttacttcaagaagtgattctttaacccttgatgaagttcaagcccttctcttgtctcatgaaagccggttagagcaccatagctctatgaccgatctttccatgaaactccaagccaatctcaccgtaggcaacaaccgacccaactcagggagatacatcccaccacctgctcgtggaaattactctgacaactcttcaagaaacgctgggaagagttcatctcgtggtccttttggtcttcaaaccaggctcatctgt

SEQ ID NO: 226397 - DNA, 1254 bp, Cannabis indica
tctattagcaatgattttagagatgaccttgtacaacacattgcagagagatatcgacctatagtgattagttcttttccggttttggactttgggtatgagaacgatatttgtagcattgactcctttatgcatagtacccgtctgaaagaaatcagagaccacttcacaaaaatcctttacaacagacccccaatagtgtttaaagaagagcactaacattccatcagggccaggggctttgttgttactcatggcaaacagagtacgcttgatttcctcatgggaaggacccctgataagctctgtctgatcttcttcagaaattctatcctagatgaggtagttgcaattaaggtcgtgaccattattcgctcctgaggagattcctttaaagaactcaataaattcattaccaattaactctcatccaaatgttgtctttattcagaatactctcaataacattccttcttcttttgatagctggcgaaagaaagaagaattttgtgcaaccaacaattatcattaagtaactacattttatacataaaaataaaagaataaacgtataaaatccattaaagaaaaaaaaagaatagaacactcaaaaaatcaaaattaaaaaaaaaaaattgcattgaaatagaatgaaatggaaagaaaacaatttttattctattcatatgtttggttgcgtcaaaaagtattagaacaccattcttatagaattctctttctaccattttagtagaatgactaatctattttgaaatagaaaaaaagataacacgagaaaaaattactaggtaggataattactaggtgataattacacagtttagtaattacactatattttaaaatgcaaggtgtgtttggatatgaggtggtaattacatatgaattcttaatatcttatttggcaaaataattagtaattacatgagaaaataatattgtggcttaccaaacgcctaacaattttttttataattttcttttttatgtaatttaaaatttattccattttattctcattcttattaatattaccattctcatttttattattatattttgattctttccaactaaactccaactaagaattttttttaaaaaaaaaaagaaagaaaagaaaaactccaactaagtatataatgtaaattagtctttctaaatttaaactcattaaaaaaaagagcaatttgcggcgaaacccctttatgttttgatttttatacacttaac

SEQ ID NO: 226398 - DNA, 1686 bp, Cannabis indica
attttaaaaaaaaaaaaaaaaggaatactcttgttactatctaggagaacaagtgtgaccaccatcctttgtcccaaaagggagagataaaaaacttttttattcaaaaaaatatttcttttatcttcacactttaaatctttattattattagttgtatgtgtatagggtttttttttctttttcttaagggataaaatactaaggttgttcaaccccttttgctagactttttctaactcttttttggctaccaagattctctaccaaaagaaacccatcactaattggccatgcatacaatgacacataataataataataaaatcatattatctattcacaaactacaaccctaggcccatcattcactcattgtttatttttaaaaattatttatgtaaacaaactcataatggggcaaaccctatttgtcttatcaaaacaaggtatgtccattgtgatcttttgaaaatgttcatcacttgtaaatgatagagtttttctaacatgggatggaaaacttttaaagaataaactaacaataataataaagaaatattatataatgtttctaaaatgcatccttaaaacataatatatttttttatgttgtcaaacatatatatagttctaattttattttattttatttttatataataatatatattgtagctatttaaaatattcaattaatttttgagaattttataaaaattatagtgcctaaaataaaatttaaacaatcaatttaatacgtgtataaaataaaacagatacatataacaaattattttaattttatattcaatattaaaatttattcaaaatttattaaaaaaaaaacaaataaaataaaataccttaacatatatttagaaatgtatactaccacataaaaagaaaagtaaatttatagttatttaaatattgaaagaaaaatctattgtacacgatggtaaaatggttacattcttctaaaatttggaaggtgctaagtcgtggtagatctgcatctttggcggagttgcttgtttacctctttgaggtgcttgatacgaatcattttgctctgttagctgtgttatggtggtggttgtggtatgatgagaattttgttctgtttgagaaaaaacaatctagattgggtgtgattaatgtgttagctaaggaagctttggaggagtttcaaggtgtaggggtaagttgtggggtcgggttttgggtgcttcggaggcaggggaggctaggctgggtgccgggggtggtggtgttagccaggggcggttgggtaggggtggtgctggggtgggaagggcgcggtggtgttcacctggggtgggtgaatttgtgttgtctgtggatgcggctgtcactccgggtaggggctttgcgggttttgggggagttatccgcggtggtgagggggtggtgtgggcgtcttgggctgtgggcgccgttggggattttcaggtggcggtgaccgagctcctagctctccgtgtgggtcttttatgggctaatagattggggttttctttggtgcgtgtggagacagattctactgtggtaagctcgtggattaattatccggataatattcttatgtttaaaccaattgttgaggagattatttctcttttagctgttgttgatggtagttcttgttgtgccatttcgcgt

SEQ ID NO: 226399 - DNA, 1065 bp, Cannabis indica
aatgttaattattttataacaaattatacagttgcatgttggcacaactcctggggtctattatgcttgcaaggctggtcttggacttccaatagaatggaggtgagttattacgttaaaggataatattaaaagaatatccgcggtctttatgctaaacatgatgtatgcaactcataatttattagagactttttataaatgtcaattaagtatcgaagtaattgcttccgattgttctatcatttaataaccggagtcattctttgataaagatcactatgagtcaaactcaatagaatttgatcaatcctttttttctctcgttaagacagagaattgaaccaagagctctctttctttatcataaatccaatcactattcacctcttttcaaactcaacattatattgatacatttttcataatgagtgatttattagctattttgagtctcgatttcataataagatgtaatgtaggactgaccctgaaatttagtgttacatgcctagcccgcttataccagggtcgggcctgatgcaacgagtttctcttcttattatatactaactggtattgagataaaacttcatataaattaccatacaccaaagattttgtggatgatgtttaataatggttttgtattatgaattgtgattgtccaggcctgctttttgtttgctcttttggtttgttttactgtttgctgtatgcctctccatgggcaaagatcttccagacattgaaggtgaccgcaagtaagtttatatcaattatataattaatctgcttttgtctttcattgtttttcttttatataatttactataaaactaaactatatgaggattatttataggtttggtataacaacgctcccaactgaatatggaccaaaaaccatagcatttctttgtcatggacttacccttctcaattatgtgggtattattgctgcagctattatttggccacaggtatttatatatatatatatatatatctattctatataaagtgtgcctatataactgaatttcttggtttatgagaaattca

SEQ ID NO: 226400 - DNA, 2089 bp, Cannabis indica
gcttaagcatgctacgcacagagcctctaacttgggcatttagacgcgtaaaggtcggcctgataacaggggaagtggcagtgagtggaggggggcaaggttcattgataacaattcctttcctagctttggacagagaaggatgagtaggagtagacatcgcaagggcttttccttttccttttgctgtatgggtggaaacagagtcagccataataggagcagggatagaaattgatatggatggcattacagggctaaaactggattgtgagacaggcaaaggagaggtagatatgacaggctgaggaaactggaccgagacatgagcattaggactggattggggagagtccacatggaggaattgatcaacagcttgctgcaaatcttgagcatcagttcttggatggatacgagggaaaaactcctcaaaaggggtagagttagacagttcaaacgggttctttttataaggggaggaaggggatgcacgaaggatatccttatattccaaaagaggaggatgagggaaattgtcacaacgaagcaggtacttggaacacttattataggtatgatcaacacggccacagaaatagcgaaaattcgggagactctcgtacttaaagctgacccatcatggttccgagattccacggaagcgaatggtcatacctctgcgtagaggcttagtgatgtcaaggaggacatggattcgaggtaaggaccaagttttccattaaagagagaggaaaaatttcaagaagattgccaatctcgtcagcaatgaactgggccagttgggggtcgaccaaaaagaattctatgaacttgaatccagaaagaaacatacctaatcgacttaggagtaggagtgggggagacatctaggtgggtgaataccatcaaaaacttgtcaaagtgccatggctgttcttcaagaacacgacgtctatctccatcacattgaaaggaggcaaggaataaccctgaatgatactcagagatttggcaaggaaatcgaaaggtccaagcatcggacatggctttctcaatccaagagggcttagccgatttgggagataacagtttgaaaaacaagcaaaacgagtttgcatcagtaggagagtgaatggaaatgtggtcgaaatcatagacaaggctgtcctcatcatcaagagcagtgatagggttggggttgctggaggaagaagccatcattggtgaagataggaagaaaataggggtagaagaagaaagaactagtgatatggatagtcgaagggaggaaacatataaataagcaatcaaataaagaaaccacagaagagagtacctggaggagaagggtcgcctcgaagaggaaccggtgtctgagccatctctgtaatgcttagggagacggtctggattcggagatgatacgcaatgatggtttttgggtgtgagaaggagagaaaccaaatgacggttggtttatctatatgagatcgagctgaggatcgaaatgagcattgtttgtgcaggaaaattaaatgctgaagggatagagccgccataattaaatgcaggtgtgagagagaagtagcattaaacaacggctgagctcgagaaattaaggggagatgcataatgattagggtgacgtattaggctattaaatcaaaagtcaggagggagtaattaatgaggccaaacaggaacaaagagatgattcttggggagtaagaaaaaagagggggtaattaaagcatgaaaagcagaagaagaaaaccagaaagaaaacgagaaattaaaggaaaactcaaacctgcttgagaagaagagacaaaaggaagaaacacagctaacctaaccgagattgaaccagagcaaagcctgtaggaagcttcaagaagaagagtttttttatatgttttagctcagtgagaatacttggtataatgacattaataatattgctattgggcaccaatagtacctgaagaaccgtgtttttgcaaatgtcagttgtatatacgaaaatataaaaactgtaagcgtttgcagtagcagaaagtaattctgatacagcaaaactgaacag

SEQ ID NO: 226401 - DNA, 2085 bp, Cannabis indica
aaaagagagagaattccctatccaaaagagagagaattaataacaatttgttgacaacaataaaaatgtaagaaatccccattataaaatagatgtcaataataaaataataactgagtttctcatttacaaaaaaaaaaaataactgagtttcttaaacattaaaatatgactgtgtcggtgttaataagatccataaaaaatatttatttaacaaatttctgataaaaatatacatttacataccaaaaataaaagctcaaaaatatccaatattataatagtttttcttttttttttgagcctaacagctaatttaaatctaaaactcgtccacccgcgattattgtaatatccggatttttttttaaagaatgttatataatattgaaacaaaatcctattgaaacaaaatccaattacaccacttactaaaaaaaaaccaaaaaaactatggtaatggtggggcaaggcaaattaattctatctacctgttttggaagttcaacttggtgatgcataccgcaaacatgagggcgaaaaaggcaccgaaagcaaccaaaatagccgctgtgggccccataaaattcgggtcatacccgaaatgattttcaacataccatttgacagtcgggtcgggtgtggtccctgctacctttatagtctcttctatgtccccatattgtgtcacaatcaatccatatactgtccatgccaaggggcaaatgtagtaataccatctccaccacttgggaatcatctgaattttcataacaattcatttattgtctaatttttaacttgattgaaccatattattcgtgtttatatgaatatatatgataattaaagacttactgatttgggaatgaagaagcctgaaaataaagtgaagaatgcataaaaggctgatgcaaaaatggcggcgacttcgtgatttggtgtgattgatacggtcatcattccatagtaggtgaagtagagaaaggagaagaaagagataaagaagaaccagaggaactttggtagtgaccattggaagctcaccattgcatacactataacagaataatatgtagtttgaacaaatatgtatggtatctcaacaatcacctgcattcaacaaatgcttacaattacatgttatattaataaacttttcttgcttcatcatttttttagtgggaaggatgttttcactgaaggagtgtttgttattaataaggggtttgggatcacgggagctaggcccgcactaattgtgcctaagatcacctaaagataacgtgttctatgattgattaacgattattttttgttattattttaagttatattagacttgataattaattgtacgaatagctaagtaggtatcgcaaatactttttagcactttctcttttaaaatatatacaatttatttttcataattttaaaaatatcacatattcttatacataagggcccaaaataaatttttttttctttccaaagacctaagaatctcaagccggaatgtaaaattaaactagtgttttgatatgtaattttagtgaataatttatgtttgtgtgggctccaaccttaagtttaattttggagctaacatcaaactcttttaaacacttgagtttgagatttcctaaatttcaacttttccaactaaaacttaccaagtgatacttttacaccaaacaggccacgagttgtttcagttttaattttcttgaaaaaaaaaatattgaaaataagattttccattatacaaccaaacaaaacaaaagtatagaatgaaaattaattttgatcgaatcttgttccattggatagcaactttaatgttagtaatcactgacctgggccagggcataggggagagctgagtacatcccagcagctctttctcggtagtaaaactgttctctcaatagccacacaggttgcacagttgagcaattattgatcccacaaacaatacggctacatacatggctccaatcatcatggtcaaatctgttgtgttctccctgattatgaatttcaccaagaaaatgaaaaaagcaaaaaaaacgtatagcttga

SEQ ID NO: 226402 - DNA, 1895 bp, Cannabis indica
agagaaccattattaaaagtgcagtcgcatttgataaaagggctcggtgagttaatgatggagttgtttatggcggaaccactgcatggttccccacttatgttccactcaaaatcagcctttatcttccattgctcaaatatagagttcaaagctctcactacaaccaaattattttcataattaagggatgtgaattttgtgataatacaaatcacaaagtagaaaaattaacaaaatacataaattaagagagacattaagataaagaagaagaccttcagagggagctgtagtgggctgagttccattaataatctgggctcttgttaatgaaacatcaataacaacaaaccagcaaaccacatagataatcaaagtactaaccaatggtagtaataatgatgaggttcctgatcttcctgacatgatgataataataataataataattctacatatatatatatgtatataaataactggactatatatatataatataagcaaaacgtcgtaggccaatattattaattagcgtaagaaagacttccattatatatgttgagaagaatagtcaaatattccgatgacccatcaatgtaaaaagttgtaaaaagactattcttctccacttcatttaattgcaattttaacttcatttaattgcattttcttttgtggcatcgctttcttgttgcaaagtctcttatacaatttcatatcagcccaaaatgattgttggaataattgggtaagacaaatactgcggacaatattataaatgagccaaaaatgtctgactcagattgtgtccacaagcagctgtggggccataactttataaccacgccacatttaaacaactggttggaccagttggagccattcacttaataagtgatgactgaggctctctcatgaaaattataattgttgtcatgtgacacgagacagacagtccatcaataaacgagagactattcttctgaggggtcttctcgaagtaaccaatgagtacgtaatgaaatatcattcaacaggaggactctagggaaatgcacatgaacatatggggccggcgatgcagggaatacattttccgccccgttcccacatttctcagtttagtgtgaataatcacgttaatgatgcagtcacgcatacacccgttgcagttgaagaaaagaatatagcgtgtagagttccatgaaagtggctattccaattcggaccactattacaattccaaacaagctatagcataacataacactagggtttataattgaaaatgctaagtggcatctcaccccacgatgtggtatttttatattgagttctataaatatttttatttatttttaatgtttttttaagtctttccctttctttatttgtgacttttggtattttattctgtattaagtcatttagagtgttgatagtgagaagttggtcacttttgaatgatttttgataaagaaaaggctctatgtgatgcataatttttgtgcaccaaaagtagttgtgtctgattgctcaatccacttggaacaaagctttgaagagtaggagaaatggaaagtagaatataacctagtctccatcattccatacttgtgcttcactgcctttttagagatagttatttctcatccttttatttatgtatttccttttttacttcttatttttagagttatttttgtgctcttgagtatgaagtaattttgttgtagttagaacttttaatgaacttggaattgtaaattttattgatgttttatgaaagtttttagccatggaaattttgttcattcaaggatgcttaattttatctaaccacttttacatgatcactaattgtaggttagctaatcttgaattttgaa

SEQ ID NO: 226403 - DNA, 2078 bp, Cannabis indica
aaaaaaaaagaagaatttgaccaacctgcatctttcagaagatacaagctcaccatccacataacaccttaataagctgcctccagaaaaggctctcccaatactatgagttagacatagaaaatgccatttcttcctaaccagagtgataggtaggtgaacacattgtcgcttcagatttattgactacaaaatacaaaaatgattatcagcgtgaaaatggcagaaagtttaaaacagcaagtgtaaagcatgaagcacacaaagagaatcaagaaaaattaggagcacagtatgttaatagaatagcacaaagcatagatgtgcaattagaatacatgggcaacacttccatacataaaatacgtatgttttacctcataggttaatttgtccttagcaagaactgccaagcatcctcttccattatctgtcagaaaactgaaaatacccattgctccatttctagggaaattttctactctaagccagcatgaaaaagaaaaacccttactgagaggccactggacaggtgtttttatagcgataccctgcaaaaatatattaaaataaaaataaaaatagagaaagaaagagaatcgcattaatgaaggttacaagatagcttagacattccgcatttgtactgatgtagcatcagagctgaaaaattctaatgtcactgttagagatgcatattagctgtatatatattagctgtaaaattagttaaaaattagtacacaacctttccagagggttttggtccaagcaaagtccctactaagtaaaccggtgggaagcaaaagaaaagttaagctttggatgactacaatgttagcactgctatgggctgtgtggaatgagcgaaatagcaaaattttcgaagggcaagagagatcagcaaactttttatgggagagaataaaattttggacagccacatggatctttaaaaccaaacactttgaggctttttctttcctagatttaagcagggattggagtggtttgttgtaaaactcaagaattctctctttttgtttaattggtcaatcaatgtgctaattcattgtattgttttacaatttatgtaccaaggttttcctccgccacaagtgaggctttaataatacaggtgaaggcctaccaagtggtctccttctcttttttcaaaaaaagaatggaagatcttgagagatatagaacgttgattgaaaacttaaagtatcttatggtgactcgtctaaattcataaaaggttcaaaactcaattgaaaagtagtgaaagttctaaacatatgaagaagacatatatgcgcgaggttgatgaggaccaaggagggagggacttggctaaggagagagatgagcagcgatttcatatgagagtgaggagggagggacttggcgaagaaggagagagatgagagattccatatgagagggttagggttcttaggactatattttcctacctttctattaaaaatctgttaaaaaagacccaaactaaagtacattagagtatttaaaagaacgaaaaaatagctattagagaagctataaaaaaaatagcccaaatcagcccaccaaaaacacaaaaaacgcccattgttgaggccacgcctcatgcgcctcagtatgcatcgcctcaaaagtccacctcatcaatgtgaggatacgcctcaatgacagcagctgaggtgtagcctcagatacgtttcctcaccacctcgcctcgactgatttttaaaactatctttagaagttctatttctttagtcataagttcgatttgtattcttagaattagttcccagttgatttgatatgtttagttagcatcctaattagtcttggttatcgtggaagaaattaagatatctaatgttatattagatgttaaataaaaataaatatatcaatgaactctagagtggcctactctaggcctaatccacatttcaccccttccatagttcgccccttccatagttcgtcccttctgcgacgttgatcccacttgagggtgcatggttctgatgccacttaatataaccacttgggtagaactc

SEQ ID NO: 226404 - DNA, 3369 bp, Cannabis indica
gtgaacaaagcatacgacaaggtcaaggtatgatttttgatctttattgaaagtaaataagaatttaatgaatttaaattttatttaggacataaaattccaacatatgggtaggcgtcagcgaattctttttttggggcttagtcattttgtctttccatttgtcgtttgcagcattagagggcctgaccctagtgtggttgaactttcccgcaggtgggttttcattgttgagttttccttggctaccatattttgtagctgaagaagggtgtcttgtatttagcgggttgcttcttgttgttacgctatttgcctttgttggtatgctaccacttgtctttctcataataatcatcttcatagtttttgtcatattctttgccacaatcgtcttattgatcctcactgtgatcttcttggtcatcttcattgataggagtttcatcaacatctttctctcattgttgacctctttgagtaggatggctgcccacatttgacatttctccatccctacgacgcttgcttgaacattcattggagggggcagttttaactcattgtgcgacatcattttcacagtcttgacgaccactgtgaatctagtggcgaacattattataaatgacaacaatggataatacttttatcagatcttaatgaaaataccaaaatatttatcgatatttttagaaaatgaatgaatcataaattaagctaaggaaaaatgttcaagagataaataagaagataattttacgtagttgtggcgttaaagaaccttagtagtccatgagtcaatattattgagctagaaaagctataggttattttttacacaagagtattcttaccaaagttttagaatcctaaactttatccttgaatttgtgaaatgagttacaaaccctaacatgaatggatgatgctctatgtataggctaaagtcagtttacgagtttgcatgtgttaactaagcccactaatgaggtaaaatataacattatattgacttcgtgttagttaggtgaggccccaacttgtgagacaatggctatccatttggaaggggaacatttgacagtgacaagtggcatgtgccgccgatcatgctcagtacctgtcagagaagaaggtgttggacaaaaggtatgtcacttttggtgttgtgcacatttcttaggcctgacacaagagacaaacccctgttttgtgggaattggtgtcagaaatgtgccacataggactactccttgaggtctcttcacttgcccctctcagactaccccacgagggcatcttgatacgctaggctgggtatttcatcttctaggcgagtcgcttgtctgggactaataaggtccgatttcactgtctgtgcatgagatttttagctaaatttggagcgatggtccaactccaagttagtttgactgggcctgtgaatgggctcgtctaggctaattttgggccttaaaagtacatgtgtcacctatctagaaaaacgaataacattaatatttttttttttttgagagagtggtatgaatcacactatgacaatcgttgacgcaacaaatttccagtcaacaagttaactgtttagtcaaaatatatacaaagtcagaatatgagtcactaaaaacaaagcgacttatataagaccaaattatctcgaaagtttagacaaaacaacttgagatcacttcaagaggcatctgatgtaaacaatccaatggactaaaactacctacaaaattattaaataacattaatatttaatttcactaaccctctaccagtcgttttaagttgttatttacgtccaaaaactttagaaaatattctcaatattctcaatatcacaattgaattctcaatatgcttgaacaaactttctcacgaatttatctagactccctctaaatgactctttcaacaagctcccttgttgtttcaataacaaacctccatgaaaaatctctcaacctaattcttcatatttatattgttacttttctcttcaagaaccaagtattatacacaagaagtagcgagaaaatagtagaatactttctatttttggaaactaatgaatgatctttattgagctgaataatatatatacaaaaattttcaatagctcactaacagattgaacatactactcacatgacccaaaataaaatcagtaacggactgttttaaaattctgtttaaaacagaacaaacaactttgacttaatttggacaacacagtccttaacaagattaacaatgccctaagtaaagatttggtaaacttaacatttctttgataaatctcaatcaccaatatctaattatgccaaaattttatcacgagactaaggcttagtaaaaatgagtacgtaatataaatcctatgagtaatgtgcatgggaaccaatgaactaattacattgttaatgtttaaggataactaaatcatggttttttatttatttatttggaacgtatatgttcatattttccttgaccaatataaatatatataaatatacatttataggtatatatgttgccttgcctgcacttaaaatctaagctataataaagcactagttgaacattataattctcgttcatctttgcattatttaaagttttgatgagtcccgtacaattaaaaaaacaaaagaagagtagtttttataagtcaaccatattattatatctagtatactgtacgtataaacgaaacttactttggtcataaattaaacttaattagaatataatagatatattgttattactttactacatatatttatgtatatatagtcaaatacaatattataggatgcattttgcttcaagttcagtctaagcaaggaatagattatgtttgacaacctgcattcacacaataggcatacttgatgacttaatatatatttgataatatatatattatacagtaattttttttttttgagtatgtgttttatctaaagtaataaaatgtgagtattattagactttctttttgtattatttttttttttaaaaatactaatttttttcaatacaaagaagtatattatataaaaattttgggccttgactgggccctaagcacggcctaacttggcatagtccagagccgagccttgatactatactaaaaacattaattaaatttgctacaagaaaaagaaataaaataacattaattaataacatctggtgtttgagcatttctgttttatgaagttttcctttcagagaaaaaataacaagctttaagaaaataaaggaaattacaaaaaacattaatgctattaattcttaattaaaaatatgtgagattttcgtgatgta

SEQ ID NO: 226405 - DNA, 1173 bp, Cannabis indica
attaccccaaataaatccaatatttttgtaaaatgccctttgcttatacctcaattccttattgaaagaatttttcaaaaatatcatttttattaaatgtatgagagctataagaactaatcacaacgttcataaaacattaaaaaaatacatgctgaaaaatagtcgggcgacatgtcgccttccttggcaacatgcaacatgtcgcctatagtgtaaaattttaaaatttggtaacaagtaactagttatcaattttttttagtatttagcaaaataactccaaacagtctaaaacttcacacattgactttatgtcatctatgcaccctataagaaataaaaatatataagtcctctaacaactgtatttccataactatcatttaatcacattcaaatacaatagtaactcaatttactaattaagtgataatatgaagatgggttacaaatcatatgatcatcaatataaaaaatttataattccttttagacaccataattcacatacatgtaacttcatattttttatattataatttgacaaatattatttatcgtactaattgatttaatataaatattatattatataaaatgatatagtaaattattacactactaaaaaatttaattttaatcataataaaacttgtgactaaaagtaaaaagttgtgactaattataaatcatcattcttatattgtaactaaaaagtctgtaactaaagatattagtcacaaaaatcataatttattgtgactaaatatatttttactcacaatacttgtttgttgtgactaaactaaattggtaacattttgtattaaaatattatattttagtcacaagtaactttttatattgtgactaaaaatcaaatttagtcaccaaaaatttatattaaaactaaaaaattgtcattgaaaataattttttttttacagtattatatattttaatttaaatattatattatataaaataataaaacaaattatgattccttgaaagtgggattgaatattgacaaaataaaaagctgtgaataacaataatagaaagaagaaacaaaagaaaaggtgataaagacatgaatgtccataagttgtgtgagtttttttcatcagaagaatttttatacgacaaattcttctgatgaaaaaaact
